United States Patent Application Publication US 2014/0057251 A1 - sequence listing, part 184

SEQ ID NO: 379280 - DNA, 2700 bp, Cannabis indica
gtagatcttttgtaagctttaaattataaaagagcattagggtaaatggaagggactaaagttctatgtcccaaaaatcctagaacattctcattctctttctcacgtgagccctaaacacttagtctatttctcacttgttcagaatctgttatacatcattctcactattgtaacattcatagagagccacactataaattacaagataaaagtttgtaatctgtgtggtattatctctctaatcaataaaactaaaaagggagtagatcattacccgctaaacaaagggaccaaacctctataaattgatgtgtcaatttctttatttgcttatattatctacacgtggtgattgtcaatcataaataaggctctgctgtcagttgaccaaatctgaggtcaatattttggagctttcactgagagcattatttatcaacctgatcaattatcatggttgtaattaggagaaccagtacgtccacttcctcaggtcttcctcaagaccccatgattattgatcccaaagtctgagttcctcccaccacggcaggcctcactaatcaaacacataccgtcaatccagcaaatctggaagatccacccaatacaattaatctcgttgatcctcctaagacaatgaatcctagttatccacctataccgctcaaaatagacccaccaataacacctcgaatagaaggccctgttaacataaaaaaacctttgtggagtgggaccaggactgttctcgggtattatttaagggaaatagggccaggaattggcaaatcagctattgatgagcctcatgtggacctaggagaggacatcaaactggccagactcaaagaagttgtgggccaggtcacccaaattgaagaaccatgcgatgttggttgtgatgctttttcctagcagagacgtgaattcctgaagtggatagatgactaggaggccatcctccaggcccatcaggtagagttggactgctgtaatgaggaggtcagtaacatgataaggtagtttaatgagagaactgtcagaagaggataagatcttattagagaccctttgtaaggaaggctcatcaatagtttgggcaaggcttacaggtaggttgacaatgtgcaaactgtccaaccaggtccctcgaacacgaggatagaccttcccctgcttgaaaatagtcaaatcctgccaaacaagccttatggcaggaatagccatttcctggcaccaggtggtgtttggagaaaaccaggtatttctggatcaaaaacaccaccactcggccagcctctggccgcctaacagggtgatgctcctcctcaaaatatttgagaataggtcattttaaggcccgtctttgacaaactaggccctggaataagtggagacacacaagatagcaccaactcaagaagtgagaattgaagtgactttgttccaccactaaacaatcactttagatagttggatccacgaaattcaagcaattggtatgatcaactacgtgttggtccacgaatcggaaacctgaccggtttggctggccaagggagaccaacaagtcaaacactgtcccaccaagggctagccgaccatacccaattgcctaaactagggcttgccgaccatggttagttacctggactggggttggccggccatggacagacacttagctagggcttgaccaaccaaggtttggcctaccaagggctccaacccagccaagagaggccactcaatcaagttcccaccacattagatccttctgtgcaagcacagttaaatcaaattagatatatgataaagggcctacctggcccaaaatcgtcagaccttgaactagataggttaagggggtctccattctcgtcatatattaatgccttatgcctgcctatattcaagatgtgggtatggaagatgtatacgagaagagaacatctcctagtccacataaagcattttgagatgcaaatagatctcccaaaagttacttgagatgtgagatgcatgatcttcccggtaactttatctaaaacagcccatcaatggtctttcaagcaagcactggggatgtttaattcttggaatgaattctctcaagaattctccacacaattctcatcctctaggaagataccatcacaactggaagaccttgtcaaggtaaagcaaagacatggtgaacctttgaaggatattcaaaggtttatggtcgaagccactaaggtcaaaggcctaacagaagagggtcattagacggtcgttttgtggggcatccttccattgagtgacttttggaaagatatacggaggatctcaacccacaatatgaaggagttcctcaaacgagcagatggcttcataaaattagtggaagcaatctgacaagcccagacaggagagcaagtcaatagcaggcagtctcagggtgcaatgcaatcccaagatcttcccaacatgaaagctagtacaagcaataccgaccaggcctcaagcagtaagaataatggaggcaaacgcaacaacaaaaattatggccggaacggtggagaaaagggaagtacaacacttcccctacaccacataaccaaaaagaaaaggaggagaagtacacatgcttcaccctcctaactgagactcctgagaccatctacatggcctcttaagctgttgtcccat

SEQ ID NO: 379281 - DNA, 1316 bp, Cannabis indica
ccccgaacctccgaatgctactggatggccgatgggaggttcccctgcgcaatctctctatggtctcctttcagtgatcactgattacgccaacaccttagcttgctagccatagttgacctccaacaactctttttccttctttagatcttcgaggtctctctttagaattttgttttcatccagcaaacccttgttggcagcatgcaactgttgatttttggatttttcctgcttaaatctgtgacaagggtgcctacttctttaacgaccctccccaccatcaaagctgcctagaacatgaacaaaatgtgagaaaacaaaaacagtaccagtgcttgttgtctggcagtgtgggcaagggtgaatgcatcagtgctgctgcaaatcgctcattctccaggggcaacccgggcacactgctagccacctgggcaaaaagtttgatagcggagggtgtagcttccctccccaccttaggtgccatccgcttttctagagcctcagtgtccaccattggcccaagaggaatagtggcaaaaaggcctttagaggtttcgacccttttcatagtagaaagcctattcgctctcacttgcaaatccttctttcttccttgtgccacctcctcagggcatgtttgccctcctttgccctctgcatggtggaaaaatccaaaggaataaccttcatggggaatttaaagcctacaaagggaatcttgagcagggaagactgctaaaaccgcggttggaacgattgatgctaaagctgttgcggctgttggtgctgccattggtattgctggtatagttgtggggtagagggtgacagattaaatggggtaggattgttggctcgttgaggatcgatgtcctgcctcttcctctttctcgtagaatctcctccattctagaaacttatcaaatccgtctttttcgtagggcctagcattctgactttgagaggtacatgtaagcacaattaacacaggacaaatgaatcgattcaaagttgtaaggatgggaagattatttgacatgcaacaacaaaattttaaacggctacacgtgaaagggtcaggtatccctcccaaaaggttccacctttgatgcacccttgtccgagaatgaagggaataggccagtataatggttatccaaccccaatcttggagccatgcaagcaagttcagaaacgccaaatgaccgtactcaacccttttgaatgaggtaaacatactcaaggcacagaaatatgcacgcagtttaatcctaataatctgttcttatgaacaagttgttggaaattatttt

SEQ ID NO: 379282 - DNA, 3982 bp, Cannabis indica
ttttttccctaatttaaaacgtggatggcatttttgtaattgactgtacatttttataaattagagaaaaaagtggaattgtgggcattatagtgggagtagtgaccataaccgctctcaaccgtcactactaataagaaaatcgaagtaacatttcagatattgagtttcgagtttcagaacattctaaagacaaaaactaaaaacaggaaacacagcgaaaacttttgtagagggccggtgagttggtccgaagtgttgagagaatgcctgtacttagttgaagtgtgagaaaagagtgaaaaaatggtagggaacagagaagaaggcataaggaaagggccttggaaagctgaggaagacgaggtactaattaaccatgtgaataagtatggccccagagactggagctccattcgatccaaaggccttcttcagagaactggcaagtcttgccgtctccgttgggtcaataagcttagacccaatttgaaaaagtaagataatgacttatattctcattctcttccaatctctatttgcttatattatgttatataatctgacatgaaaatgggattgttcctgaaatttttttagtgggtgcaagttttcattggaggaggagagggtggtgatagagttacaggcacaatttgggaacaaatgggctagaatagcaacctatttgcccggaagaactgataatgatgtcaagaacttttggagtagcaggcagaaaaggctggcaaggattttgcaaacacctccaactccctccaaatcacagaaaaaacaggtggaagtttctcgtgatcacgaggctcccagttttaaggtaaagtcatatgcagtttgttgtatgtggtaccagactattttactcattttttttttattcctctcgtctaaatgtggtctaaatgtggcactgtaagaggtaggtgtgtggtacgactttttttttcgaatattgtaaataggtattccttttgcattgttttttgtttcttttaaatcaagttgaaggtgaaacatacaagggaaaatagtgcaataatttacatgggagttgaatgtttgttatattgatgtaagatcttgatgttgtcactattctggttggttggttaatatttgtcattatatcattaggctcgaaatatatctctttcatcagaaggagaatcatcatcaacattcttgcaaagcttatcatcgggcattcagaattcagagacgatcaaaatgttgccgctaccagatctagtcaatccttctagaatgtttaattttgatcaagatattacaaatcatgcagagtttagcactactgagaataatctgtgcattggctcacaacaattaatcccttttcctccggcattacaggcccagagagaactcaaattttcatcagaaggccaagatcatttgcccatattcaccgacccttatatcgacatgttcagctctatggattcttctaaacttggaaatgttgcggaattttcttttggacaaccgtttcttgaaccactagaaactattagaactggtgttgcaagagagaaaattgacttggagcctgactgcttctttgatgacttccctatagacgtgtttgatcaaattgagttgcttcccaaatcatcacagcagtgatttacagtgacattaacatgaaattcttaaaagcttctattagcctttttaccacttacctagaattttacaagaaccttctgatctggcagtattctttatataaggaaagacttctgttaactcctatatgatgacttattaattggtcggtgtgctttatatatatatatattcatgctcatgatacatattgtgataattaactatctacattatgtttagagttcttgcttattaagacatgaaaaaatttcaaaacacctggtcaactataatataaagtcacaataatgatgttgatttgctttgaagaatgttaattgcgtaactttcaatccccatctacaatcttgaaagcataactatatatatttttttattactataaaccaagacatgtttgacacagaagatatcttttccgcaactgcattgcatcgttaatcaaacctccccaaaaagggcgagcgccgatacacgaaaatcaaattaaaccaacaacaataaaataccaagaaaaagaaattgtgagtaatttgttgcaatgccataaaaaaaaatgagtctcaaaatagcgcataatgattctcacatgtaatcatcgttgaagacagatcacttggttccttcatcttcatcagtaattgtgggacctaaaggtatatatcggataccagtgtggcctctgtgtgtctctacctgaaattctccagctgtgtatgactcgtctatgttgaagattggccgttttaaaagtgcgtaggcacaatactctacttcatatacagtaacacccttcatgaactccgacactgcaaccccaacgccttcccctgaacccaaagttataatatcaatcaaatacaattcaaacataaatggatatataaataatatcaaggatcacagctgtaccatgagttacgagaaggaggttctccgtaggatatttgtcagcaagggctttgacgacatgagcatatctatttcttgattggctcacttgctctggccacttaggcatctgcaggtttatcaagaaaaaggatacatattaggcgaacacgacacgacagttttggttttggaaccaatgaaagaagcccagaattttgcttctgacctcgttgtatacaggttcaacagatcgatccacagttccagctggaaacaaagcttccaactcggaaactttgaaaccgaactctccatctcgaggagccgactggggtcgaatagcttcgttgtttagcatctcgcaaagtccgtactcgatcgagactttgactttggaggtgtcaatcggaacagagccgccgccactggtcaaggcgttaggatcatcgacgagagcaaagagaccggagatgacttctacggaggtctgaacacaacgaaggaacggcgacacgaagacccggtggattgggaaacccaggttctttcggaggttccgacccgtaacgagcgcccgggttagaccggattcgaacaagggtggatcccagggccgcgtggctgtggagacccagaggggcacgaagttgtccatgcgatcgccgtgcctcatgacgacgacattttggtagcgactgggagagccctgtgtgattggtccggaggagtccattggctgagtagggagagaaatggatcggagtttgtgactttttctggatgtttgagaggaacaagtgcgcaagggaatctagtaccaaatggtaacgcaagcattactaaggggaatttctttgattgttaataaaacaactcatattaattttgactccacctactaatttgtaccaattaatttttttaattacgtgaacttcctattttatcttttttcaaaattaaaaaaaaaaattgttaaaatttaaatgttccacccctctctcgcttccctctcgtgctctctttctctctccattaatgttaaagtagttggccaaataatatcaaatcactaaagtatccctaatgctcttaactatattaaccaattgtcagatatgacggttggtggtctgttgctattattcagctacaacaattggtacttaaggtaccattcaaccaatcttgaagtagtgaacttggagaaaataagaacagagagagagagagagagaacaacttgagagctgttgagtaagaaagagagttgctttgagtttgtattggggtgacacattgtctgtgctcatcaccattagaggagacaattacagaagctttgcttcctagtatgtgtaatttgtacaagttgtaatctctcagtttgaagctcaattaataaagactctcaaag

SEQ ID NO: 379283 - DNA, 4844 bp, Cannabis indica
acaaaaagggagctggagctaggatcattctactctcccttcaagggcaccgattccagagtgcattatgttttggttttcacgcctccacaaatgaagcagaacatgaagctatactggtaggcttaaaattggctaataaagtgggagcccaatagatcgatgtacacagtgattcccagctggtagtgaatcaaatttctggtgaatactagacggagggtgaaaaaatggttgcatacgtcatgatgccccgacagttgttgcaaggatttaaaagttacaatgttcgccatgttctgagagaacaaaattcgtttgcagacatgttagccaaccttgcaaaaggccttgagatcatccatcacagagtagtcccaatatgtcaccaggagaaactaagcattggggttcaaggggtaaattccatagtcgacaactctcactcttagatggaacctatttataatttcctgaattcgggggagcttcctatagacaaggccgcttcttgaaaggttcagtatcaagctccccgttacgtgatcatggatgagaaactttatcgcgaggactatcaatgccatacttgaagtgtatcactggaacagaatttagcactatgatccattagattcgtggtggcttttgtggagaccatacttctggagccaatcaatctaagaaaatccttggccaagggtatttcttgccataatgaagaaggattgcatagaatatgtaaggaagtgcaagcaatgctagagatatgctaaggttccacgttcaccacctactgagatcacacccatgagtagcccatggcctttagcagtttgggggatagacctggtaggatccatccccacatgaaaaggaggagtcaaatacataatagtcgcagttaattatttcaccaagtgggttaatgaatattttcacctcaaggaaggccctagacttcgttattaagaacattgtttgttgatacagacttcaattcaagatttcctctgataacggaaagaagtttgacagcaagcacttcacaaacttttatgcccaacatggaattgtgaagagcttctcagctgtagcccggctgcaggccaatggataggtggaagccgtaaacaaaagcttgaaaataatgttgaagaaaaatttccaagcctataatctcattggtcagaagaactttcgtgagtactatgagcctacagaaccacagagagaacttcaacaagacacgcaccatacacaatggcttatgggtgtggagcattaattcctgtggaggccatcatcccctctcatcaacgagatacttatgacccttcccaaaatgattccctgctccaggaatcgttggacttgattgaagaactatgcgaaaagtcataggtccaatttaaaatgtaccaaggaaaattttcccagaactttaattctcaagtgaagagtcatacatttgttgttggagacctcatcttgaggagagtatttcaagctttgcaagagggtacttggccctaatttggagggcccatatgagggactttaaaaagtaggctaggaaacttttcagcttaagcgaatggatagatcgaaggtttttcatgtttagaatgcagaccacttatatcggtactaccaattggccaaggtgaccaagccctgattaaaattgcttaagctttgtgtaaatttttgtataattaccctccttatgtaaaacctctgggtttaatgaaataaagataaaagtagtttatatttgaatttatgctttacgtttttaagccacatgctatgtttaaaccagtgaccaaaaagttagagacgtctaaacttcttagctcacttggggggtactatgtctagttgtgtatgcacccaaaacttacagtgtgttatgtttatttatttttcttatgcatgttaaatttttataactcgcatttaaagcaaaattaatatgcattttcaaccaaattaattaagggaaagatacacttggattccttttcgaggttaaaattagtctaaactctgaaataagatgcgtttttaaccaaatttcccatgaaggagagattcgcctgaattccttctcgaaaaattttagtgggttgcgtaaagtttaaatttggtgaatgtttcaaaataaaacgggaaagtcttgcttgcactcctatgcatttttagccttatcttggctgtaaaatatttcctaaaatccatagtgtgtaaaattggcccgcaaaatttatgaacagccttcgtagtgaaagaatcttattgatgaagtctaggatgagaaaatgcgcttgaacgatatcacagtttcagcttaattcctaagcaagggataattcctaaaatctgtaacatctttaaccacttttctcggagtttaacttcacaaagagcaacagtgagggaacgcaggcaacacggaagctcacccttccgtgataaaacaatctctaaccagtattcaataagcatcattttaattatgtaattgactattcaagacattcaaaaagtgttaacactttgcgaccacttgatggttcgggaacagtttaaaagaaaatttgtgttgttatgatatttaattaacttatgtttgtagattctaaaaagggttgcaaccgggacaatcctagctgagaacattaaacaagtgtttgtgaacgcttcctaaatcagtagttggattaagtattgagtgaaatctaaggttttaagtgttggtcattggaaccgtaaacttaaaaacaacctaagataatagcccttaaaatgatctaacaagcacatacaagggaataaaagctcgaggaaagaagtgaatagaatacaaaggtctaaagctattatagtgccccgcagaccagacacattaaattgtctctgtgaaaaagaaaaaatagtagtcttctaagttatggcaaagagcctcttagaccgggcttagtaaaacaattatccgaatataaaagttgttctggaaaagataagtgtgttacaaaaaagagcaagttatgattgttactaggatggaatgtttgatttggcatttggttcctggggtggcacttctaaggcattttgaggaagaggaacatcctctcttgagggaatgtccataattcctagtgcttgattttctccgactaagacattctcagttccctgggtagcaattccaactgtatcatcctctgcaataaggacaccaatataagtattaagatgctcattgacactgcgcttataaacctcaactctttggaaaattcctcaacatccttaccaagatagtcgtggatgttgggagtactttcctcaaggtgagtcaacatgagaacatgggctaggttcaatgaacggttaagggctcactagtgagactcttgttcttcctaacactcttccctcgcagtgtcaagatccttacacagggaggtgaactctttcaaagcattgtctcagcctcattgatataagagtttggtctctagcaacccagctttgattttggtttgtgcctcaatttttttatccttttccttgatgccaacctttacagctgtgacctgatcctctgcgagcttttatagtccctcagttatgttgaccttggcttccagccctttgatgtagttatttctattttggagtttgagattcctgactactgcctagttctcaaggtctgttttggccttcagggcttccttgagcttctcgttgagtatggatttggcagcctctaactcctcaagatgagccttatatatttcctcagtatgaaacgtaaatgacgccttatacttgttgtacttttacaagtacttcttctcacctattagattagcttccttataatgttgtttaacctctttcttgatggcttcaatttagagttccaagttcttctgagtagtcaaggaaaggttaagctagacctccattatctacacctccctgcaggtccactctgcgaagaatgccatataaaataaattgaaaaagttagggaaaatagtgtgattttgtactaagaaaaaggtaaaattaaagtggatatgagaaatacccctaccattttttctttgaagcattggctaggagcacagggttgaaactactgccaatagcccatttcttagtcattagctccatcaagctagctggaatatcctcgatcgcatctgaagggtgccaactccctgctaaggcgagcaactaactatttgcccatagctgacaggtccgttatgagtgctaaatacctcgaattgcgaatgcctgtctgtgatctcgccctcttaatcgcggataatcgatcagtcctagactggacaacgctgcattcttccgcaagcctacattttatgtatgcattggatttttgtacttgttccaagacctcaggcccaaaatgagcggacttcataagaaacttaaagggtaaaggcgagatgtttggcaagttagtttagaggccctgagcaagcttagatgggttagctgaagatgaggccgagagtgcttggttgtctaaggatttattgggtggtttatgttggttgtattgttgttttgactgaatttaagtcaaagtattagttgccaagaggaccattttcctgtcattggcgctaccaattggtggttgagtggatggtggtggttattagtttcaagtaggaaggcttcccaccctggcagatcttgaatctcgaggagcagaatgtttgacacttttatcctcccttcttagatgagggaagtgtttgttgggtttggtgccctaaataaaacccatt

SEQ ID NO: 379284 - DNA, 1612 bp, Cannabis indica
gaacttcatgattgactctgctcatctttgttctggctatgcatatcaagtatagaaaagaaaaccccctatgataaagtcgtccatctaaaatgacatatttaggagcttgatattgaatcttctgggccacaaccttattagctggaagctcccaagaactcaaaaattgaaaagttgggcctatctaggaattagagtgatcaataacttttaccccttatgtattaatatttggggcttccaggtgatcgatgggtaccactctgtactgcacgattttggaatctattccatctttgctagcatattcgcgaatgaattctgatcccttaggacttgacaaatgttatactttttgaaatgttgcaacaattccctagatcgagacacataggtggccattcttttgcccttagtctgatactctctggatatctggttcacaactagtttggacttacagtacacttttatattatgagcccctacttcgtttgctaattgcaggccgactatcatggcttcatgtttcgctttattgttggaggctaggaatttgaattgaagggccctctagagctgctgtctttgtggagagatcaaaattactccttttctagcacacttctcattcaatgctcagtaaatgaagactttctagagctccagtttggggattgactcatctggatcatcattcaatgtggtacattccaccacgaaatctgttgtagcctatcctttgatggaaatttggggttgatatgaatatcgaattgactgagcttcatagccaattttattaatctttcagatgaatccaattttaacaatacctagcagagagggtagtttgttaaaccttaatggcatgggcccgaaagtagggtcgcgacttctgtgaggcaattaacaagtaataggacaatttttctataattagatatctggactttgagcccaacaatctttttcttatgaaatacactggaagtaggaccttcccttcttctcgcacgaatgcgacacttatagcgttatctgacatggccaagtacaggtatgatggttctcctcaactagatttgatagaattagggccttggttaaatgttctttcatcttcttaaaagccttttcacattcttttgtccacttgaactttttgcttctgcgcaagacattgaagaacagaatacatttatcagcagaattggaaacaaatctactgagagtagcgatacttctagtcaaactttggacgtccttatgtttcttaagggaaggcatgtccaggaatgccttgaaattttccaaattggcttctttttctcagaagcaaacaatgaagcccaagaattttcctgaagaaactccgaaggtgcacttctttggattaatctttatcccgtttcaaataatggtgaaggcttcctccaaatcattgctatgctctcctgaggttttggacttgaacagcatgtcatccacatacacttcaatgttcttcccagaacatccttgtgttgggttttatgccctaaataaaactcatttcaatataatgagatttacttattaatatagatcagaaataacatttaatgtt

SEQ ID NO: 379285 - DNA, 3899 bp, Cannabis indica
actcacctcacccctttgctcgcacttcctcactcgaatcacatcccctcgattgcactctctcactcagtcgccccttgtgccacgcctttttccatctcacaccacacaagggaggggcccaaacctcactgctccatctcacaagagatacactccaactaatctcatgttatgtttgggagctctcctgtccaataatgttataaaaatacaaagtagataaataaaaaaaaagccttacaaggaaaatttttccaacacttagaaatatttctaagtgtttactttggacacttgaggccacctatttaaaattcaaattgcgatttggcaaaagtgcaaactaaaatcgcattgcaaaagattttaaattgcatttttcgtgtagtgtagtacggtggggacagtttgatgaacaaccctaaattaaccatatacaacattaaaaaggaaaaaaactacaaaaatgaaaggtcaatagtaaaacaatgagaaatttacaaaaaatagtattttttgttaattttttacactattacattcgtatatatatttacggtgttttataaaaataatacgaaaataaaaaaaaattacataaaaaaatagaaaaataacataaaaatgatatacaaataacaaaattcaacaacaaaataataagagtacaacataatatataataacatgaaaacaccaaaatatcttattttctataaataaattcttaaaaatcataaaaataataaaaattccatacaagcatattttttttgtttattgtttttgtgtattttttttaaattaatccctaaaacatatcccattttcaaaacacattttagaaaagtaccgactttatttgtatattgggcttatttatcccaattttagcccaacccaggccctcttaattagggttttgttatcatcatcatcctcaggttgatcttttctcttataaatacgctcttttcacatattcatatcatatcatccactctctctctaaacctctcttttctaaaccctagttgcagttctatttggtctagtagcagccgtgaggaagaaacacctgtgcttgaggcattaacatgtctatgacggctacacaaacctctaagaagttctgagctgtatcatacttggattcatttttctcttttgaaaattttccattctttttttttattattatttacggagatattgaaggcgaggtgatgattcaaattcattaatctgtcaatccgctgatactggtaacagtcttgatgttattatgaatctcgacaggctctgatcgctttctctccttcttcaaattgttccttttttaaaaatgtttttcaattcaattgatttgattgaggtcatgtgatgaaaattgatttgtaaatgggtaatttgcgtctgatttaagcttgatgctaacaccttgtagaactgatgcctcttacttaaatctctttgttgtttaattttgattttgaatgttttattggacagtgacgattgtgattaggtctcgttcgtcgtaatgggctttaacaagtccttgccgaccattctgttatatcaccacccatattctgagtcctatttttttatggtcgatgattaaatactaaattttgacaagcatatgtccgaattttccatgttgataatcaatcttatgagaccctgtttttaaatttgattattttgttaattggtcgaatgatgattttttatgcatagttcagatgaaattctgtgattacaatgttactttttagtctttcgctcctatctgacgactaataatctatttttttttaaagaaaattgtttatattttaatacaagtgaagcttgtgatgattctcatctaataaatgagttatttttaactgagataataatctttgaagttttttcaccttggagaactgaagcttccttatacttttatgtcttttcttacacattactgaaaatgggagaggtttttgtgagcttgtatcataagttagaaataggttatcttttattatatagttaattaaaaatttatatggttgagtttaaagttatgttacctattagtttatcttttaaattttaggcattgtttgtccaatcaagaattgtcgaaggcatttgttgttcctcttgtactagattgtgaatatgtgttgaacccaactttagaaagtgagaagaaaaacgatagccaattccctcatttacaacaaaaaattttgtagtcgaattgatttgattttttttatttggaaaaatttcaaatgataggaattgtaaatgtgatactcacacaatttaattaggtgtcaaaaacctaaatcagaaagtatttagcatcttatcagaaaaatgatagccaattccctcacttgtggccaaagacgttgtaatgtcgaattgaatcgatagtgtcggactataatatttttaggattgaggtttttttttattatttggaaaaatttcagatattagaaaatgaaatgagaagaattgtgaatgggattatgggagtgatgttgtctgatgtcatactcacataattaggtgacttttttttttttagaaaagtttgttattttaaattagaacctgtcatttacaacattagagagaatagtagagagaattttctccagatacaaacattaacctgcaataaaagtttgttttgctaattcatgagctgcttgattagcagtcacgaacagaaacttgaggaagattggataactgtcgtcaaatatctatgactaaatctgacctaaaagatggtcgacgattaactgcattagccagtaataatgaatttgtttcaatgaaatccaagtttagatcatgagccatttgcaagtaataaaacatttcttgaggactataacaaccaagagctgattttgacatttccacaattacatttcctaaagaatctcgaacaatataacctaatccaattttattgtttgaagaatcaaaagtactagttgtagatcttggttgaagtgtagcatattcatgtgggaaggataaagccagtagcagtgggggagcaattaacttcagatgtttgattgttatgtgtcacaccagtgccatgtttacccctcaggctcacaccagcaaaaccagttaggttttggaaattatgcaggtaagccactctgcttttgagtagattttggttggattctaattttttttcccatgaataacattgttcttatcatatcaaatggaccacataatgcaaataatcgtttccaactcaaatttggtatgaacttttgagagatgaaacaagaaattagttggattagagactgcagcagatcaaaaatcaatggtgaaattcgtttgaaaccaaactgatcaagcatgattgcagctaaacattgttgacataaactacatgctgcagaagtgatggtctatcgaagtgatggtctttcgtttgaataatgctgcagcaactggtattgaatttcgaatcactctccaaccaaaaatcttcacctttgaaggaaaattcaaactccaatatgatctccaccattgttcatgtgagagcgaagaagattcatttgactccttagcaatcgaacaagctagatggtaaccagatttcacagtgtattcagcagttgtgtgatgccaaacccaatcgtcctgagaagcgtcaagagaaagagaaattgacagaatgtgatcgacatctacaggagagaaatcagcttgcaatttgggaaaattcaagaggctgtttggctttacagtttaaaaactgtattctgttttttaaaactgaaaacagtttttaaaaactattaggagtcgtttggcaaaaatttttaaaaactgttttt

SEQ ID NO: 379286 - DNA, 5718 bp, Cannabis indica
ttgttctttttgaaatcgaagaaattagtttgagtgaatagaacagaatagttgaactttacataccttgcttgttgaaacttgaaatgccattggttccttggtgattcttatacaacaacgctttgttgaacttaaaatatgtgctgagcttgttgcatctgaactttaaaaccagtagagatgaacatatgaagttgaaatccttaaattatcttgagcttcttgttaccttaggtttattgcggagtgagcttgtgcacaatctagcttatttctcttctgcggcataaaggggttttaaaccttcataccatcttgtattttccaaaaccatactaggtttttttactattgttttttttattgaaatgtgttgaaagtgggattgctgagtcgggtttgagatggcatagatacctaaaaaaaaaaaatacatgtagtcggtacaagctaaaagctgaaatgtcttatttgggatgcctaattgcatatgagaccaaaacagggtcacgaattgttttgagacgtctaagtcctaatggagtaggaagtcatatgggttggcggtaatcattattggcaattatcatcacttagatatgaatgatgataagtgtaactcttttgatgaagtaagtgaacatgaactacacagtttagtacatttgtctgtttgaaattcatgtgatctgcttaaaatttggtgctaaacattgatggttgggtgaagaaactttcttccgattttccgttcaaggtttagttgtagatatttcctgttttcttgggtcgagaaaagtttccttcgaaactaacattttgtatctaaaaattgattggagatcaccatacatccttgtgggaaaaatgttttgttatgtgatgaagtattctgatatgatacaagttgcaactgaaggatcacttgtttcaaggtgactcatattatgtcctcacttacaatagttctttttcattagaaagaaaaatacattcaaccacctataattttcagtacattctaggtgccatgcttcagtaggtggattttcaacataataccagtacaattttgtttgaaggtgttctctagatttccagttcattctacatggctaatgtcatgacatggtactttactacagtttctttgattgtggctgcttgataaacaaactctatttcatgtatactatgtagctttgctcaactatcactatgcagaaatgagatttgatcgttgttcactgtcaccgtagctaatatgtttctctaatttctttttcgtttttttttttgttttagactacttcccttgcctgaaggcactctatgtttgattgctgctacagctttttgtgctgagtacctcttgttctattttcactcaacaacacataaaggcttggagggatactaccacctcctccttgttctcttaattggcctttgcatactatccactgttgccggagcactgttaccaactagcttccctgtcgatttgagttgtggcattgccatgactcttcaaggcctctggttttatcagactgctttcactttatacggcccaatgatgccagatggttgcctgctcaaggaaggtaaagttctgtgtcactcggtggacagtgaggttcggggtgagctgcttgctaacctccagctctttgccatggtccttggagtcttcctttcagttgtgagcggtcacgcctttgctgcttctagatttgggcattctgatactaggagcttgcacacaggtcaaaatggattagatcatgattaagactatagggtaagaaattttacaattatgttcttcacttcagcatagagaaggccatagaattttttttgttttcttttgtctcattttaataaaaatgaaaaaatttcatgtttgaagcatgcaacgaaaagggcaatgatgtttacgctagagaatttgttagtgataagtatgtaatttaggagtttttttttcttcttctcttcaatgtgacttctctagcatcaattttgaacctttttacttttaagttatactttttgtttatgaaacataatcaatactttttaggaccttaaacctcttccaaattgataaaatcttgttctatgcacaaccttaattggcaatgagttagagagtgaaacattagaggtgccttgaacttttaatgttgaattacacagtttatgttaaagtgttcataaaatatctagtttaatctaatccacaaaatgtaagtgcctatattatgcacttgtagagattgaatattaatttacatgtaaaaatattcatctaatctaatttatatttatttatttaaaagattatatataattaatattttaaagtgaaaaaaattataatttaaaaacttatacatattgtataaatatattttaaaattcaatatatcaaatatataccccatacttatattatatattaaattttttttttttttaaaaaaaaaaaactaaacatttcttttgcatataatttcttttccctttccctatactataagcaaaatagtgtgatttgggttggataaataattggtacttagactacctccaatacaaaatgtaaaatttgtgctaaatttagcacaaaaattgagtttgtgctatatttgtttcactatctacaattttatttcaatacatgagatgtaaaatatgtaaacaaaaattactgatcatttaatatgttattaaaaatatacattttttttagagacatttatacttttataatattttttattcatttataaaaataaaaacattataacctcgaaaagaataatcttaaaatagaaacaattttataaaatgaaaacaacataatctcaaaacggaaacaacataagtggaaacaacttttataaaaatgaaaaaaaaaaatttaaaaaaaattaaaaaaaaattaaaaaaaaaaataggaaatgtagtatacatagcacttctctttttttttttattgtttaaataatagtaatatggtaaataaagaatgtaaaactgtgtaaaatagaattataataattagtggcactatcgtttataaaaaaaaaagtaggaatttatgtaggccaaatttagcacaatgttatatcttgtgtcaaatttggtacactttttaaaacatcattaaagtagtgttttctttttaaatgtattaaaatatagtaatacaccacctttttagtactccattgaagacactcttatgtatctatactattttctattaaaatattattgaaaaaatttatgatacaccctctaaaataggcttactgatgcatccttctgtgttttgatatcatatagttattgttatccgtgttttgtgcaaaatgtgacacatggtataatggagaaggcccaactaatattccgttaactggagtcctttaaagacgctccgttgctgaagagtctccctgaactaagaggcatccagggcaaaaggatacgcagaagcctacttacgacagtccttgcttccaaaagagcgagatgagaaatgttctgggtacgtgaggaaggatcgttcacttggttcccaaatgagcactagaaaggcctaaagcggatatcgaccctcgtgagggattgcggatgttgacttttctcttacgccaggtaaccaaagtgacgattgtgcttttcttgacaaaatcagatcttgtctcctacatttgagcatggtagtgcgtgcaccccccatctttcttttactagacagacactacgaatttctatttgtaaaggagcaagctttgagtgacacgtctctctcgcttttaaaggttaatcatttgaatgacatgtccacgtggtacaaaatggtcctcattatccagctactgcgcgcacgagcataatgatacctaaggaatcaaccagtcaactctacattgcatgcaatttaccccaatagtgggatttaagcaaaaatcttaggcgggtcatggatctatccatacccaccacttagcctataaataccccttcattttcaaaggagtcaagtcgaaaaatacatagataaaactttgctgaaattacccttaatcttcttattctttaaaaaattaagggtaaggagttagggtttcttgcaaaatactgtaaattcatcaatactgcccttagaggctaatagactgacttgtggactaaggtttattaacacttgaaaaacgtaaaaatctccctcacttaatttttgaaacttattatttctttagctcttgaatattttagttttctaaaatttcgataaatattttggtactttcattgagaacgaagaaagacgtaagccactattactatcatggtgttgacatgaaagacagttctcaagaagactctaaaggtggcatcgagatgatcatggaggaggtaaatcccctctcgctagagcatgcccagccgagcgacgcgagaggcggagatacgtccaatgtgaacgatcaagaggagcacctagacagccagcatgaccatgttggcgacaataaggatgttgagaatgaggaggaagtagaagatgacaaaggttacgccaaaaatgggtcttacaaagatgactaccatcactagcacaaacttgaggtaacaagagtttccaaggagttattcaaaactcagcaaaagctagctcatcaggaaagattttctccacaaatggaaaaaaatgttaggccgtcttcaaagcaagttcggagatctagacaaaggagattctaatgatgacccttcgttggaatatgtcagaagaaataccaagggaaaaccagttaatggtaggacctctggtcttgtatatgacaaagagaaggaaaaaagggtgaccctaacaattcttgtgtccctaagcctcctcaaaaaatgcgaatcaagctaacaggccttttcagacacagaagacagccaacgcctctaggcttggacgtccttcagcctagaaagtctctatgtcgccgaagggtactggtaggaaagtaccaaaacccaagggaagagaagaccaccctagtgatttgataaaccaggacggtggggtgaagaagcaatactctgatgatagtcggtccaccgtggacctcaaaaggcgtttatacgtaaagtatgaaaaagcaaagagtaagaatgcgaggccacgtggtaatgacctcaaaaatcacctaaatgacaaggttcgtggaaaggatctcttggacagcaacacaaaacgattagaagaccaaatatctgccttaacaaagttggttcgaaaaaaaagcggagctctcactgattcagaggatgaagacccagagccttacgttaggaggatcactgaagccccacttctagagaacttcaatatgccccaaatcgggttgtacgatgggcggcgcttagatcccaaaacttgcctagccaaatataataagatgatgcaagtggctagggtgagtgatgatgccaagtgcttgtgcttttctttgaccctcaccaagtttgcgaaggattggtggaaaaggctagctctcagatcaattcattcctagaaggatttacaatttatgttctagaagcaattcatagttgcctgcgaatactgttaagcaaaaattttcacatttaacatattaaaataaatgcaaaacacaatttcacctatgctgaatt

SEQ ID NO: 379287 - DNA, 1315 bp, Cannabis indica
aatctaccattatgtgaccataccccaaacaatgcttacatttaacaagtaaccattcataatcaattccctcctccacaagttgtccatattcattcaaataacagaaagagtgttctggattatcagttatgtccatttcaacaaggactctagcatattgaactctcgttcggtccttagtatatttatcaatcataattggtttcccaattgtgctgataagagcacttaaggtcttttaccccaatactgaaggccaagattatagagtcttttacatagagggacaaacttaacaagcttgaccgcattcaaattagaggtccaaggtcgaactataataggtttcctgtcaaattgaattactccattctcaagcacttcatctgagtagcttcatcattgaacttgaccatagtgagacccatagtcatcctcgcaatctggttaatgcctaaatgcccccaaatttgtctaataaatccatcaaacacagcaacagggatattttctcccaataccatacaaataatagcagaactccaattagcttcctctaatttcacctcatctaggtctacctgagcaattttcctaccatccttaacaataggttttgttgaagtcagcttgggatcagaacagaaattcttaccctcagtgaactttttccaactatgttgtgtcgttgagtgatggttctgagttgcagaaggaatgttcacccccaattccacttcctccgccaagcttctactcctcggtgatttcaacgattccgtctcctcgcatccttcttctttaatagaaggatctctgtgatcaattccaggtatctttagtaaaccagtctcgattaatgaatcctctgcatcattcttctcactctgaatctcaggcaaaaccttcgcaacactattgatcgactttcggaccaccttcctcttcctcgccatggaagagagagagagagaacgagatcagaaagtttaaactaacaattgatcgactatccattacttgtttaaactaacaatgaattttctgcatttattatttctagttttcaatactctatttgctcctatttttcatttgattagtgttcatgatttgttaatcttgtgattgctaatcgcttaattgtttaaagtttagttgttttgattctgcactgttaatcataattttctcacagagagattaacaacaatccttttcctttctgtaagagttggtgaaatgtaacaccctaactagcataggcgtgttaacgtgattttaaacttgttgtgcagctcgttgctaatca

SEQ ID NO: 379288 - DNA, 3509 bp, Cannabis indica
gttttttttttttctttttgcaatgcctttacgggagccattgtacttgaagaaacaaagcagaaaagagaaaagggaagaacagagtatgttcaaaaaccagagagaaatgcagaaaaagttctatattattaatgaccaattaagagtttatatacacgttgaaaatacaaaactattacaaataaaacaaccaagaagctaacaacaaaataacgaacttaactaacactaaccaactgtcaagacagttagttagttagttaacatcccccttcaaacgaaaaggggaagacacaactttgagtttagttctcaaatagtgaaatctgtcttttggcaaagacttggtcagaatatcagcaacttgatcgacggaaggaacatatctaaccgagacttcattattgagaatttgatcacgcacaaaatgttgatcaatttcaatatgtttacagcgagcgttaaatacagggttggttgcaagagcagcagccccttgattgtcaacccatatgatgggaacatcagctaatgtcacctgcaactcagtaaaaagagaatgaaaccatttaagttaagctgttgtgtttgccaaggcacggaactcagactcagtagaagaatgagcaacgacatgttgcttcttagtagaccattagatgaggtttggaccaaggaaaacagcatagccacctgtagaccttcgatcattaaggcaacttgcccaatcagcatctaagtatgctttaatggataatcgtgttgctggtgtaatatgcagactgtgagatatagtgccctttaagtatcaaagcagtcgtttacatgcttcctaatggacagtagttggggcatgaatgaattgggatagcttgttgataatgaatgccacatctggccttgttagtgttaagtactgtagtgctccaagagtacttcggtataatgttttgtcctcaaaaggtagaccctctgttaaagccaatttatgagcactacttgtgggacttgagcaaattttggcaccatctaaatgcactttaataagaagatctgttatatacttgctttgagacaagtacatgctatttgagtctctgtgtatttccactccaaggaaataatgaacaacccccatatctttgagagaaaaaatagcattgagattgctaataagttgctgaatgagagaaggattagaccctgtaatgagaatatcatctacatatacaagtagaataagttgactagaactagatccatgtatgaacaatgaagtatcagccctcgaagccttaaatcccaatagagtgtttttgagcttgtcagtccaagcccttggtgtctgcttcaatccatagattgctttgttcaatttacatacatgattaggatattgagggtcttcaaagcctttaggttgagtcatgtaaattgtctcactaagttcaccataaagaaaggcatttaagtcatcaagttgccttacttcccaattaaatgtgactgctaaggtgagaaccaatataaaagtgactggtttcacaacaggactgaaggtgtcctcaaagtctaatccttgctgctataaatatcctcttgcaacaagtctggatatacatttatcaagagtcccatctgcatttaatttcaccatatacacccatttattatctatcaaaaccatgcgaggttcatagggcactaaagtccaagttccttgagctttgagagcacgaatttttgttgacattgaaccattctaaactggatctctaagggtagatttcattgattttggctcacgaggcaacaaatattctggtagcctatgtttagtagcaagataagctttaagcttgtagatacctctcatagatcgtgtaaccacggagtgagtgcgagaaagattaccatctacattagaactagatgtagcaacagtattgtcaggattagtgactggtgcaggaggttgctgagatgttgcagcagttgcttcagcacttgctgtgatattagggcctattgcagacaaattgagttcagtatcaggtgtgagagaggaaactgaattaggtgagctaatgtgtgtagcatcagcagtgctctagcagcagtaggctcatgtaagtatgcagcagacatatttgcaccaggattagtaataggcactcaataagctgaaccagagagctcaatagcatgattaggtaaaacagtatgagatccagtaataaaatgcattgtaggatacattggggcttcagaatttacctttgatgaagtagtagaagtcttcgaatcaggaaaagacaactcatcaaagataacatttatagcaataaagattcttccagcagcattttcacacaagtatcctttgtgttttggagagtatcccagaaataaatattcttcaaatatgcactcaagtttgtgatggttatagagtctcaaatgtggatagcaagcacaaccaaatagttttaaaacatgatagtcaggttgttcattgaaaagacactcatagggactaagattttcaagaacaggggtaggcatacgattaatagaatgagtggcacactgaaaagaaaaccaccaataagaaagataaataccagcttgtgctaagagagttaaaccagtttcagttatgtgtcaatgtttcctttcaaccagtccattttgagcatgactatgaggacaaggttgtttgaaaacaatgccttgatcactttaaaaaatttcaaaaggcctatactctcctcccccataagcttgaacagctttgattggtaaattgaactgtttttccacaaggcttttaaacctaatgaaggtttcaaaagcttaagacttcattgttagaggaaaaatccaagagaaacgactataatcatctacaaacactatgtagtatttatatttttctttggatgagacatgggaaggaccccataaattcgtgtgcaccaaagcaagaggttgcttagctctagatttagacaaaggatatggcagcctatgatttttgcctaattggcatgccttacaaaattgcaaatttttaagtgagcaagggatattagctgtgtaaaattttgcttagagtatgagaagatggatgtccaagtttattgtgccaattattaatatcatgagtagtatgtgacagtaaaacagtgggattatggacattagagtagaaaaaagatggctctttattaatttgttcattacaaggagaggtttaagtctcaacattagtacaacagtgattacaacacatagactgactcaacagggacttagactgaatgtcttaagtggcaagatgcacctacagagcagtgtttgaaagacttgagctatcatctccaaggtgatagagcccatctttgattttccctttaagctaaggttgtccccgtttcattgtccttaacaaaacaacaagttttatgaaattccaagaaaacatcattgtcattagttagttt

SEQ ID NO: 379289 - DNA, 2980 bp, Cannabis indica
ctcctcctcctcctcctcctcctctcctcctcctcctcctcctcctcctcctcctcctcctcctcctcctcctccttcttcttcttcttcttcttcttcttgtcgacttcaagaggatgattagagtaatacaactattgaatacttagtgtattttagtacatatataggttgcgataggccaatcgcaacgtcttaggtttttgatttctcaaatgtgatgccacactgttgttgttatatttttcgttgaagaattcttttcttttcttgcatgcaatttcttgccagagtcgagggtgattctggtgcactgggtatttcttgatttccttcacagttaagggtgtatttagcacttgaccacttgagtatgagatttccttgattggggcattcagagggggcttctctccaagtaattaggagaccccatccctattttttatttcattctttggtgtggggactaactgcttagggtttctcttctctcaaatgtgtgaagaactttgggaaattcacgcacaaggattttatgctttcgactcggacatcctttctttccatcgcaataatccccaaataggtttttgggaatcaagaaaaatgccaaagaggttgaagaggtctcagagcccacgctagtcccactggctgatgttctcacaaatccagtgcctgtccgagactatgttcaaagaagcgaccatatgggaggaagatgagatgaactcatctatgaagtgtcaccatctggctaatatagtggacaccaatggagttgtcccttgcctggaaagcatttataactgattattggctaagaatgatgagacctccaaccacaactacaatagtttcagagcttggagccacgctcacatgatgtcagaggcaacctacctctctccaggactactttataaacttttttctttttgtgggcctcacacattttcaattgagtcccaaggtctatcatttgacggatgaataaatttttattctttactcatttaggggttgggatatccctacccttgcaaaaaaattatatttttacgaactggtatgtcctcccaataaggaggataaaggttaagatgacttttactttctttaagttcatctagacaataatggtttggttctcttcaactttcaaaagaatgtcaaagattgtaggaagcaatttttcttttccactgctttcaggctttcgatcacccgtacctgtctactgagtggaccaggattggtaagtaaatatttgcttgcctcaccttgtcttttttgtttatttttgagtgagccttattgtgaatgtttcatgaccattttcattccatatgacgactcatactcaactctttaaggagcatgaagatgttttttggacgctaagcaaagaagaactcaatgtaggttatctgatcactatggctaattggcaaacagttctaattgaaggttgatcatagtaaattttggctcgagcttctctgaggcagctcaatgaggaagtaacccaatcttttgggtgaacctcataaaattattgtgtttgttcttctcttgtctcatcttctcattatttgcttgatctgtgtgtacatgttttctctggctttgtgttcaaacaagaatggtcattattgactctaaaaattgacacatgtgtgtgagttgtgtagggttatttttggcataaaattttctacaccaaccacctcgttagtcgtcacattaaatattcattctatgggaaagcaactatggcatccacaactcaactttcaaaattccaggtaaataccattttagattttgtgttttgtaaaagttattgattgaactttatcgtttgttaaatgacaaattgaactctatatttttcaaaatagtatagaaaagtaatttgagctaattttttatcaaaataaaatttaacaataattcgatcataatgtgttatgacaggagtagatacattctctgcatctgtccatacgagaaattgtcacttctcatctgcttggtctctgcaatattgttaagaggttgtggtttttgtcaaaattgaatttgagaattgattattattacttaacttctggacatgatgtgcttagttgggtgatacaggcccctttcttagaccatcttaatgacaatcaactaaaggaggaattccttatatatgcagctagcttacatatagaatttggcacttttggaaccaagcttttcatcagaataccttgttgccagtggcagaaatgactaagattataaatagagacattcattgccatcagaagtttgctactaaacagagtgttgaatgcttgtcgcgtacagtccctatgttggagatgccttctatccaagagggattttgagtttacgttgatgccactctgtccataattccccagctacagtagggtttgtggtgaaggatgtggttataaccaaactctagtgctctacgcgtgtaaggaacctcttgtcggggagttacaagctctttttcatggagtgagggccattcgagagcttggtattggtcaatgtgttattttttcgaattgtcaattactcactcaagctattgctgctaaagtctcaaacttgtctatagggtcttcttttgctaagttgttagatggaattgattgtaatgttctttgacattctagggagtttaatgatagcgcccatgcatgctcatgcaattaattggggtctttttaattgttgtaatgggtttctttaacttttggaagatgaatctacatgaagaaatgctaaagggcaccagtggtgcctagcaccttcttatgtgtcaatatcgctattggtccaactaagtatcgagtcccatatactttaatataatagcttttagggagtatcgctagctaatcgcaacgcgacatgtcgcaaaggtgctagacaccactggtgcctaata

SEQ ID NO: 379290 - DNA, 11249 bp, Cannabis indica
aatgtgaaaattttaaaaattgtttcattaggcccttgtgataggcacaggcttagcatgtttatgcccagggctgagtttgccgaagagcatccacaactaatctttgagtaacacgaactaggggcattcctgtaaatctgaataaaagcttcgatcttaaaatcattagagaaagggaactctaatagtaaatacactcactcacagttgttaaatcctagtaacaagttccaatctgatgttatcatcaatgtcacgcaatttgctgtaataacttgttatcttttctctaaaagctttttgttttttgttttttgatgatgatgttttagattgaaagagagattaggatgtgaaccttctgatgaacaacttgcaacttcattgaagatttcaagggcggaattgcagtccaaaatgattgaatcttctttggcaagagagaagttggcaatgagcaatgttcgtcttgtcatgtctattgctcaaagatatgacaatatgggtgctgaaatggctgaccttgttcaggtatgttatctcttatgtttctatagctaaacttagttgaattgtaattgattagatcataatgttagtgcccaagtgattataaaccactaaccaattccatattttggtactctatggtgccaaagtctcactagcttatagattattagttgaactgtaatggattggaccataatgtgtagggaaacttggctagtctggttcgattcgcccaagtattcgagaacaaatcaaagagaaaatgaaacggtttttctttaatgctgcaagaatgtaatctgtacaagagttacctctaaaacctttataagtgtttattaattgacttaggatttgagctaaaagacctgagctgttaaccaaagattaacactaaataactaacataatgatatgagaactatcaaccagtaaggggactaccacattggtccattagagggtgttggctctgctctcgtaccatttgttacaaccactcgggtaggactcactcctaacgatttgcataagagaaaaaggtgtccaagctgatgtaaaccgccaaccaatctcatttttagtcgatatggattctaatctgtttctgctactcttttgtagggtggtttgattggtctacttcgcgggattgagaaatttgattcttccaaagggtttcgaatttcaacctatgtctactggtggatacgacaggtaaagcagtttagcataagtaaataatcttgataacttcggtttggaaaaatcatctgttcatttacattttcggttgacaaaatctaattgctaaaacattcctctaagagattacattgaatttgtattctaaagggatttgattggtctaactcatcacttcgattatatactttcttttctagtttttagtctagtttaaaccaatttttgttcgttttactcaaattgcttagtattgatttttatataattaattacttatttgattgtgtaaacttgcacttgcacacactaattttcacaacagatctcatataatagtatttgtacttcttatatgtatacataacagaattatagttaagaatggaaatgttttttctaattttggcagggtgtttcaagagctctagtcgaaaattcaagaactttaaggttgccaacacatttacacgaaagattaagttcaatcaagaacgcgaaactgaaacttgaagagaaaggaataacaccatcaattgatgtaagtttcttgagtttaatttgcttgttatgtaaagtgaaaatggccattcttatatgttgttgtatgttattcaacagaggatagcagaaagcctaaacatgtcaaaaaagaaagttaggaatgccactgaggtattcaactctagaaaattctttctatttttgtttgtctgtttgtttgtatgtctctacttactaatatgtctgtatttgtaggcaattagtaaggtattctcccttgatagggatgcattcccctctttgaacggtctacccggtgaaactcatcacagtgtaagtgtttatatgcgctccaaagttctcgtaccatcctagttttatccagggtcggccctgaacttcagtgggtcatgggaaaaaaaatatttaggccttagacacaggtctagtctgcttatggccagggccgagtctggtcttatcttctcatttctcataactattgaccttattttctccttcaatttttcagtatgttgcagacaaatgccccgataacatcccatggcacggagtagaggagtgggcgctcaaggtgagacgaacaaacacctcattgaaatttcgatatcttcatgtttcatgggaatggagattgagatatagttgtgtaaaacaattgcaggatgaagtgaacaagctgatgaacacgacacttggggaacgagagagagatatcatacgcctttactatggtttggataatgagtgtcttacttgggaggatattagcaaaaggtaaggatattagagttattagaggttggtgaatggtgatattgttgcagggccgactctgaaacttagtgggtcataaaaaaaaaattataaggaggattttttggcgcttgagctaggtgggccttaaggacaggcctatacccagggccgggcctatgttgttgttgttgttgacatgtttgtgtgtgtttttcggtttgtttttcagaataggtttgtcgagagaaagagtaaggcaagtgggacttgttgcattggagaaactaaaacatgctgcaagaagaagaaagatggaggctatgcttgtcaaacaatagaaagaaattatacagagactgtatatatatatacagagggaatttgtattttccaatttgttttcatttcctaatttggtgaatttagtatagaaggggctcttaagagtaagcatacaatgattaaaagcttttgtaagttttaagttggagcattttcttcttattctttttcttcttcttggaaataatatatgtatgtattgaaattggtaaacaagaaaaatatgaaaaagtaaacaaagacaattatgtcactaaaatttaattaacaaaaaagttctaatagataatttttttgagttattacaataaataaactcataatgtttaatgattgatatttcattagttacaaacatacattttaatagacattgaatagtggagtgaatattattacaattagatacactaaatccaaaaacattgaatagtactatactctctttttctctctaagcaattttataacaacattaaattttgagattttatatatagtttaattattattaaaataataattttagtgatttttttaaataatttctcaagagtattcaatagtactatactctctttttctctctaagcaattttataacaacattaaattttgagattttatatatagtttaatttttattaaaataataattttagtgattttttttttttaaattttcaaaagtctcaagagtattcaatactacaccactacaacaaataatatttattatgttttttttattatttaatattttatctatatactagtaaatttttttttttttttataattttgaaacctaagcgtttagaaactcaaaacacacgcctgactctcttatcctcacgaccaatcttaaagggatattcctagtaacataattttttgaattgatctggaatactaagaaactagttgttggactaatcttacaatgtcacttttttttttttttcgagttacacacctaaaattcaataccacgaatctcgacatacatacacttgataacagttaagagacttgtgttatttggcttagaacatcttcaacctatacaccaaattaaattaagtgtcacactatcactaaatttgatattaaaaattttttttactccaacgacaacattaaaatttacactaataaaatataatatattttaacattaaatcatatatatacacaaattaactataaaataacaaataaaaaaggaaaataaaatgcagttgctataatactgtagctaaaattgcaatatataatgatgaaataatgatctattagggctcgtttggtacgtcgtataagagtcgtattgtattaaataataaataacactatgtttggattaagcaatgtattgtattaattattacaactaaattttttaatacaatatatattgtattatttaattcataataaatgatccgtattaacttttattataatatttacaaagaatttggagtcaacaccaatctccgacctagacccgaaccaagaccccgaatttcggacccggtcccggacgcggacggagacccgtagttggtattgggatcgagtgtattaaaaatatattataattttatacaatcaattaatacaagtaaataccaaacattgtattgtattaaataatactaatataatgcaacacaatttaacacaatagttacattacaatagcgtaccaaacgagcccttaaagtaatatttatactacaacctcaaatttgaggtattattggtgttactcttagaagagtactacttccttccactcttcactagatagtgtcttaaaatagaaatattgcataaatagtggatctatttgagtattcctattcaaccttggatcttgaaatcaaaccccaaaaatatcataataataattgaacaaaatatcaatacatactttacttccatgccacgtgtcacccttttaaaagatccccttttagatccacatgtacacttactcaaatcaaaatcaaaatcaaaaaaagaaaagaaaagactataaaatatcacactcacacactctccaccggtgccggagctaacctcaccggagaagttgcagaccggaaaaaatggcgaaatcttccacccttttctcccattgttacgctccaatcaccttcaccaccaaaacccatcatcatcaccatcttcaccatcgtcatctctctctaaagactcaacctttttcctcaactccactcaatctcaatcaaaaactcaatctcaatcacaacactcttcatcatcatcatcatcatcatcatcatcatcatcatcatcgtcttcattcttctcttaattccgaagttccacacccaaactctctaacccaatgggattccttaacagccaacttctccgccgctgcaaacattccctttctccttctccaacttccccaaatcatcctcaacgctcgtaatctcatcgccggtaacaagtccgctcttttagctgtcccctggctcggaatgctcactgggttactaggaaacctttcattgctctcttacttctccaaaaagagagagaaggaagtcattgttgttcaaaccctaggtgtaatctcacaattcattgtctttggtcagcttgcaatggccgatgctatgccttttccttacttcgttgctaccacagtgctcgttgtaacgggtttggctgttaatttcttgaattacttctatttgcttaatgattcggtgtggagattttgggaggatgttattacagttggtggtttatcagctttgccacaggttagggatttgaaatttgaattctaattgtttggatttttggagtatttgagtttgattatgcaaatctgagaaagaaaagagatgagattaaaatccattcttttactaagatttcgaatggctgtgttgaattcgagttgattgtgtttcgattctatttaggagttcgaattgttttgatttttgagtatttgagttagtttgattcagacttgaattcaatgagattaaaaatttagtcttttactaagttttcgagtagctctgttgaattcaatgagactaaaaaggcagtctttaaataggatttcgaatagctgtgttgaattcaagttgattatgtttcgattctatttaggagtttgaatttaaattcgaattatttgaatttttgagtatttgagtttgattcagacctgaattcaatgagactaaaaacccagagactttcactaaggttttgaatagctttgttgaatttaagttgattagaattccagtctttaactaagatttcgaatagctgtgttatattcaatgagattaaaaatccagtcttttggtaagattttgattagctgtgttaaattcaagttgattatgtttcgattttgacaaaaatgcaggttatgtggtccacatttgttccttatttaccaaacactatattgcctggtgctctatcgtttgttgtagctgttgcagctgttgttatggtaaagctttaaactttgttcttagatatgttatgggttttgtttgtttagttgaattagagtacaaagataatgctttatgatatttctcaggcacgactaggtaaactatctgagaaaggtactaaatttgttggagctatatctggatggacggctacactcctcttcatgtggatgccggtatcacaaatggtaatagtctgctcaactcgaaccaacttcacttttgtatgtaaccttgatggtgtttgatttctttggcttttcagtggacaaatttcctcaatcctgacaatattaaaggcttatcacctgtttctatgttgcttgcaatgattggcaatggactcatgattccccgtgcgcttttaactcgcgatttcatgtggtaaagcattttcttttcaatctcattgtttccctcaccaatctgtaagctctatgctaataaacacatttgttgtggtaggtgtcaatgtgtcattagttatctcatttagtttatagtgtcatttctattgttgtgttttcattcctcctaaccaaacgtaccctcggttcttactaccaaatgcctaaagttcacaaaatgagtacataacccaacaccatttgttaatattacattaagatatcttcagattaaaattgtagtataaaagctaaatatgccacaactaaaatgtacccaatttgaaagaaaaaattatgacaaaacaaaaaatatagaaaaaagctaaagttttgatatgattacaggtttctcggttcttcttgggcttcattcttttacggatatggaaatctagcctgcttgtactggtaagttgctctgtgatgttttttcggttcatttacaacagtgttttcctaatcctatgaattttcgataagcttaagtgatgagaccttgtgcttttcttcaggttcaatagtatcagcaaggaattcttcttggcggcaaccgctggtttcgtattgtggataggtttgtctctcttaaccgatgcaaaacccgaaagaacatgtaagattatatttgttaaagtgatattctgattggctttttattttattaacaggaatggctctatggagagacactgttgtccatggatatagctcacctttcacttcattgaaagagttgatttctggttcttagagagagttattcatcaattgggtagctttaaattgttattacaataaatattatattacaagtaattagaataattattactttgtaaccccttcaattttgtaagaaattattatctactccattaattaatccaacagttttatttatctttttcctgttatttataatgaatcaaagcttcaagttcaaccatatcatatcataatcatccacagaattcatcttacactatagtaaaaattgtatctaatactctatgctttagaagatacaatagacttgacaagatgtcattttcacttataaatcttaaaaaatggacatgtatgaagagtttcatacaagcactacaagtaaatccacaggagtttcaccaaggctggtatgtgatgcttctctattacttttctttggttagttattgttgctgttatttgtagccaaaggaaggaaactgaaaatgagctgtgttaatttgctttgcattttgacagagacactgaaaatgattttacaggagtgaataaggcttcttcttcttcttctgcctaaaactttggagtggaaatattattaaggctttttgtgagaagatcaacatgaaccatttgtccccccctcattggacttcttccaatatggtacccgacccgacccgaagaagacccaagtgtgattgaagtgagatgactaaatgggtattgtatagctgtattgtagagtcatgtggtagttaaatgtaacaagtaacaacttattcatatacttttgcattgtaattataaaggcaatcccattaagagtaactggtttgatgtaaatacaatctatcatcaatcatgaaaatgatcttctaactttggtcccccacactacagttatccttatcagaatctggaagaaaaggaatttgggacccctagtgtttgcttgctgctgctgaaaagctttgatgcattgcttttgcttcaaatagttacaaattagaaactagtagaagaaaacaataaatcacacatttagcaaaatggtcaaacaaattagactcaattttcttatatatcattaaatataagtctcaccgactattataataaagttgagattttaattaggaaagagcatgacacgtgtcatgtgtctcagtcagtcaaaattataagaagaagacataaaaggaaagtacaagagagagagagagagagaatagttctccaacagttaaagcttgaaactttctttgttttcctccaaaggggatgaaatggttggttcagattcaaaaccagaggtgacccagaagagaattctgggtattggttattgggtacagggattcagatgcatgccatggatggctgtgattttcttcctcaaagatgggattggagtggatccctccaccattcagctccttctaagctcagccaatcttcccatggtggctaaaccactctatggtgtcctctcagatgctctctacttctctggccagcatcgtattccttacatcgcctttggaggtactaaatatatatatatattcttatttaacattcaaaaagtcaaaagcttgatcctttttgccttttctaatcttatagatttgtatgttatcatttatcaaaaggggtgcttttttctcaatagaactcatatatgtgttgtgtatgtagtccataaatttagcagtgaacaatctgagttcaatgtatttgcagtgaactatatgtttgctaatggccataaatttgttcaattgcaaatttgcagtattgggttttttaaggatgtttgagtatatattgttaagtaccataaaactcatatattgatattgtatagttgtatatatatatatatatatgtgtgtgtgtgtgtgtgttttgacttagtgatgagagagtgagttgtgggttgttgaggttgtgtgtgtgtgtgtctgtgttttgtgagaagtaactttccaacaaactttaaggacaggagagacaacccgattcgagttgcttcctacagctgcctcctttgagtttctgatgttgaagtgattatcactacttagagaggattatatagtgaaagttgagtttgtcataaccgagaagagggagttgatgatgtctgcaattgaaatttgtcaatcttcttagactcgaagctaaacccgaataagcagttgaaagttgttggagaggaatttaattttcttcttagggagatttgtaatcttttaattaattggccaaggtagccattgataatacgacaccatgaagttgcagattttgttgaaagattgtgttgtttatgttattctacttggattgatttagaaacacttaaagggtgtgcttttttctgattcaaactctgttgttacagctttcttacaagcactttcatggctggcgttagcgattctctctccctcgaacattacaatattcaccatggccttatctctcctacttagcaatctcggggcttcaatagccgaggttgcaaatgatgccattgtagctgagttaggctcttcctcgggtgagctccaatcatttgtgtggatagcttcatctgcaggaggagtcctagggaatctcctcggtggtctcatcatcaaccgagtctccccacaaaagatgttcctcctttttggccttcttgcatctctccaactctttgtcaccatcatggtaaaagagagctcactcaaccttcccaagagggtatccgataatggggttagaaagcaactttcgcagctacaaatcgcgttgaaaaagccagcaattgcacggtcaatcacatggtttgcattgtcatatgcagcaattcctgcattgacaggcacaatgttcttttatcaaaccgaacatctaaagattgactcatcagtgttgggaatctccaaagtgtttggacaagtaggaatgcttgtatggagcctagtctacaatggccctctcaagcgagttgcatcatcaaggaaaataatagcagggcttcaagtggtgatggcattgttcatggtatcagatgtgttgtttgtgaaaggggtgtacagaagtattggaatccccgacggggtgtatgtagttatattctcggggcttttggaggtgcttttcttcttcaagatactaccttttagcgtagtgatagcgaggttgtgccctgcaggctgcgaggggtctttgatggcgtttgtgatgtcggctatagctttggctatgatagtgagtggctatcttggagttgcgcttgcagcttgtgttgggatgagccctgctaatgaattttcagggctaccgaaagcccttatagtacaggcgatttgcaccgttgtcccgctttattggtcatcttgtatcccaaatgacaatgaggatgaacatgagcatgagcatgaagagtcttcatcttcttccaagaccaaaagtgaataagaagaattaatgtagagttaacattaattcttggttaaattgattggatgttggaaattcttcttttcttttcatatttattcattatccatttaatttttattttgtattgtatatgttatgtatgtatttatattgaaaattaatagaggaagatgtatgtatgtatgtattttttttttattagtagttactttctatggttttgttgtgtttttatttagttactttattgtttaattactttactttaatt

SEQ ID NO: 379291 - DNA, 4788 bp, Cannabis indica
tagatttctccattggagttgcaaatgctacttattctaaaataaataaatgaaagccctttttgatcagacttttgtgtacccatcaaccgttttaccagaacaaaacttcatagtaagagaaatgttccattgtagagcaataacttaaggttgtttcttacttgagcagagcttgttacacaactccctccaaaatcaaaatgacattaacaaactacacagtacacaacaattagaaccataattaaaggaaaaaataaataaataaattacacccattgctgctttgtggcctccattctctccaacaacccagcaatttcagcttgcattctgatcttcatgttgtaataatcacaatgcgagttctccaaaaccttcagttcatcgagtttcttccttcgcctatcttctgtctcttgcaagcacagttttgagagcttctcggcgtgttctccttctaacttctcggtggttgccctgatcattcgatggtattcctcagcgtcccttcgtgcttcatctgctttactctggaacatcctagcttctgcctctttgactcgcactatgctttctaagctgtcgaaaccatctggtttagatatggagccgaatctaaagtcatcgtcagagcttatgattgaagatttgtggtcactgagacggacatcgtttgatattacatcacgttgtaaactagaactcatgttgtaaggtgcatactttgctgctagagatgtggattgaggaataggagtagtctcttttcggacagagctttgagtctttgaagacaattcttttgtggttataacagaagacgaatattccgacatgttatctgtgtctgtgattagaaaaacattcagtgtcagattcagccatatcagaatgtttccataaatccaaattttaacaagaaacattacatggttaagttcacttttttcagatacatacaaaatacaaagatgcattttaattcttgatgagcaaaagagaaagagactcaaagggggcatgtccaacacttgaggctttatctaataatgttaagagaaaatagaatccaagaataacctctctttttcttcaaaagaaaaatggaggattttctatctacaatgtgcttccttgcacagctttcgagaaaaaaatcatcattaaaaggtcgagtgccccttattagggtccttaaatatttagtagtgttaattaagcaaagttaaattactattggacataactaacatctctagacatgtaaccttagctagttatactccctaaaaattattacattaaattatatgaaacccgaccctaaattgaaacaatagcgatattaatacataaaagggtgctaggcacactcaaaataccctttaatgtattaactttctcctatcatttccattcctccagccccaactacatgatgaaaccatcaaaaaggaaaaattatgcttaatgacttccccacttctttattcttataagtaacaatgtatttcatcacctatgtaatactaattactaaatctgagttatgctttaaaaacaagtgacatttcaatttgaaagaaatgaaatacagaaaaaagacagaaaatttgagacttacacttgaagaattgagtaatggaaccgcaggcatcggttggagacatcaatttatttcccaatttagaaatgatctcctcagccttattgtgtaactccttgcctttgaaatcatcacttcccctgaaaatcttcctaacacaatcaagctccttgacaaagttttcaagaccccaatccttggcacaacagagaaacacatccttaacaaaaccaaacatttcagaagcatgatcacaacaaatgcaatgaaattgcatctcagtagtcccagaaggacctttcaagcttggacctggtttgataagattcctttgaatgccacaagaggcatgacaccaatgagaacaaacatcacaaccaacccaactacaagtattgctagcatagtcaaatttaaagcacacaggacacatacatgagctgcaaaaccctttattctcagaacatattttgcagtcacaatcatcaacaggcaataaactcttgcaattcacattcttacatcttacagacaagaaaatctctaccaactcgaccggtggaaggcggtttttgacagacaaaaagctcccaagaccaaactttacagcaaccaaaatttccaactgatccttttggcacttagacaaagtttccttagtgagatcagaccttctcttgagcctgttctgtagattttcaagctcatcttttttatcaaccatggagataagattcctcaagtattccttcgttgacaagagtgtttcatctgaaagttcctgaattgtttgagccattaaagggacagactcattcacaatttccctaataattctctcaggtctagacaccttccttggtctcccaccaccatcaacaccctcaaaacctctcaaactctcagaagcagcttttcctctagaatccccagattgagtctccatccttagcctcgcaggaagctcagatgggaaaaacgagtgattattattattatcagaactagtagtcttatgcaaactactgttgttattacaagagtcctttcctcgattattaccttgcatcaatgcataaagcccaccaccaccgccgccgccatgattattcaaagcaactccatcaccaacaggcttaaaccgactatgaacagacccattagtcccttccccacagttccaaatttgatcatctttcccaaccgaatactcataattctcagtcgaatttcgagtaagagagcaactggggttgtgagaaaaagggtgagaatgagagtaagaaagagaagcgttggtgtaatcgttggagtaagtggtttgagtaagagattgaaagcttcgggtaggcctggatcgagtcgggttgtggttatgattatcaccgccattttgtaaagcatttgaagctgtgagcgaaagagatacctcaggtaaagctagagaaagattaagagtctcaagcttcggccttttttcacgattctctctctcaacaccattatcatcttcttcttcttcatgttgttgttcttcttctacttccatttctcgtttcgaattcaaattgagaaaatctctctcgacccatttgtcaccttggattgagttttcagaaacaacgacgacttctttacctttgtaattagtatgactactactactcccaccaccacctttatcaaacgaattcaacagatttttcccggaaaattctttctcgagaaaagcctgtttagaagaactgttattattagcattactatgagtgttgaaatcacagagatagcttagagtcagctcttgtgatcctgagttaccgaatttagagaaagctcttgactgaaacccatcagaagaacccatctccgattctctgagaaaacccattcccttgtcgaaaatacccatttttctatctgggttgttgttcttgtttctctcagaagaaaaacgcgtcagcttacttacagagctctcatccatggtgttgttcataccattagtcagatctctctcaccgccaaacatggccttgtggacctttattacaccaagatatagagagaaagagagagaaactaccaagagagagagagagagagagagagagagactgtaggaggagggagcaaccggagaaagagagaggaagatggggtggaagggaacaggggcaatttggtaaattcaaatgagtatccggggacaaattggtaaatgcaatgagtattgaggggcaatttggtaaattgaaatgacttgattcttcaacgcactatcgccgataacggttggtttttttcatgcgtttacacgaataacaacagtaagattctttttcttctttgctttttgggaaatgacctatttgaccctctcacttggataaatttacgtaaatgtgtggttttgaccgttctcttacttatttagggagaagaaagaaaagaagagtacgacttttttaaaaaaaataaaaaaatataataattaatgataataaattaataatgataatgagctgattattatccattttattttatttagtggcctaattaaaggctacgtttctttctttaatattttgttttgaagtcaaatttagacatctattatttgtgttgttaaatatccaccgtttttttaattttcacatccaaaagatgaacctaagggtgttaatcaaaccgctaataccgtacaaactatatgtatcatactacactgcacaaaaaatataatttgaaatattttgtgttacagttacgatttacatttttgctaaactgcactgtgtggtacaattagatacaatttacaattttaaatttaataatcacaattcaaaccgcaccgtattatatattacaaaaatactaattttaacacaatattttttctttttatatatgaacaacttatatgtttacaaaactcaagtcatacaataaaatttatggaacattcaaataaattattctcattttttattttttctaagttcttattgttaacatattattattgatatatatatatatatatactagaagaaagttacgtgcaaggcacgtatatttagttttatgttatgtgttctataatttaattaagaaagattcaataaataatcatataatttaaaattatttaaaaactaaatttaatt

SEQ ID NO: 379292 - DNA, 2941 bp, Cannabis indica
tggattttaatgagattttttcttgagtggtcaagaaaatttcaataagagtcatgatggctgaagctaccaagcttgatttagaaattgaccaaatgcatgttagaaaaaccttattacatggggaattataagagaatgtgtatatgcaactgcctaaaaggtttgagagtgaaaatcctgataaggtgtgtttgctcaagaagttcttatatggtctcaagcaatcttcaagacaagtgtaacttgagatttgattctcatatggttaaaattggagtcaacaaaagtaagtacaatagatcaaagatagatgaactcaagatgaaactcaatgatgagtttgaaatgaaggatctagggaaagccaagagaatcctagggattgatataaaaagatctaggctaaacacaataactttgttccagaaaagctacttacaaaaactaatgtgcaagtttggcatgaataaaatcaaggctatctctactacctttgctcaacagttgaaacttaattaatgcatctcactccctaaccactgatgcattgaggctaaagatgatgagtaaaatactctatgcaagctgtgtaggacgcttaatgtactccatggtatatactagaattgatctagctcatgccataagtgttgttagcagatatatctcagacctaggatttgaacaattggaagccctgaaatagatcatgagataaataagagaaactctaaacactggtctagtgttcgacaatgagagcaaatacagggaggatgttactagttttgttgatttagattttgcagtcaatattggcacaagaagaagttgtacaggatatgttttcactgtcctaggttggtgtgtcagttagaaatctaacttgtcaaaattgtagctttgtcatgaacataggctgaatatatagttgcaactaaagccatcaaggaggcactatgattgaagggattgaccattgaatcgaggtttaagtcaaaaaatattattgtctactgtgataatcaaagtgtattacgtctcatgaaaaatttaatattttatgagaaatccaaacacattgatatcaaactatatttcatttgagatgtagtgctctcaaataagtgcaagtaaggaaaatttacactcatgataatcctgcagatatgtttacaaagattatctgcaatgataaactttgccacttatgtcttgaaatacattattcttatatctagttgactgaaataattcaagtgtatttttttgaggaattagattactaaactagttgacataatcattgttctattttgggaaataaaagttagttattttctctctcggaccaacaaaaacctatacctataaataaatatcaacacatgcagcttaagatggatctcagcacctagaagaatcaaactatctcacagattcagctctctcccttttaagacttgtccaaaggagggttgtaataaagttccacgtgtataggatcaaggttccttagtgggagattttgtgtaattagtgttttccaccattaatggttgtaattgagttataaactctcattgtaatgtgctgagcataaaatccattcattttctatcatcgaaatcgagctaagtatttttcagttcttgttcaattttttgattcttaatcaattctacgtacctctgtgtttaaattgctattaatggttataattaacaacaactgaaacgtgaagtttcatcacatcaagcatgatttcaactagctagaagatgatcaagaataagaaataaaaattggtctaacttgatgaaggagattgtgaagagattgattatgggacaatgaatgattgattgaaaaatcaagcaataaatggtgattgagggtgtgatcattgtgttcatattggaaataagggaatagtactggctttagttcttcatgattttcacacaacactcaagttctcttagtcatagctctcttaattttgctcgttctatcttctactcacactaggtgtaagctctagtactgaggctagtgctcattccctacacaccaatctcttctatccctctcccatttcccatctcctctgctagatttgaaaccctagctagtatctccgaaggccaaaagcatgcttcagttatcaacaagattcaaagctttgaagttctacacaagtacgactagctagggttagcttgggattcaaggtacattttccatgctagttgggttagggttcatagatgtattcaggtttgaatattctatttacttaaagaattagggttaaatattttactgcttcaaggcttgtcgcaatctaagctagtggatacccattgaagaccatataaatcgaagtacatactatactctcttttttgtatttcttttaaatagttattgatgtcactttatgctcaatatatatattggatgtgacattatgaaatttagttttaaacattattatttatttatcataaaattacttaccatcacattaacatagagaaaagtacacaaaacatattattaagcaaaatagccctaacttattagactgaagtgacacgctctttggtttcaagttgcccattattatcaacgttgctcatcattcgacgaagtttaattgacaaagatggggatataatgggcttgcgttcactcaactgaataatcttgtaaaaccatgagcccattaatgttcccataactgggcccactatgtatacccaaagccctttgtaccctccactcgcaatcgctgggcccaatgttcttgctgggttcatcgacccacctgatactggcctgtttatacaatatataactattttggttagataaataatataaatatatatctttatatattaaaagtgtctatctaacggcatttcttggt

SEQ ID NO: 379293 - DNA, 3255 bp, Cannabis indica
tgagactctcagggggcaatatgctcattctgttagggtgtacatagacgaagctgtctttccattatatcgaaagcttacaaaggtaattgttctacagttttccagtcttggctttaaagagatgtcaaccgaccattatccaatcttcatactctgattaggcaaagggattcttttatgatttccagtgatttcgatttgcttcttgatgaatggaacattttcttcaagtactaagaatcactggctattgtaacttcgtcaaggaatctactctaaatcttttttttctttctttctttatattcagctaacacagagcaaatcaatgcaagccatttgccaagtttatgcggctgtctcttacatctgcattggtgatgcagaatcttcatcacaggtgaagtgtttcactgtgacacccatatgatttcttcttttagctgttataattttgtttcaaaagctaaaaaaaagaaaaataatatccttatccctgaaaaacaaggttttgtgcaggcactagatctgattggaccagtttacagaatgatggattcctttgttggagttcgagagaaaaccagtgttctttttgcatatggccttttgttaatgaagcaacaggatttacaagaagcaaggtaaatattttgaaatctttctattctgatgatatacttgctttattaacttcatcccataccaggtcttgaaaatagagagcatatgttgtgtcattacttttatatgagcttcaaccaacatttgtttcatagtggaggtgatttatctagtattgttgttgtctttgtgactaattctgatttcagctcttgaatgacgagggtaaagctcattatgtgaagtaataaataccagcctctgataaataggggttaaactgatatgggctttacctccctccctgaattgatatattaatttgatgcagaaatcgattggccaaaggtttgcagttgacacacaatcatttggggaaccttcaacttgttgcacaatatttgacaattcttggaagtttggcactagccctgcacgataatgtacaggctagagagatcttgagatcatccctaacattggccaagaagctttatgacatacctactcaggtttgggtgctttctgttttgacaggtatatttttcccccatccattcagttctacttatagctattctagtttgactgtatttttgttatatatcatcttctgagttcagacatggtggaggtttggagtaagtactccaggcttctgtccagcaataatccactggactcaatttctacattgacataattttgttataattattacttattagtttaaattttctacaattgcagcattatatcaagaattgggtgagaagggaaatgaaatggacaatattgagtatcaaaagaaaaagatggatgaattgcagaagagacttgctgatgcgcattcttccattcatcatattgaacttgtaagagcactcattttggtcttctgagtagaaagtagcttgttgtttataacccatataagtaacttattttgttatatgcactgatgagcagattgacaaagaaaggtttcaagtccagcaatgtcacgagctcaacatcaagcgtgccattgcaggcactgccgcaggagtcaatcttgacatcccagagtccgttggtttgtccaccccattacccaacttttcttcaaggttagttgacttagacactggaagacgtggacgtgggaagaggaaactctagttctgacttgtacaggttctgttccgacgacctatcattattaagaaaaaatgaaacaaatagcttagagctctagtttaggaattttggacgtaacctttcgttatgtccagtaaacaatgtcttaagcatcaaactcttgggagatgctgtacagttcttactacttagttatgatgtttctttaacctattctagtagcccctccattatatttactgtgattatgtatcatctcagaacagttaagccaagttatctaaaactattgtatatgcaatttggtcattgcaaaaatgaatgaaattagttctaggactgatttcaattggttctaggaacaagggtatgcattttttttgtggaagttgacattttccaattaagcttcttgtttctcaattctcaattttgagatatggattccatgcaaagcaggaacaacaaatttactttaaattgtcaaataattgatgaggtgtaaagcaatcacttgaaccttttacatcagaactattgtgtagtgtgcataaatatacaattgtggatacaaattcccagtatccttagatttgcttaaaccctcggtgatacatctcagaggctttcaggctagaagattcagctcagcagaggcattattatacatagtgatatgtatttgaaattcaggtatgccgtcttgcttattgttaatattccatctcagtcctcactttcagttagtcctgcgatttctttgagtggcttcatcttttggatcacaaacctgttcagaagcaatagagtagatgaataagaatcccaactgagatgataatattgttctattcgtagcaattttttgtccactgcttaattaaactcataggacaaagagggtgaatcttggtaagtgtggtctctggatgataacttgggccatgagctgagaggtcattgaagtcatagcctttcttaaatgggacaattaaggtatcgtctctcatagcctccttcacgaggagagtaaacagcttgggccttgttcttccacaagagccaacaccccaaatcaggtttcaccaaatctccagcaatgaagtcccctagtccaccaccctatattaacttctctgttacccttttgccatcttactcccgtggctatcttcaccgctgcccattcttgcattggcaaagcggtttttctggtttggggtcccagggagatgggcatagaggtgccccacacttgaagttggttgtcgatgccatgtttgagatttcgggtaaaagtttgtttttttataaaaaattacaaaacttgcaacattttgcggcttgtatatatgtgtggtgtctaaacaagatgagaaattgagctctatgaaaatgtgtactcgattacactccatcgaattcttttatatatttagagtttttggcggttaaaactcttctaattctcattaaattggcatttaa

SEQ ID NO: 379294 - DNA, 7195 bp, Cannabis indica
gttaaaaaaaaaagaaacttctttttttccttcaatctaacgtcattaataatggtggtgtggttctggtacaaactctgagaaaaaaccatttaatgaagatttgggttcttattatttcagcaaaccaagaactgggttcttcttcttagacatctcagtctttgtcaaactaaactttgtcttataaaaggtacttgaaaatcatcaagctttgtcttttttctctacattttctaagttaatgtaatcatgatgagactgtttcttgtttcttgtttcttgttgttttaggaaggtgatggaggagatatggagtatgttttgtgctgaatctgattgcatatcttgcggtggttcttcattcgagtttttgactcatccttcttcttgtactagccacgctttgattatcttcttcaatgttgttcttttgtttatgttcttgatcaccatcggttaaaaagtcttcctcatcaagaacacatgatggtgttatgtcaactctgcagatagtgtcagctgttgtaaatggttgtctggggttgtcgtttttgttctttggtttttggattctacaagagaagctcaagaaaaaaccatactgctctgcctttgaatctatggtttcaagctttatttcaaggctttattcttttgcttattggcttaacagtaagtatcaaggtgaaacaactgcctagaacaccagttagattgttgaccattcttgcaaccttgtttgctggttttacatgtgttctttctctgttcgccgcggttttgaacaaacaagtgactattaagatagctttagatgttctttctctacctggagctgttcttttactcttgtgtgcttataagagctgtaaatatggagagagtgatgctgatgtcattgttagaaatggtctttatagacctttgaatggtgaggctgatagcaaatatgatggtgatgaagataatgagtctgtcacctcatttgccagagcaggattgttcagcaatttctcattttggtggctaaactcgttgatgaagaaaggtcgggaagaaactctcaaggaagaagatatgccaaagctgagggaagctgaaagagcagaaaattgttatgtaatgttcttggagcaattagagaaacagaaaaggaagagtggtttttcttctcaaccatcattattgaaagttatcatttgttgctactggaaagagattttgatatctgggttatttgctttactaaagattttgactctctctgctggtcctttgcttcttaatgcattcattttggttgctgaaggacatgagagttttaagtatgaaggttatgttttggctataacccttttctttgctaagaatattgaatctgtttcccaaagacaatggtattttagaagcagacttattggtttgaaagtgaggtctttgcttacagcagtcatttacaagaagcagttgcaattatctaactctgctaagttggttcattctgctggtgagattatgaattatgttactgttgatgcctataggattggagaattcccattttggttccatcaaacttggacaactagtctccaactctgtcttgccttagtaattctgttccgagcagttggattggccacaatagcagccttggtggctatcattctaactgtggcttgcaatgctccagtggctaagttacaacaccagtttcagacgaaactcatgacggctcaagatgaaaggctgaaagttctctctgaggcacttgtgaacatgaaggtgttgaaactttatgcttgggaaactcacttcaagagtgtgattgaaagtttgaggaaggtggagttgaaatggctatctgctgtgcaaatgagaagagcatataatacatttcttttttggtcatcacctgttttggtctctgctgcaacatttggagcatgctattttctcaaagttcccttgcacgccaacaatgtcttcactttcgtagcaactttgcgccttgttcaagaccccattagagctatacctgatgttattggtgtggtgattcaagcaaaggttgcatttgctcggattgtaaaattcctcgaggcgccagagctgcagactgctagagttaagcaaaagtacaacacaggcagtgtgaaaacagccattgtgatcaaatcagctgatttttcatgggaagagaatttaccaaagccaactttaagaaacataaatttagaggttagtcatggtgaaaaggttgctatatgtggagaggttggttcaggcaaatcaactcttttggcagctattcttggtgaagttccaaacactaaaggcaatgtaagttttctgtcttcaccattgaaacatatgcttcatccaacttaatcaatttctctaatccacatctcatatttacagattcaagtttatgggaagattgcttatgtttctcaaacagcatggatccaaacaggcacaatacaagacaatattctgtttggctcttctatggacagtcaaagataccgcgaaacacttgagagatgttcactaattaaggacttggaattacttccttatggtgatctaactgaaattggtgagaggggagtaaatcttagtggtggccagaaacaaagaatccaactcgctcgcgctctttatcagaatgccgaaatatatctcttagatgatccattcagtgctgttgatgcacatactgcttcaagcttgtttaatgtaatcacatacttctcaacacttccattttcattttgcttaaagttgaatgaatatctttctttgttgtttgtaggaatatgtcatggaagctctttcagacaagatagtcttacttgtgactcaccaagttgatttccttcctggatttgattctgtattggttagtctaattctagttccaataacattacttataattattgacattaaactcaggtcatttcttgtttttttctctctttgacagttaatgtctgatggagaaattttacaatcagctccttacaatgagttattatcaacaagccaagagtttcaagaccttgtaaatgcacacaaagagactgctggttctgaaaggctgtcacaagtaacaccttcagagaaacatttaacatcagtgaaggagattaaaaagagcttcacagagaaacaatacaaaacatctaatggagatcagttgattaagcttgaagaaagagaaacaggtgacacaggattcaagccttacaagcaatatctgagtcagaacaaaggatacatctacttctcactcgggtttgctggtcacttcgttttcgtgatttgtcagatcttgcagaactcttggatggctgctaatgttgataatccaagaatcagcacgttgaagttaattacagtctacttgatcataggaattttctcaacatttattttgctattaagatcacttacaacagttatgctgggagttgaatcatcgaaatctcttttttcgcaactgctaaattccctttttcgatcaccaatgtccttttatgactccacacctttgggaaggattcttagtcgggtatgcatcgaaaacagcaactaatgtttcatatctaatacctttattttttctttcttttcatgaaactaatacttctatgatcttttgcttctattaataggtttcagctgacttaagtatagtcgatttagatgtcccatttagcttaatctttgctgttggggccaccatgaatgcagttgctaatcttggagtattagctgctatcacatggcaagtcttgtttgtctcattaccaaccgtttatcttacttatcgattacaggtaataaccatttaaactagaccattcaacatgttattatgcttgattttaacaagtgaactactcttaatgagcagagctattacttttccactgctaaagaattaatgcgaatcaatggtacaaccaagtccttggtagcaaaccacattgctgagtctgtggcaggatccataacaattagagcctttgaagaagaagaacgattcttttcgaagaacttacaactcgttgacataaatgctagcccattttttcacagttttgcagctaatgaatggttgattcaacgattagaaacactcagtgctactgttcttgcttctgcagcattatgcatggtccttcttccccctgatacttttagctcgggttagtactcaactactatgtttcaatctttttcccctttcacccactttagcaatcatttagttacaaacaaaatttcttgtgtcactgcagggtttattgggatggcactctcttatggcctctcactgaacatgtctcttgtattttctattcaaaaaccaatgcactacagcaaattacatcatctcagtggagaggctaaaccagtacatgtacatacctagtgaagcacccgaagtgatcgaagaaaatcgtcccccagctaattggcctcatgttggtaaagtagagatacatgatttgcaggtataaataacatttcattaatgttatataaaaagtgctatcttttgcctataattatgacattgttgtgaaacaaaacagatcagatatagagccaactccccgcttgttcttcgcggtatcagttgcacatttgaaggaggacacaagattggcatagttggcagaacaggcagtggaaaaaccactttgattggtgccttatttcggctagtagagcctacaagagggaagattatagttgatggtattgacatctcaacaattggactacatgatttgagatcacgctttggtataatacctcaagatcctactctattcaatggaactgttagatacaatttggaccccttatcgcaacattctgaccccgaaatatgggaggtaatagttaaagtttgtggttttttgtctttgaaaatgtctttcttggccacttactttggtgttaataataagactgtgtttgttactgaatttcaaggttcttgggaagtgtcagcttagagaagctgttcaagagaaagaagatggtttggactctttaggtaatgacattgttttcatgcatataacttaaaattatttgcagtataaatacctaagtttagctcacagttgcaaacaaatatttaagtttaatttttcacggtaataatatctatatttctagaatttctgtaggtaccttacgtggtaatccctcattggttcacgttatgacacgtggataataatttaatatttaactgtcaggtacttatggagttctaaaaatataagttaggattttatcaaattaaacttagatatttatctgcaactgggagttacacttaagtatttatgtcgtaaattactcttttttttaacatttttaaggatttttttccttttttgtactgaatttgtttctttttttacaagtaatgagtgttgttgttgttggtatgctgttcagttatggatgaagggtcaaattggagtatgggacaaagacaactgttctgtttagggagagctttactgaggagaagtagagtattggttcttgatgaagcaactgcttccatagacaatgcaactgatatgattctacagaaaacaattagaactgagtttgtagattgtaccgtgatcacagttgctcataggataccaactgtgatggattgcaccatggttcttgccatgagtgatggtaacatttcattactttaaatttataaaaggaaaagaaagaaaacccttttatctaatgaaagtaagttcattcattttcaggacaaatagtggagtatgatgaaccaatgaagttgatgaagaaagatgggtcactttttggaaagctggtgaaggaatattggtcccatatgcagtctgctgagtcacattgataatgataggatgaaaaagcttataatggggattctagtggggagttctaaggataatatcagttgtgttttaatgagaattagttaatgatagttaaaattctgtattttaatgattacttatttattatttaattaattacttaattagatataaaataataatattgatactaaaatatttattttgtagctacaaaacacaactttgtaactgcagaattgaataaaaaataaacagtgcatacaaataaaaacatacaaagtttttatacgtggtatcaagaatctttttagattgttattaatccacaagggcacgcaagaagatcagattcattagataaatctcaaaaacacaaattaattgacatatgcataaatactccctcttcttatataatgcaactttgatgtattctaccttctcgaatgaatcttgctgaaacttcaagtgctcgaactcccttcgatttgcttaaagagtgtatgcttcctcccgagacaaggcttgagaaactttttttcgaaagtttgaagaaacttctcctggaggttagtattgttgttcttcttctttgtagacttgattacagacttaagacaatactaaaaacataaatacaaaggtagagtcaaagacactctcctttacacaacaaaaacactcttttctaataatatgaaagaaattcaaagtgaataaaagagatactaaaccttgctgctaatatgagtatttataattattatactgatattagatagcacatacacggtttagacatgagcacaactcacaaattttttttacttctgtatctacagaatagtaagtagaaggtgcgattttccttttatagaaaatgaaactctaatttagattttgttcacacatatctgattaaattaatttggaaaacccaaatataatcacagcacatagaaaacatagttgaataaataaagaattgatttatttataaaacttatcaaatatgtatacctttcccaatttgggaaagctagacacattttataactgaaatgaatcaatcaatcaaaaaaaaaatatatgggaataaaaatacaactgaaccgagtataattattatataatatttttgttaataaaatatattaaaaataaaattaacaataataaataattgtgtaaatactattttagattttgtgttttgtaaaagttaccaattagattttttattttgttaaatgacaaaatagaatctgtatttt

SEQ ID NO: 379295 - DNA, 3074 bp, Cannabis indica
gttttcagtaacggtctcaacaagtacaattccatgaaacagatcaagactatttagctgcaaaagtatgaaagcaaactctaaaaatcaatccaaaattacaatacttaggcaaagaataggagaaagaatagacagaaatcgccttgaatttaagtcttctacctactccattaatatgagtcattctaggaaggtatccgaaaataaattcttacaaacaaggttcaaaacagacaacatcatactaatgtgggagttaaggtaagtttacggcacaacaagttggatgaacgggcccaacagagaacttgttgtctcctctggcatgacataactcacgatgagagtgttagaatttggaataaggtaaatagggttctatctcaaaaccaattaagaatgggaggaatagtccattcattttatatatgacaatttatttccacacattaacaatgtgagactaacaagtaattaggatcaagaaggccgccgttaggtacgtagtttttgcctattctaaagtctgttgctgtaccgaaatctatgagcttgatctgtccttgctttgttaccactaagttagctgactttacaatgcccatgtcatggattttctttagagaagttcaagtaatagtttgcttgattttcaaggcactacgttttactgagtccactctttgcaaaacttgtccaaacacaacagactgtaagatgaatgtaaagtttctctcccccatttaatcttcaatagtcaagactttgatcaccctgttaggtaaatggtttaggttttcatttaccctatataggaataaagcactacctaggcctagctagactctccacaaaggcatacatatacttgtttgttcccatatttgggaacaaacaagccatttccatacaaaactgggaattggttttgtcagaaacaaaactgccaaaaatgtcaccacattcccactaacaagaaatatacaaaacagaatagaacttaacttatcatacattgatcaaaaacgattcacaattcctgtttggatgtaataaaaaaatataataattgttttatcaatcatttttatgcatattataattcaacatgttcctttttgctccattttagtgtgattgtgctcaaatttacaattataacataaattattgttttaaaactcaacaagcccaaattgtaagagcataaacattgggcccatattaatttgggcccaagtccagcaacaatcactgggccagcgtgttcaatctgttcaaatcggctcagtgagagaattggtacgttaaagaacgataatggaaattagggttccaccattgttcaaccccatgagcacgtcgaaaatccgatgccggagtcagattaacattcacaatcgccgaagggagtagatcataaggttcagaatccttcccgatagcaccagacaaaatactctccacagaactcttggtcgccaatttcccgatccgactagctccgatctcctccatcttcttccggtgctcaaaatacccaatatacccagagcatatgtggtccgccggattcacaaacagattcgggaaccaagccgcgatcgacgaaaacaagtcccgatcctgctgttcgctctcgccgtgattgttattccgtcctttaacgacggcgtttagacccgccttcatcacgcttccggcgattcgtatcccgtgtcggactctctcctctttgattcgctcaatcggagctgatataaatggcggattaaagagataagtctcgatgggtaaacccatcttggccatattctttccagcgagtaatccaatcgccgatcccaacgagtggccgacgatccagacgtttcccgccccggcaacggaaaccagattttgaatcgcggtcgtggcttcctggactcgagaactctggtggattcggttaaagatgcattggaaatcgagcttgaggtctctggttctggtgtcgggttgggttaaggttccgcgtaaagcgacgacgtatttgggggcattttggggatttaattgaaatgggtatttgtattcgtaaatggcaccaaaaatggagtggtcaacattatcgatgagaacatggtttaagctgaaatggaagaattcccagtatggtggagcttcagcttgaggcccttgtcgattctcttgtctgtctctttcgattttgtaagctccttctactaagctcgctgctatggctcttctgtgatgtgggtttttgcctatatatatatagaaactcttatcatcattttcataatatgtatatatatatatatgtgtgtatgtatagttgtgtatatgatgaatgaatttacttaccagtcaacagtagtaaggtgtgaaggtcctgaaactctgaaattttcaattggagaagacatggatctcattctcaagtatcttaatgtgaagaactgttatagatgttatatataataatctaaattttgaccttttctaaatgggattataagtttaagaagaactttttgggaacataaaaagaaggataaaataagaacacaagttgccaaatgggttggtggaatgaaggtcaaggaaacagtttttgttcatattataaaaaggtcacgacttagtagtttaaagtcaatggaatccgtacaactaagatagaagaaagtgtctggtgttctctcttattgtttatgttttttttttgcttttgaaataaagtcttgtgtattacaaaggaaccaaaacaaaacacacctaaagattagtaaagaaccattccacaaaaactcgttatcagttatcaagcccaagaccccacttagctatcctatgagctagagagttagactctctttttacatggaccaagcttagatttggggagatagataacaaatcctgaatacaagagagataatcatccacaatactagggcccctattacatgaatttaacaataattacataaggcactattttttgtgaaatatttacatttttacgttcaaagaatgtttttttacatttttacggttttctaaaa

SEQ ID NO: 379296 - DNA, 2490 bp, Cannabis indica
tttttttttttttttaaagaaacaatccacattatcgtctattactgatggagaatccctgctctgttcctcgactaggaatagacagcgactaagcgaaaacaagggaaataatagggtgctgagatggagcaaggaatgcatacctgcaccgccccttccatgttcatccctaatagttagaaaccatatttattgatcatcacaaaaaattaaccctaaaaactcattaggattttacgaaagaaagtatttaaggctagtacaaatattcaatttttgtagctgcaagagattaatgtactcaattcatattccatgttttacgtaaaatcactgatgtctgtaagtgtgttatctcatatggtatgcatattatttgttttaattttaaggtgactgactgccatagattaatgttaggcctcaaattcgcctagcactaacactaacacatgttaaacaaaatagcggcagaacatagccatattaagaactaacaatcacgacatgtacacaaatatgtgatatggtccattcggaaaaagaaaaaacaatcttgacatgtacacacgtgacacatacaggagacaagaaagcatggaaatgtttaacctattttgccaacagagattagaacctaaaaacagatgaatctaatgcattgtaataataataataaaaatggcactcttttgggaataagattgattcgatcttctatactacaaaattcactagttccagagaacacagcaacattgtgaaaatttcaaattttgtatcaaagtaaactactaaaagaagaaaaaacaggagtgatagcaatatttttattctctctcttctttattttgttttttctttttatagctgtggttgtcccgacgccgcatctaatcccacagaaccccactcgtcgccacagcaggtcgcgagggacgacagagttttgtgtagctacaaggaatggagctagagatgtgtgccaaagtcagacatatccaagtcaatcttgccactacaccaatgccctagaggttattcataatttcctaatataagtttgtttttttaatctgtaataagatttttatagtgtaaagagtaagaaatagagttggtctaacattccaccatgaaagaccatctacaataggttcaagacaatccaaagtctacaacgctataacccaatttggtccacacataaagaacagcaaaaacacaaattaaatgcaatacattaaacaaactacgaaaccccgaaagattagttctttccaaagatcacgaatttacaaaactttaagggttagtattcaagcagaactctagcgtacaatacagaatctatctcaaagtaacacaaaattcagaaaatattatgaaaacaacaacattgcaataggagtataaatttcaagatcgatataaaattaagtaacgtaataacacaaaccaaatcttccagtatccaattatttgacaagtgaatccagttaaagcttaaatttttattcctttctcatggcctgtaaggcctctaaactcttcgttttgtctttgtttttttttcctttgcatccgcaaaagagaaggtcgtgaaatcagcaaaagggcctcctctttcttaattttactacctcttaaaatctaaaagaataatctgtattgtgtaattcaaaatggaaaaaaggaaaaacatactacccgtcatgcttctcagcagaaacgccttgggaattgtccgaatcggaagctgaagcctgagccacagccgcattctgttctgaatcttttgtagcttcttctattcccaattcatcctccttcgccgcattctgttcagaatcctttgcagcttcttctttttccaattccttggcgacctcctcctcggccgccttctccgccttcaaaattggctcgtagtaatcggcgtgagcctccatacacttcttcaagtcgccagtcacctgaaagcacttctccacgatgtcctcctttttcttctcggcttcttcgatgcaattctcccaagcgataaagctctctctgcaaccaccccctttcatgaacagacagaatccacactcgccttcttcttcctcctccgcctcttcccccttctctcctcctttgtcatctccttctccactatcggagctggctggatcctctcgaggtttctccccttcttgggggtccgagtcgattgggcgatccgaagactgcgttgaattccctagggttttagattcggaggatttagagtctgaatcggacatggtcggtttggcggaggttttagaggagttaaagtcggggggattagtaagaaagggtgaattcaatgagcgtaggccgcctgtagcatgggaagggaagggaaggaaattgtggctccatggatctgcttaaagttaaaccccttaaaccctctcgaagctaattttattttttattattatttaatatttattattt

SEQ ID NO: 379297 - DNA, 5294 bp, Cannabis indica
agcttcggtcagaaggaagaagagggcctcaaagacggtcagggatgttggcaaagatgatgttccattgttggaaattattagaggttgttttaaaaatctcttcacctctaatagaccgcctgaagatgatatttcaaaagcaacccattgtattaatacaataattactgaggaaataaacgaagtgttgatgaaaaatttctcgaaggaggaggtgatcaaagttgtcatgagtatgaacccaacagaggcaccaggttcaaatggtcttccttccatttcttaccaaaaattctggtaaactactaaaaatgatgctatcatggtttgtttgaatgctcttaacatgaatgggaacattgagtttcttaatgatatgctcattgctcatattcccaagattgacaaacttgataaaattgaaaaccttattaagtttgtttaattaatgttttaaaaaaatatctcaaagtatttggctgacaaaattcaaagtactttaggagatattatttttgaaagccagattgtgtttgttccagggatgcttatacttgataacaccatcaatgatttcgaagggctgcattgtatgaagaaaaatagttttagaaacgagaagaagtttgctttgaagttacatatgacaaagacttacaatagagttgaatcttgtttcattaaaaaagttatactgaagttgggctactatgatagtgggtggaaaagattatgaggtgcatgaaatatgtgaagttttccttatttcttaatggtagtgttaaaggggaggtgattccttctagagttctcagacaaggggaccctttgtcccctattctattcatgttttgtgcggaagctttttcttgtctcattcaaaaataagaagaggtaggaaagataaagggtcttaggttcggcaaaaatttggtttcaatttctcaccttttctttgtcgacgataacatctttttcttgggagctaattaagaagagtgtaaggtgtttaaagacattctaagtatttactcgaaagcttcaagttagctcataaatttccaaaagtcgaatcttaattgttataagtgtgttggatgagaggaaaaaattagcttattttcttaacattaatttggtggatgttcattacttggatttaccatcttttgttgagcgaaataagaatgagatctttaccaacattaaagataaagtgtggaaaaggttagaaaatatatatattctctgcagcgggtaagtccttattaaaccaattatttaggaaattcccacccatgtaatgtgctgtttgaagcttcccaagaataccataaacaacctccatagtagggcgagtagattttggtggttatctaaggagaaaatgtgtaaaattaattggtgcaaatgggacgttctctgcaagcctaaagaaaaaagggagttgtggttcagagatttacactattttaaccaagccatgctcgctaaacagtgttggaggttcttgaaaaatccaaactctctttgtgctaagattctaaaagcttcttatttttctaggaagttgataacttgaagctaactacgattttaaggtttctagtgtttggaggagtcttgtttggagaaaagaaattcctcttaaagtaataagatggtggataggggatggcaatgttgatgtgttgaaggatatttggatcccaatacccaaagaatttagaatttattataaattgccgcttcctcaaggtctgaaagtttattagggttgtgcttaatgaggaagatgctagaattattctcagcttgcctagtgaagatatggtattttttaaagaatgaagagtatagcatgagaagcaattatcgagttaacatgaaccaaaccatgacaattgagagtttggatactatgaaaaccaaagcactgtggatttccatttggaagatgagagtgccacctgaaattaaatatttttttttttggaaattattccacttgtggctgccaactaacgatgccctattttgcaggaaaatatcaatcaatgggaattattttagatgtaaaaaatggaattgttgaagatgtgatgcatgcaatttagaggtgtccgttcagtgccaaggtttggaagtacactacctaccggatagaaataaaatgatgtaaagagagagagattccttgtccttcatctcccatatgcgaagttactgcaacagtgatgatttccatttatttttaattatatcctgtaagctttggtatgtgagaaataaatttaagcatggtgagaaagagcctttggccaaggatgtggtggaggtgctcacaacactgttacaactacaacgagacaaatttcaagaagaatagtgccaacaagagaaaatctacaaagtgagttccaccccgactggctattgtggatgtagctcatgattcttctaaagatcgatacagtacagttgctatcgcgggagatgaaggtggtaattacttacgaagaaatgggaaattttttgacaagccttatgatagcctcacgactgagttaatggcgataagagagaggctggtattggggttatatagatctcaatttgaatgcctttactattgagtctgattgtgctcttactatgtttcttctcctctctccttctagtgggtactgtggggacttatatgggcttttatggagcattcgaaacatcattcctagtcaaggctttgctggttttatttctaattttagagaagctaactttgttgcccattttataaccaaggatactctaaaaattggagttagagttatcaagaacaggaagctcccctttgaagtaaagtatgctatctttgaagatttgcctttttcattgtaagtcgtctccttttatacaaattaaattttcaaaaaaaaaaaaccgtgaaatacggtagcacaatagttgagctagtttatataaataatgctacttctataaccacatatattcatgtctggaaggaaatataataaacaaaaataaaaaaaacaaagacttcattgaggctctagaactatctagggtatatctcgttttacatttgttgatgattaacacttctctctttcttttccttttctacccttctttaattactttgtatttaatgtttgatacacatgtctctccacactattctcatttattaggttcttagaaatttcttggtcttcatggcttctcccatctcatccttcatttaattatcatcgattgcatttcttggaggatttgggcaattattaggtctattagcagaggatctcgcctaaggaaactccagctctgataccatgttaggagatttgtatcttcgtgacattgttgcaaagtaaagaaaagcatgaacagagaaagagagaagaaacagagcaaagaaaagagagagaaatgatagagaaagatgatgaagacaaagaagagtcttattattgaatagggaatctgatacaggttatatacaaagatgcaaaagtaagagagagagagagagagagacagttgagaatcagctgaaaaattatagaaacataacagtatttgacagctaatctaactaactctaaccactataaccgattcccttaacagttggtattcagatctattgttcatcataatcaaactatgctttctaagcagccttggaggtttatatgattctcttctttctaggttgcttaaagtcaaatactttaagaataatacttttttcaggcttccaagggtcacttttcttctttaacttaaagaagcttattatggggaagagacttatttaagcaagtgctgatttgaaaagtgagaaatggtaaatctatctctacccttaacccgtgttggatccctgctattagatttcttaagtataaacataattttcctcctcctgatgatattgttccctcctttattaatgaaaaaggttgttgagatttggaaaagttaagtaattatttcactaacgatgtggttaatgctattcttcaggttacaatcgatccttagatgaccgtctcattggggacatcattcttctaggtgctttactgttaattctacttacaatttggctaaatcctcttcttcttctccttattcttctaaccttgcctacattaagtgttagtggaagtttgtttggactattataaatacctcttaaaattaagcattttatattgaaatccttttatcatattcttccttatactttgaatctttacaagaaaaatgccattgtaaacccattttattctttatgttttgataaagtagaatttgttactcatgccctcttaaagtgttccagagtcaaatttatatggagggatactatattaatatttcatcaattctataatatgaataagtattgtgacattaaagaattttcattgagaggttttgacaatcttaagaacgatgattttcgtttattttttggtatggcttgggcagtttggaataattgtagggaaatttgaaaatatatacttaaaatactttaaaattttttccctaaatccataataccctatattccccatatatgactacaataccatattccccgtaataccccctctcatttgaaattccaaacccaaaccgtgcctctctcttcctctcgcccaaacccacggtgaacccatcccaaacccatcaaattacacccacggtgacgacggtggatcaatctcaaactgacagtgacgacggtggacatttcgtacaaacgcacggtgacggcgtcgtgcatcttcagtcgacgcaatgcaaaaggtatgtcttttttttgtgagtaagtgttaaaagattgatttagattgtgattttgtttgtgaaactttattagattgtgaaatttgttggatctgtgaaagaatgaaaaattttgaggaagaagaagaaggcccgatgggtccgatggtcctctttttattcgaaaagcttatgggtccgatggcccgatgtgtccgatctatagtcggatagtgggtccgatgttatgggtccgatggtccgatttttatggggtccgatgttggttgtttgggtatagtttgattggtctaatggtccgattttatggggtccgatgttctttgtttgggtatggtccgattggtccgagtggttcgatggccagtccgagtttggccctcttgtggggagttcggcgaagaacaaagagagaagagagagaggggagggcgtaatgt

SEQ ID NO: 379298 - DNA, 2048 bp, Cannabis indica
ttcataacaattcttaattaccagtgttaccacagtaataattctctaactcataatcttttcaaagttacaaactaagtttccacaatgtagaatccttctaacacactcataactacaactagtctacacagcacacactcattattttataacttaatttttggggctgtagcttttagcagtggaagctaagctataccattaccaaatattaaaccccaaagtaacaacctcaaaccacatatcacctgcataatagcaaaaagcttattaattagtgctatatgaagagagagattggcaaaaattaataagattataggttagagataaaaatatataagaaaaaaaattaatacctaattttggtagagagaatataacgaaataataataataataataaaatacaattaaataataatatatctctagcagttacataattccataactgctatcataaatacaagggtccttttttacaataattttattgataatcgtgttagtgtatacaaaaatcagaaaattttatttaaaaacaaaaaattctatagcttaatttagaactataaagtttcgatgtaatatacaaaataatgtaaaggtttagaaataataatggtaaaatctttaactataagttttagacataatgttgttcttgaataccagttcaaaataaaaaaaacctttcattaaaattctgaaaacatatctaaacaaataataataagaagaaaaagtctaaatacataaaacttcaccataaaaaataaagtaatttacgatataaatacttaaatttaatttttatttaaatttaatttttgataataataacaactaagttatatttatagaatattgtaaagccaataaccactgtctaaaaaaataatatatgaataaaacaatgacttgacatctattagtcaaatacagaaaataacatttattagtactgtaaaaaattaaacttaactatctatgttgataattaaacttaaaactatttatctatactgatagttaaacttaaatgtttatctcgcacattattctagaaaaatatgataagaatgtaatgaattattttatcttaaacctcaaaataaatataacaaaaagaatacaaatactaaattgcattaaaatcaatgaaatccccgagataaagtttttatcttataacctctaagtcatataaaatcatattcttgttctatgtgttaatggtaatttggagtttctaattataaaaacgggtaataaagaaacaaataggaaaaaccaacaaatcccaaaagtaaaagtgtaaaatgtgtatacatggactacgttgttgttgcctcaggttgggattgatactgagttggcccaaagttggagagataagcttgggccaatttttggcccaattcaacctgggcctctgttgttaggtggagattatcaaatttgagctccaatccctttgcatcaacgcacacaacattttccaccttcatattcaactgaacttcccttaatttctccacacagttcttatccacaccggaaattattgccacctgtaaaaattaaaattaataaaatgtattattaaccctgtaaaatgataaaataaaatacttttgttacttttttttttttaattagagttgtatgtataattaagacaggttttatgttaaggtggacttaaagcccacttcaattaggagtccaaataaaaaaaaaaaattaataaatatgtttttttaataatttttaaaagtactattcattattataaaaaataactcaaaaaaattattgggaaatttataaaaatactaaatttagattcattttataaaaatattgtcacacaatttttttttttttttaaatattgtattttcataaaacaatagtctaacacaaaatagaacaattaaaaacaatattggaacaactaaaaaacaaccgtaaaataacaagggaaatttgattttctatacttagaaaatcaaaaaatttgatttctaaaccaataa

SEQ ID NO: 379299 - DNA, 1232 bp, Cannabis indica
ctttggtgggaagtcaatatgccagcttcctgaagattctttatcttttcaagctaccctacttgtaattcttttgttgatagagagtggtaaatgatttgcctcgcctctaactctaagttaaaggggagcaaggaatggaatctcaaaagaatacgagggcagaattagatatgttcctagaatgaaaagaaacaaaagaaaatccatgtaacttattatacttacttgcaatattaaatttaacactgagagttggcactctctttaaggaaaagccagaggtatagaactagtaatcctgaatgtcgtaagtatacttaacagaactgactgggaacactaagcttttggatacgtctccaacctgtaaaaaaacccaccttctccttgtggtttctcatgttttgtgccttggttttgttgaaatacaagatctcttcttgagtagggaccaccctcttcttctacttacacaagacataccatcggacaagcaaacaatatacttgtcggataagttgatatggagccactccaaccacaacgcaaaatttcacaaagtaacatcttaacggaatatgtgctcccatctccacgtggccccagctccaaatgttgaaacctccttcaacgaattaactaggcctttctccaagaatagagaatatattcccgaataacccaagaacactttgaagccctcgttgtgtctcatacttgtggagattattataaatctagaatttattacaatactgatccattacccagggagaataatttagtaccaattttggagcagcaaccacctccataaaaaagtcttcgtccaccacctcaacatcttaatggtggtctccttcagacatgattaattctggaaaaagaaaaaaaaaccaaccagttaattacttaaactaagatagtaaaggaattgggaaatcctccccaataattgcctagagaggtccccaatggacctagcatttggaataaaaattctcaaagaataataactccaaataacctggtggagaacaatgcaaatgatgtgaaaggaagactcaaacatcatctggaaccataagggttcaacataaagaagggaaaattttgcctgcatatttgtagtaatttgggaatttggccaggacaatacaatgaatagaaacctaaattttattaggtgtaaagcccgcttagttaatttggaaattagcagttgttta

SEQ ID NO: 379300 - DNA, 2040 bp, Cannabis indica
gagaaatgctataaaatacatggatacccacctggttataacaaaaacaaaggaaaggaagcagctgtcaatcaaattcaaaccagcagtgaaggagcaaattcttctaatgataactccaccttgctaccccaattgacttcagctcaataccagcagcttttgaatctgcttgctacacaacacactggtgtgggaacctcagaaccaagcacatcaacaggtaacacaagtattgttctttcaaacacaaattcatttcctaaaaatggatcttggattttagattctggtgcaacaaggcacatctgttctgacttctatttatttcagttcatatgcaatgttgccccaacaaaactttggttacctaacaatgaaagcttgcttgttaatagaagtggatctatagctatatttccacattttgttttgaatgatgtcctttatgttcctaacttcagatataatataatatccataagttgtctcactaatcaaaactccatttctgttaagtttgttgatgattctttcaccatacaggataccatccacaagaggatgattggcaaaggtgaatccaagaatgatctttacatccttgattcttctttacctcgatctgaagtccttgccattactgccgatgcttggcattctaggcccgaccatctcttaaataaatatcttgctttacttagtagaaaattgaattgtaatacttctactttgcataaagatactccttgctatgtttgtcctttggcataacaaaagaaactccctttttctagaaataataacttttcttgtaatgcctttgatttgatatattatgacatttggggaccatatatcatgtcacttctcatttaggacatagatattttcttaccttagttgatgaccacactagattcacctggatctatttgttaaaacaaaaatctgatgttagctacattctacctcagtttctgtcatacattaagaatcaatttcaatgcatgtttaaaaggttcaggtctaataatgcacccgaacttgtctttaaagatttgttcttgcaacatggtgtcttgcacgattttacttgtgtggaaacacctgagcaaaatgttgttactgaaagaaagcatcagcatttgctcaatgttgcaagggctctttatttccaatctaaaattcccatacaatattggactgaatgtgtcatgatggctgccttcttgataaataggacacctactcctaacttgaaaaacaaatctccctatgagctgttattcaaaagacaacccgactacagcagcttaagaaactttggctgccttgtctttgcttccactctcacggctaatagaactaaattctctcctcgtgctaaaacttgtgttttcataggatatcctcaaggtgtcaagggctataaactctatgatataaacaataaacaaatctttttatctcgcaatgctatttttcatgaaaatgtgttcccattccacaaattaaatgataatgctactggtgtggatccttttactgaaattgtcttacctaccactgatgttgttaacaccccggtttgtgattatcctattagtgatactaaccctacaagtactacttcacatactgaggatgagaatgctacaacatcacctagtaatgttacttcatccacaccagcaacagcatcttcatcacccagcagtgttgcagtttctccaccagccacttcaaatgaacttccaacagtacctagaagatctacccgagtctcaaaaaaacctgattatctcaaagatttcgaatgttattccacaattcaggatcactcctctaccccacattaccttgataagtatatttcttatactagactttctaactcatacaaggcttttatctttgcagtgacttcattaaaagagcctcgaacctacaagcaagcaacttaatttcagcaatggcttgatgccatgaatgcttaattaattgccctcaaaaataataaaacatggactgtggttc

SEQ ID NO: 379301 - DNA, 5076 bp, Cannabis indica
agattttagtagtaatagattgactatcagacaagtgttcattttgttagtgatatatgaataaaatctgtatgggatgattttttatttaataatttgttttagtagacacaacaacaagagaagaaattaagatcagtttcatctcatcttattggagtggaagccaataagaaagtagtgagagtgagcatttgtattgacaaaagagagaagagagtgactgcctactgttttggccttattggatcaaagagagaggggtttgttgcgccattgcactacccgaaacacatactccatgttccatctttgctttctcaaactacttctggtgcaggagccacctttgttgatgtatcagagctcaaactcaatctttaaacttgtcccaaatcgcaacacatgactgtcattgatgatcaccaatgtctttgtactatttgtccccatgacatacgttcctagagattttgatacatatagccttgaagaggaacaatatttagacggtctgccccgtttttatggatgtcctacacctggacccaaacctggcctcttgagttgtgttggaaatggatttactgataaatttcgagcttccaataatggatttacatgcacaaaggttgtaatagcacttctggtcctcttaagaaagcactagacagcattgccaataagcaaaacaattttcaagattaccttctcaaggatgttgatataggttcaactgaggtatgtatgtatatataatttggttattttcttgtctaggtagggattaataatgccatatttggctgtgccaagcatctgagactgttgtgtgttcaatgccatagtttcacttttatatgatgactcatatctaggccttgaagaaagtgagagcatctttcaagcgcagtgatagagctctcacctcagtgcttgaacattttattactcaagtaaagtacaatataatatttgttaactcatacacatcatatgctttttatctatataattattgttctttctgtttgttgtctctgataaatcccctgcaggcagttggggactttagttttgtattataactaattcctggtttggtctaatttttacatttctgatttggttttggacttaacatggcgtactgcattttgcagcctgcagcgatgcgaaagagaaaagcttcagaagaggctgggcaaccatcacaagaggctgctcgggacgaccctagtgcatgcatctgcactcttgctgcagagactgcgacacaacctcctaccaccccctaatgcatctgcttcttctgaggtatttcacttaagttttgtcattttgtattgtaatttgtgtatagttaatgaactaaaagaatacaaatgcttttgtgtttttgattcagagggatgatctcttaaattctcaattagatttgctcagagaacttgatctcctacataggcgcatctcggttgtggccaaggtccccatcagacacttcctatgttcatcaataacttcactacttttgttagacaatttgggcaatcccctccaccaatatagatcaacttttaatatattcagatggtacattctgatattaatatcatgtgaagaaaaccacaactaaatatcattcattatatattatatgtatgtaactctgtatatatacacaatatcatttcaaatctctataggaaaaaagtaaaaaaagaatagggttatgtgattcattcacctatctaccatctgcaatggatgtagtggaccaagacaaagacattgaataagacaatgaatccttcatatcttcaaaagttgggtgtgaagaaccaaacccaaaactctttggaaactcattccaaaacttaccacccttttccttattcaacaaatacacatccatatcttctgtttctccatcattattgccctcatcatcatttgtttttccctctaacattttcacaacatgtctcattgttggtctagcatttggttcagggtaagcacacaacaatcccaattgcaaaactctctcaacttcttctttgtcaaaatctcttttccttaacctctcatcaacacaactccataactcaccttgactcatcatgttccaaacccactccactaaccccactttcccttcctctataggtctccttccacacataacttccaaaatcaacaccccaaaacagaacacatctgtttgagacgaagctcgaccgttcttcacaacttcaggtgccatgtaaccgacagtcccaaccacgcgagttgtgctaggaacctggccatgtccatgcatcctagctaaaccgaaatcacctaaccttccattcatttccttgtcaagtaacacattactagcctttatgtccctgtgtagaacttttgattcccaaccttcatgcaagtacaaaactcctaaagcaacatctttaagtattctaattctctcctcacaacccaacaacttactctcatcaccattggaatcgaaatcgaataccctcttgtctaagctaccattctccatgtaatcataaaccaacatgaacacacccttctctctcttacaccaacctctcaacccaactaagtttctatgtttcaatcttccaaggcttgaaacttcagctaaaaactcccttaacccatcattcccatgagatatgagtttcacagccacttcaactttttcaatcacacccttgtagactttcccattcccaccaattccaatcacattagcttcatcaaatccctttgttgctctctcaatttcatggtaactaattctatgtggccaatactccaattcccaatcttccatctcagctctttccttagctcttcttctctgtcttttcatcaaacacataaccaacacagcaaaaacaacaatcacaacaaaacccaccaaagttatccccaaaatgaaaccttttgacctaaaaattggatctttaggaagaacaaaattaggcaaaccagttgtaatcaaactttcccccaaagaaaaattagtattactaaaactccaagctaaaatcttatgactctgtactaattgcccagttgagcttgtgaacccaaaatacatttcatccttaaaaacctcagaaagattatactcaaaactcaaaagtggaatctttggtctcttcataccagccaaaaccatcccaacactaatcaaagaatcattataatcaatccaaacctggtaattttcaccactattaagcttcaatttcttgaaaatcttctcactttcccaatacccagcttcatgaactttcttggattttaaggcattgacatcaatcccaacatggttatcattcatgtcatcaaattcctcattcttaaacacatcaaattcaaccccaaagacatgattatcagctcttccttcgtttgtacggttgagaaaaccaaggtgttggactgcgacggcgccgtttaggcctgtggaggggactatgatgaagaccaagccgtggcctggaagaatgttcttgtaaggtgccatggaaaagatgaaggaggttgagaaagggaggactaaggaggagttgggttttttggttgggatttttgttttgaacagagctcggccgattgagaaatgggtgttgtttgtgagagtgagaatgttggagtgatcgtcgactgtggcgttgccgtagagaagaaggttgttgtttgagttgttgaagccattgaagatgaactctactgacagagctgaaggaagaagaagaagaagggtttgtagtatgaaaaggaaagtttgaaactttggtggtgttttcatggtttgattacagaggaaaaagttacgaaaatggttttttcatggtacttatgggaaaacagaggaatgaaacaggggaaagagagacgaagaagaaggtgatgatgtaaaaaagtcgaaagataatctttggtcaaatttataaaatactcaaattaattattattattttttttaattaaaatactaagtcaatgctaataagaatactaataaaatgaaattggaagatatctcattgatagtcgtaaaaaaattatctctttttaaaaatacattttcttttattaattttaagaaatattatattattttaaataaaaactcaaaatatttttttccctttctttaaattttgtgtgaattaagattacgtgctagtgagaaaacacacactttctaattactacacataataattattgagtaattattccgtaataaaagacacaaaagtttattattagtagatagggttgaggttttttcttaagaaaataaaatataaattgatttgagagatgatgctttgtatttccattatttacttaattgacatatttaaaattttccatgcaaaattacgtacgtgcatgtatatttgaagacataattccaactttaccctcctatatacactaaaaagccaattagataagtgataaaactttttttagtacgtactgtttttggtaaaaaaaaatggcgttatttcatattccacatcataaattaaaatataaataaggttgttgagtacaaaaacatagcagccaattaagaaattatcagccaattgaagcataattaaaatttgattattaatttgaatgtgaatgtgaatgtgaactgtgaacgtgaaatatatttatatcaatgcaagtgggacatttattacgactaaaaagtctatcattaattaattaattaatggataaatattttaacgtcgtatataataccaaaacatctattcatcctagctagtttacccaattaattacaaaaagttgagagaaataaaatttataatattataaatatggtaacaaacatgttcatgctcctagcactactacaatgtaagcctttagcttcccttttttcaacccaatttaaaaaagggaagctaaagggggtgaaaatatctgcattgcatttagaggcggttttttggtaaaaaccgtaggtatagaatgtatatatatctatgccgtcggttgggggttggaaaa

SEQ ID NO: 379302 - DNA, 3388 bp, Cannabis indica
atttttgttaaaaaaaaaaaagtgaaacccaattttgtaaataggagtgtggttataaaaagagaaattttatttgcactccataaagttttgaaaaaaaaaaatcaactaaaaaattttcacagataccgaaacaaatgagggtacatcggtataccctttttagagagtgcattgaagaattttccaaaaacatatacttgaaaacactgttaagatactttagcttgagtatctaccacattaacaattgtagaaaagaaacatattgaacaatccaagctgctgaacatacctaagaaattgaagtatgagttcttcatagaccaacaaagataatgaaaaatacaagacatttaccaaacatgaaacaagagaaaaacaaaataaaaaatgttaaatgcttgcctggttgaatgcaatgtttcccattgcttgctttcccatagcacactaaaatgaaggacaaaaacaataaagaaaaaaaataatataacttgattaatgaagtaatttaagatgaaaacattgatcaaagcacaaactacaactaaaaaaaataaaaaacctggtaagtgtttctaggagactggttgtgatgaggatatggtattaacccagcaatcacacccaagatggtgaatggttctatttcaagatgtgttgtatctgtcttaacatcttgctcatacaaagaaatctaaaatacaaaaccatgaattaataaggctcaatgaagttcaccatcttaaaccaaaaagcaacagaagtcgttaataggaacaaaccaaagcattgttttcctcgttgacatcaagatactcaatcaacccttctcgtaaaaaatcatcaaatgtgcgtactccatccttgaaaggtgcatgcgaagaatattagatttgacccaatattatttttcaagtatagagcaaagataaaagtttaccatcaactccttcatatgatgctctttgactcttggaatgcctttgtcaacaatgacaagtgggcgacaaactcggcctccatcagaagcaatgtagacacaccgctgatatgatatgctcttgttagttgtgaacttgtgactattagtttgcaatatgaagtaagatctcaacaagaatattacctcaaacatggaaaatggagaataccgtctcacaaactatcttattcgaataaaacctcacccagtaattagaaatagacctctgatctacccatgcattttgttctttgctcttaatataagaatattatttaaaaaagagaaagaggccactgccttagactggccccccatcgaatttattaagagcctcacttgtggtggaggaataccgtagtaaacataaacaaaacataaaactatagcccaacacaggataaaaaacaacaacagttcttaatataaaatatacgtttgaagattataaataatggaaacatttgctatgctcaagttaaatcgaaatgatatattatatcattcaaacttatttcttctaggaaattatgagcaggttttttcgaaagtgtttgcatagctttctatagaactttccatctttatagaatcaactatgtagtgtagactttcaaacatgctgaatgatatatccttctcataaacacttgtttctctgtacctttctctttaacaaaaaaaagacagaggtcacttgtctatgtctttcccttgttataagtgcacatgcagaaacatatgtaaatatatcaaacagatgttaagtctgtgtacttggaaaaacaattataataaacccatgcaaatctcttttctaacaccacaagcaagaaaaaagattccgtttatcaacctgttgtttcaccaattttagattctgtcaaactttataattcaatactatggaagataaaaaaattcaacatgggcacaatgccacattaaaacagaaaaaattgttggagaagtattgaaaacttgcctgtttttcgttgagaaagacactgacaaactctccaatttttccagctctacgtagcattctaattgttgtggcaaaaccctaattgaatgacaaaagaaaaagaaagagatgactgaagcaaccaaatatagtaatcatacatgatagcataacctactagaacgtatgtattacttgtggcagcatcataattggcataaacaaaactcatcatactaggtatttaccctcattttgttttctctgataatgaacaagaatcatcactaatatagaagatagcaatatttacgacagggagtccccatatgaaaaatataacaattacaaaagagagccccaataaccaaagatcagtacagccatggcttcaaacattccggaaaatgtacaaacggtctcagaagcaacatagtttaaccttagtgttttgcagacaagaaatgagatctaggagcaattcatgggtgagaacactcaaccccctaagtaacgtgaataatttgctagaatcaggatgctatcttttaaaactcggtggataagaaaagagtgatattattattatagtctgttgcaacagagcatgtctccaaacaactaaatagaaagtcaagagctgaaattaattattggaagaggaaacaacttactacatatgctttgcacattagatggatataactacgtacctgtggcctccgatgcttgccaagaatatgcccattgaatatcactagaaatgaatttggtgagtgaagttcttctcccgaaagtagttccaagtcctcaacaccaagacaatagaactatgccaacaacaattagatgtcatatataagcagtgtaatcataattaagtacatcgatgatatagaactgttacaatatacacatgtaacttgaaatagtattgttccatgagcttttgaaacagaatcgggtaccgacgcattttgcgtaagccttgaggacatcaaggcgtacacctcaacaataagaagaaaagtttataagtcgtaaatttcataacaaacaacacataattccataacaaagttaaaattcataaaaatttaggcaattatgttaatgacttattctttgccggactactttcctatcttttctcaacctttcctagtttttagctacttagttgtaacagcttcaagtctgcaaaagactctctgtacgttttatggtatgtttacttaaagggaatgggaatgaatcgtatggtattgattcctgttagaatattaactgtatattagttgtaaaagaattatggtaactgaaatttagtagtttcctattttgttattggtagtttcccatttagtctcctagctttgtatataaatatgtactattctatgaaataaaaacacaattcgattcactatttt

SEQ ID NO: 379303 - DNA, 6270 bp, Cannabis indica
atttatttaattttgtagaagttttttcatcattttggtctataattatcaaattaaaaaaaattatatttaattttttaaaaaacaatatttttgttagtaggggctatagcccccacattaagagtagtgagtctgtccctggttatcaagtgttcgtaaaccgttaataaacttcgtattgaagaacttttgaaagttacagttaaaatttaaagttggcacaatacctagtttttggaaaaatattagactataatacatttatttatataaaaatatatttatttatttattatattacaaaaaaatatatgaaataaataaattataatagaataattaatattaatctttaaatttttattttattttaaaatatattttatgttttattttttatattaacgaatcacatcaacttaaagtttctcgtatatgagtttctatttttttttaaaaaaattcagatcattgtattacttcaaactttttacaacctaacaacatttttaacaaaaaatcctgaaacacctatatacaaaactataattagaaatgttcaaatcaatctttatcttttttttttcatttttttcggtaaaattgcttcaattctcattttgatttcttgttgaatttgataacctctgctggaatcatattgagttttttacaccaaagaatctcgttacttccaaatatgataaatcacagcaacaaatgttgtagcaaagacctacggttgaaatttagacattttaactctttttattaaaaattgaaataaagagtttgctgcaattttccagccaagccaagttttaatggcttcaatacattccttgctaaaatgacaatcaaataataaatgaaaaatagtctcatcctctagattacaaagaaaaaatctgtcatcagtaattatattgaacctcatcaatctggtatttatgtgtaaacgatttaggacagtaagccatgtaaggaaatgatgcttgggaataagaaatctcccctatacttcaccataccagttttgagactcatattggaataggaagattgactttctttttaacctcctctttcacttgtacaatttaaggcgaataccaactattttgaatggaacttctatattcccacaagttacttcctttaatataaacattatggatccacttgacccaaaaattatcttgtttcgttgctagcacccaaatatacttgctaagagtagccttatttcaaagtagatgattacagaatcctaaacctccttcttttcgagccttgcataactctttccaggctacataccccacctattgtactcagtcttgcccttccaaaggaaagctctacaaatatagctatgatctccttcaaagttctctttggaagaaacataatttgaccctaataaaagtgaattgcaattaacactgagttaattagagttgctctccctgcaaatgaaatatgtcttaaactccagattcttatcttggaaagtcatcttttcgaagagcaccgaacattaagcttgagaaagcttccttgaacatattggaacaccaagataacaaaatggaatttggctctagcaaaaccagatgaatctaaaactcgttgtacctcgatttgatgccatgcccgagcaatatacaacagattttatcttgtttggctacaatcctgaagtttggaaaaaaaaaacttaaaatcttgacaaagcatataaatggacttaaagtcttcattacaaagaagaagcacatcatctccaaaacaaaggtgattaagcttggaatttctgcatctctcgtgatacttaaaatcttttttcatggccacattatccataattctcgataagtacttcatgtcaagtaaaaacataagtggaaacatcatatctccttgacgaagccccatttttgcttcaaagaaactatggagctctccatttatcataaaactaaatcgatgagtcttaataatgtaaatcatgactagttaaataaatgcttgaggcaattcaaaagcttgtaatacttcttcgataaagtctcatccattgtatcgtaaatattctttaaatctaattttatcatacaattaggccttgaattagttcttctgtaatgccttacaagatcttggcaaaccataatatttcaggcaatgtaacgaccttgcacaaaactactttggtcctgcgatattagatctggcaatatattcctcaagcaactgcaaataagttttgtaacaatttttgtaaacaacattaaaatatggtattggacggaatttacttgcatatgttgggtaattactcttcggcacaagagtgagcattgtagtattcaattccttcaacaactttcttgtttgtagaaagtctatcactactcagggttggccttgagttgaaatgggtcataggcaaaaaaaaattgggcccttactataaagataaatggtgttttaatttttttttatttgagccctaggcgtggacctagcctgcctatgcctagggccggccctgtcactacttcactaacgttcttccccactaactcccagttctcttggaagaaagagctgctatatctgtgaggccccggaacttttatcccaaaaattgcaaagaccttttgtttcacttcagactgtgtaaaatcaaatacatataaatatatactttgagaaaaaaatatataaataaaaattttgtataacataaatattttatttgtaaattataatgaattaaattataaaattattatcattgaagtagaatcttaacaatttataatgctttctatgctacatgtatatatgcttataatgatagggaaggcatgaaggaattgtggaggcatttacaagagatagcaacacaagagtcgtggttagtgcttggtgatttcaacgaaaatttaacaagagaagagaggatcgagcataaagctagaatagaattggctactgcatttctgatttgtgtggagaatcgtaagcttgaggatgtcaaatacagtggcaatttctacacatggaacaataaagaacatggagatgcaaggatctattccaaaatagatcagatacttgcaaacccaagctggattcaaaagtgcacaagggcagaagctttgtttctaaacgaagaactctttgatcatactccaggaatactgttaattcatcctgaaatcaaaagtggtaaaagaccatttaagtatttcaggatgtggattctcatccaaattatggaaagaaagttagaggagtttgggagtccaatgtgaaaggcactaagatgtttcagctggtatcaagactgaaaatgatgaaaacagaatttaaagagataaataagcaaggttattcagacctccatgttgtagaagctaaagctagagaagtattgaagggctgtcaagatcaacttcagctggatcctttgaatccttttctgcacaaagaagaattggaagcacggtaaaaactaattagagtaaaaacagacttgcattctatgttgcagtagaaagctaaagttacttgggtaaagaatggggatgaaaatactactatttttcacactagtatcaaaaatgagaagactacaaaatcgagtttggtcaattgacaacaagatggcactgaaatcagccaacctgagcagttaaatgaagcttttcttgcttattataagtcactattggggagcacaatgaacaacagaagaaaggtgttgtcaaaagtgatcaaactagggccactagttacacaacaacatgctgatttattaatgggtaaggttacattggaggaaattaggaatgcattattctctatacctggtatcaaggcaccaggatcggatggctactcgagttatttctttcaagataattgggatcaggttgaaaatacagtttttgaagcagttgagtctttcctgtcctcagggaaaattttgaaggagataaactcgacaattttaaccttgatacctaaggtaaaatgtcctaacactgttaaagactttagaccaatagcatgttgcaatgtcatctacaaagtagcaacggaggtgatttgttaaaggttgaagcatgtcctcccgaacttgataacatagaattaaggaggtttcgtaaaggatagatacatcgctcacaacatcatgatatgttaggatctcatcagacattatggtaggaagatgacaaagccgaattgtatgattaatctggatcattaaaaagcttatgatacaatttagtgggacttcattgaaaaggtaatgatagctttcaaatttcctatgcatttcattacttttattatgacttacatcaggacacctagattctctcttatgctcaatggctcttgctacggattctttatcaaatagagggttaaggcaagtggatcccatgtcccccttgcttttgttctaggaatggagtatctatccagtattttgaagaaaattggttctatgcaagactttcaattccatgacaggtgtgggagcttaagcttaatcatttaagctttgctgatgatgtactattgttttgcaaaggagattttaaaagtgtatactatctcctcaaagggctgaagctattctcctgtaccttgggtcttcatcctaacccatcaaaatcagccatatattgtagtggtatgcaggatggtgaaatacaacgtatcctagatgtttctggtttctcaaagcatgaagttcctttcagatatctgggaatgcccatttgtgcaaagagaatttcaacaaaggaatgcaaaattctagctgagaaaatgacagccaaagtcaatatatggagctcacgaaacttgtcttttgcttgaagagcagtgttgattaactctgttttgatggccattcattcttactggagccagataatgattttgcccaagaaaatcatacaagaaattgaagcaatctgcagagcctacttgtgaaaaggtcaacacagttcacaaggttccaacccgattgcttgggatttttttttcagtcaaaagtagatggtggactgggattaaaaagattaccgagtggaacaaagctgcaatctttaagtacgtttgggttgttgcaaacaaagaagagaacttatgggtgaaatagattcatagtgtatatctcaaacatgaagattggtggagctatgaagcttcaccacaagggagctggtattggaagcaagtggtggctaccaaaacccagatccaagagctaatggacactcaacaattcactcgaggtaaaatatcaaattttctatggctataacttactctgtccttcaaataacaaagtcaattggagtaataaggtgtgggggcattttaataccccaaagcatagctttataatgtagattgcaattcaaaaaagattgagaacaagagatagattgctcaggtttggaatcattgatgattcttctttgccacggtcaagaggaatctaatgcacacttgttctttgaatgctctttttcaagggcttgtttgttaaaaatcaaggaatggttgcagtggccagccatcaccaattcagctcccaaattggttcgttgaattggtcagtctaagatcagtaaattcaagaagaaagtcattacaacggcattagcaagtttgatataccatgtttagaagaatagaaacaacaaagtatggaatgataaatgtgatgatgtagataatgttgtgaatagagtcaaggagattaggagattatacatgttgtgtggcccaaagaagttagtgtaaatggttcaacatggttccatacattgtaaatagtttagagaatttgaggtcttctctttgaagatgctatttggttgtaaattagtataatgaatgaaatatacttgctgatttacccaaaaaaaaatgtaacttgttttttcacggtatagttacaattattttttctcacaacacaattacactaaactggcccttaaagcatgtgaaaggagacgatatattttcatatattccatgaatatattggtccaaggaggctgcatttcacgcagcattttgaatatgctgtgcactgtagacactgcatatatatattatatatataatttaattgatatttatatatatttatattactatatttataaagttaagaattacttttgggaaaattttacaatgcatatttttaaaagtgat

SEQ ID NO: 379304 - DNA, 8060 bp, Cannabis indica
aacttagaatttttcttatatacagtttctaattttttctaaatttgataaaacataataaaaaaatattataaattatttttatcaaatgcatataaatttatatttgaaaaaaaattaaaaatatatataaataaaatattatataaaataagttttacatatttgatactataataaattagattataacattatcattatcattataatagatcttaacaacttacagtactttaaaatttataatttaccaaacactcagctcagctttttttcacagttttgctacagctgctttttctcacagcacggctacaactgctttttcccacagcacagctgtgccaaactagtcgttagtccgtttttttttctttctgtttttaacttttagctttagtgtgttagttggtcgtcccaggcagtcttttaatgtagataagccttagtaaaatattatcaaacttgtttaaattaaattagaaattattttaacttaataaaaactttattccaatatttgttttttaattttactttattcgttaccgcttgactgttaaacacttgcacaatacaccatgtcttaagaaactcaatcactgggagttatgtcattgtttcttaatttaatctttaccatgagagtacttacatagaagtgaaaaaaaaaaattgaatgctcatgtaacatatagctctcgtataccataccatagcctctgtgcccccaagtgatcaaagaagtacattcattggtcacttgccataacaaatcctcctgggctttcttaatcatgactcttaggtgactgttacaaatttgaacactctccacttatccaaagattcgtggggtaacagtgttgaactcactaaaaaaaccactgaagttatctcaagaccaaatctacaagctctactcaacgcttgtgagcgtcgccaagtctgtaagttgtaattgattaatttaaataaagtaccaaaaaaatctttgttcaacgttcttattcatcaaattaagtacaattacattactatgagctaagttgacagaaaaagatgtagtagttgcagattttgtttttcgtccaagcttagctaaagattcacactatactaatgccatgtttaacttataagtataggagtcataccttagcaatggacctctttacctaaagacaatttcgtcgtatctcgttagtttaaaaggtgatcgtttgctcttggtaaagtgaattttattgtgaagcgagctattttgaagacaactgtttttattggtagtaccgtcgtagatgtaccccgttccagtatcttgatactgacactacattcaagttgtagttatagcatgccaacttgtatgttgcaagttctagtacttcagtgacgacatatggtcgtaacatttaatataatacaaagttttatccaaacatagtgttccttattatttaatacaatacgacccggcctaccaaaaaagtccttaaaattagacattatttaaataaatcccaatatgtataaactataaatgtctaatgttttgaggttgtaaaattgtttataaactaaacgaatcaactagtgtttcttcttaattgcttccatttattatatgacttactttattttaatgaaaagtaaataacctcaacacaaaattggttaaattttgactaaatgcaatacaaagattacatacaattcactaatgagtcacaaacaatgttacaattgagtaagtatacacagagagcaataacaaagaaaaaaatatagttatatacatgaagctaaggtgaggagtaatgctagggacaaatttaaatcctaggccaccataacaactcagtcaatctaccccaagagaagagaagaatctacttcaatttaaatgcaaggaagaattagaataagaaccacaaagtcacaaaccaaatatggggtcatttgagttgaaaatggcagcactaaactgtcttgtattcaagtcatttccatccaaaggaccaaaccgatcaagccactgagatgggcttgagttgtcactctcttcaacccactctgaagtcatatctatgtcctcgaactgaatcggatccgcttctataggtttcaatcttgtttgtcttgctaacttgagattgtaatttatgtaaacaagatcatttaaagcttctctatcaatcttgttgcgcttctctgagtggatttgctgaaacgcgttccaatgcctctcaaatgtgaaactgctgcaaacttggctaagtattctgattgcaactctttgcagcacaggagcagaatcaccatattgttcccaccatagccctatgaataagaaaaaagtataaacagtgagtttctgaaatagggtgtgaatgcatatctaggattgtaaatttaccaggtgaaaccacatctcttgcctccatagctaggctgcagccgaacatgccagtcgcctttctaaaagtacaaatctgactagtgatatcgcgtctcatttcaggagtagggagtagcttctccagaacattaaagaagtcttcttttatggatgtaaggaactttatctctggattgtactgaatgctcgggttcagaaatgctgcagctgaatgcagaggtgaatggtgttgatctcgccactttctatctacaatgcctagaaatgtcttgcatttgttttcatccattatatagtatgtccttatagattcttttgcccttgtcatcatttcgtatataaaaccaacagcaggctttccaccagaaacttccctcaacacttttagaaaaggctcagagattgccacacattcgtctacagccctccagaactcattatcctcaagaatggcaatacatgacaaactttgttgcttatttaagtatgaggagctcgtacagaactcgggactgttaaacatatgtttcaaccttggcttctgcttccagatcgattgtagtgaaaggaagttcgatacagactttgtgataccagtcctaatgagttcttgtccgccagtgtactttttcatcaaatcaagcatagagacactgttgtatatgaacttcgatatagtttgtgcatgtatgatacatcgattcacccactccactttcgagaactcttcaaggatcaaattcaagcattgagaagcacaaggagacacgaaaatggtcgaataattctgcaagatatggttggcaacaccagtatagttgaaactattgtccattataatctgcacaacattttcaggaccgaaatcctgaatgacagaatcaaataaatcagcaaggcattttgtgttcttgaagtaggaagacacatcaacagacttatggaaaaaggtcctggaaggtgatgaaaccaagaagctaatcaaagcccttgatttgttatcagtccaagtatcagcaatgattgtacaacccgttgtagcccattctttctcaatatctttcgattgtaagctcatttcgcacttgatcctttccaaccatgtagtcttgagagtttcagcagatggacccaaaaaaccaggaccacaccttgtaatggcgtctatcatcatctgatatgatgaagaacgcgcaatactaaagtcgagcttattctcgaaaaagaacaaagctatacttctttctgcattatcttggttatttgaaggaaggttagccataggagtaacagttgggaaaacctttgcgacaggggacggatacatcagtaacaacaagagctttactaccagaaacactcacaggagatttcacttctacaagcttttgcttcttagtgctagatgtttctttaacatcttcctttgaagctataatagctctcactctatcagtcacatcatctcgtaccttgctacaagggtttacacctttacttggtaaccgagatagatgatgtttcaacctactaatcccaccattcaaaactctcatacagaatttacatctaaccttattcccatctaatttttcagcatattcccaacatacatctttttcacgaaccactgccataaacaacaaaagcaaaactcaatcaatatcttctgtctctatgtagtttgcattatcatccctcaacacaaactgcctataatcaagtcaagtattaccaaagcaaccttaattgacaaaacttactgagttactgatcaattgttgaaatctgccccaacctacaacaaagaaaaaggagctatatttaaccattaaggacattacgtatctccaaaacaaataaatgagaacaaaattctgttctttttatatactaactggaaaatcaaccaaactggtctattatcagatcccatcatttcatcccaataatttttttccttcagcaattccaaataatgaatcactgaatataacaaatttagttggaaatataatggcatgagcttcaattttctatatctcattgctttttctagtcacagctttcacatacacgtacattcaatttactgtaattttatgatgctaacaaagcaaataaccttttcttgggcgaaaatgattatccgggaaaatattttccgtcaagacaaacagagacataggtaccattaaatacatttcatagttcaaaattttccccattccaaaatttcatattttctcataaaccaaacaaaaaaatccaaaggaaatgagaaacggattgggagaagtaaaagaaaaattgaaaagagataaagcgagaaatttatgacacttacagcgagagaaagagagagagattggtcttctcgacggagaaaagtacggaagctttcaggatttggggggtttcctacttatcgcgatattttggagtttttagggttatttctattatctgaaagttcgtgtttcttcaaaattctcatctgttttatcttttttaatattattttatttttagtttcttttgacgatatatcgtggacagtttatttatcagtagtactatgatattatcccaatccgactttgccacgtagacaaattaggtaagttacagaaagagaccaaagcgacaagagtatgtaataaaacgacgtcgtttaatagataacaggctgaaaaaattcaggcggaagccactctattttatcagagccaggtttcgatcctgggacctgtgggttatgggcccaccacgcttccgctgcgccactctgatttgtgatattgtatgatataaatattatttaaacattttaattcatataaataacagtgaaaagttaatgaaagtgaaaaaccacttaatttttactctatattttttgttaagacacctactgtatttggttactttaaattttttaacgaattcttttggtaattatgggcctcttcggaggcccatgaagaaagcccatttgaacttaaaaaaacatttatcttaaatgtgattgctatttggtctttttttttagtacaataattatttgttcctggatttaatgttttgtttataataatagtgcgtctagtttacatatttttttcattgttatgatcattatcacgaaattggctgattattttattgttgagtcaaaaatgaacaacatgtatatatacattataacttgaaaaacattccatgataatgatatgatatatgggtcacacacaaaaaggaaaagtagataataataataataataataataataatatatatatactttattctaaaatcaactagctagagcccaaatatatgtatacatatgcataagattatgtttataaacgtaaaagattatactttcttatggatcaaattaaaaaccatcgaatttcatgcttgtattcttgtgtctcagcaaaatattcttagatgaagtcaaatgtacgccatgcatatacaaatttgctaccaaaaataaataaaatgtagtcaatatgtatttatatgcatgcacatgtattgttggtcgtccaataaaataaataattaaacctatatacatatatataaataaaattaatttaattaggttggattttatagaaggctggttttggacgcaagaggaagaaaacctcactttcttggaatcttacgcgtttagtataagtaatttattcattattacttgaaaattgaaataacaaaactcaataaattctctaaagagatatcatatatatcgaagttgatattgaaaattcgttaccgtattctatactcaaatatcttccagcttatctaacacatatatttgagagttttcagtggtatagataagaaaaccataaaaaaagaccacatacacgaacattatagcttcatttttattagggttttctatcatattcaaaaatatatataagaaaaataacacagacatgatatgatatatatatgcatgcacacaacattattaattaattttacatcaccttaattaggctcctgatttctcaggcaccagatctacctaagaggtggccgtggcccgaaaaacaagttttcataaaatgtgtgtatatatatgtaaaaaaaaaaaataagtatatttctttgtaaattatagttgttgcccgttttattttcttgttcttctagttctaggagcacattaattttaatctattcaaatgtgtatatatatatcatgtaaataaaaataaataatataatataaatcgtgagcagattttgatttatttttatttatgcatgaaattgaagatgaagataggccatgattaaccacgtacggtcatgtaccttattaaaattgttaattttgtattaattaattaattaaggtatcatatatgcaacttatatgctacgtacaattcattttccatcgatgttccatataactattaactactataggccatattagttgacaaattattattcacattaaaataatgaattaaattaagtttgttaagaagggaaaagagtgtatataaaattatatatactttatgatatataaataaagctataggtaaggaaaactatgcattcgaaaaatgagagacaataatacaaaaggcctatactatatagaggggccacattcgaactactcttctatttttctcatttgttgttttgtattataactacttatcaactagccatttagttttattaaactaaagcatattcaaataaataacaaaaaaaaaataataataataattcattaatgggtcgttccaaaaaaataaacataagcattgatggtatattgattaagtaataattgaaaaaagaatactttcaaatagataaataaataaaataatagaagacataggattaaatattggagaattagtttgggtttctaaagtagttgcagcgcatcaagcagagtttacattgtgcaaatagcaatgatgataaaaaagaatttttctctctgataatacagtttgtgtcttatctcgtgacatggtttgagtttgtttcgttgttgtattctgtttgagtgttagctttggtactgttatattggatcaacgaaggtttatggcttcagggagtcatctgaatatggatgtggtagggatgcatgaaggggaagaagatgtagatatgctgctgctggacgatgatgagggcgatctgtcagggattgatgatcggtgggttctggttggacggtttctcacgaagcggagcatcgattttcaagcaatgcaacacaaaatagcttctctatggaaaccgggaagaggtatgtatgagaaagagcttaatccaaaccactttttatttcaattttaccatgaaattgatattgcaagggttatagatggtagcccatggactttcgatcgggctccactaattttcgaacgattaaagacaaaggagaaccctcgattggtctctctgaaccgtctagagttttggattcaactccataatatggaatcgggtttcatgacagaaaatacagtccgtaatgtggcgaactatatcggtacattcgtgaaatctgaccccaataactttgttggtgtttggagggact

SEQ ID NO: 379305 - DNA, 1993 bp, Cannabis indica
agagagagagagagatggaagccttaagtcattaagaagaagacatgaatgagtgagtgatcagaatggaacaaaaacccggcgtgcagttgaaggtaaagaaggcatcattatatgattttttgttccttttgtctgcctacgtggcataccaactcttgagaacaacatatataaaattggcagcatatctcaaaagcctgctggcagactcagtttgagatgatttgaatggaacacattttaaaccatttcataacacctctttttattttgtttttttttaattaaaaaacaagacccttctgttgaggagttcagttcattggctaactgtggtcaatcctcatagcaaaataccctgcaacagatgttatttaaattcattatgctgtactgcaaaagggagatgtgattcagaaacaaatcaagaagcttaacttttttctaatactaccaacctcgccacagcaacaactgtaattcattcttacttcgtcggtcttctgtgaaactcggaatcgacccctgccccacccattggcgcaaaatattttttgggatttaacctcttcataagccaacataatctgtcttttctgctttctacctgtcactgaaaagaatcagttcgtatcattcagacaatcagatccaacaaaagaagaatttattagcttgattatatatggatgtgaaaagcattctcctagtgttatgtttgtccctgtaggacaacaattaaggaagccaacaagctcaaattttcttgtccaactattaaagcaaacgcttttgacttggaaataaatagctacaattgaaatttggtatcttggtaggcctggctcagttgagcacgtcaaatgaaatttggtatcttggtaggcctggtgcaaaacatatatcagaataaacgatgatgaaatgttaaacaagagaaagggataagtgataagtgtactggtaaaacacctgcgctactacgcataatggtaaattgcttttagtcaaagaaaagcaaaccaaagaaaattatgttcctgaaactgatgagagtcgattagaaaatatcgaaacagcatcataatattgtacaaataatcttatggaagggaatgatgactatttcgtagtcattatcataaaggaaagagataatttctgagtgttcctactctaatttgtcttttttactgcgtcatataagcagtttttttttttccgcttcaacaagtaaaactcgatctaaatcaaaaaatcaaaaatagatttaaatgagagggagtacaaaagaaattaacaacagtatcctttgaaagtgcactctatggatacctcttcaccattcttccttcagagttcttacattctccgacttccaatacggtgaaatgacattctcgaacaagtctatccatcagccaaaatctaaatcaattgaagagaatgttgtctgaaaatctgactgattcagaagtaatatttctcttgttggcagttaacacgaattagttgttatattatttattatataatataatgtttaagattaaaattgtgatatattatatatattattacatataatataattgggaattatatgcatgtaataatcacaatattgtgtgattgggagttacatatagttgtaacatataagaggtggagttaatattttgtaactttcacatgatcactaattaagtgtgtaaagagtggttacacaacttaatttttgaaattcaaaaactataatttaaatatagttgttggagattgaattttatcatttataatgggtataagtgatataaaataaagtgggaatggtttggaataggttggagtgttatttgcaaaagctgaaaaatttagtaactagtaactagttactatttttttcagcattaacagtagaacgttttttgctattgggatgactttgaacaactcccataacctccaaatcacccatttaatcccattt

SEQ ID NO: 379306 - DNA, 4099 bp, Cannabis indica
tttttttttttctaaataaaatcacaccaaatgagtttagttagtatcttctctgtcttatattgaactatgtgttttttttctttcataaatttcaatttgattatttgcatcttttggcaaatatatatgcctttatgaaaatttggttgctgtagtggcaattttgttgatttactggtcaaccatccatgaatgttgtacattatttttgttttgcgtggaagagttatagtttatattttactttaggggatattagatttttttgtttggaagagttctagtttttacttgaactttaagggatattagatttgtttttggaatgctatgaattgattgtcaaaattatgttttgtctatcatatgaattagaaatacaaattagtacgaaggttagattttgaactttaagagtttatcttgaatgtgaattttaaaagtaacttcaccaaccgtgcctagaaatgggatatacaagccattttcaaggattccttaaaactcggtggagtttgctgagtttcttgcatgcacacaattcacaatgttcacattccatattctgctcttactaatagtattaactatttgagtgtgatgtcatatgatttcttttagtgaatgcaggcacacttagtgcgggctgctgaagtgaaaaaagccattgagtggattttgagcaacctagatggtcactatgctgcggattcagttgctgctgcaattgctgttggtgcagcagcagcagaaacagcagaagacagtgatgtccaagttggtctggcctactcatcacagaaaagtaattcaaaggttcctttgcttcaaggaaaagtaaatgatgcagcaagcccttcaaatatgtctaaaaattttaggtagactttgtttatttttctttttgtgtaatttctgtgatgtcattgttattgagtcttgttacattgcctgatttttgaaccttttttttttcttccttgttttgtttttctaaaagatcctaccatagttttcaaagaagctagttttttttcccttaaactacttctgtaactcactattggtgcatataaagttagataatgcataaagaacatagttgtctgctaagttgcaacagcatattattcattacaggagttcagtcaattgtacatgttactaggagacaatttttctgttctcaattgcttatttttatttttgttttaattctttttgctcagtaagcaatattgcaagttctgttttgtactttatttatctatagttaatagatcacatttaccaaggagttctttatttgatctacaagttagaattaatgtgaaatggtacaacattctaacctagtgatcctcaccagagctgatgtattgcgagaaaatacagaagctgtttttgcagcatgtgatgctgctcatggaagatgggcaaagttacttggggttcgcgctgtcctccatcctaagttgagactgcaagaatttttaagcatatacagcatgactcaagacttcattacagccacagagaaggtagtggttttatatgttttcaagagtctttatgtagcttacaccttgtggtgttaatgatgccagtctactctaaaaatgaacagataggtggaagattggggtatagcattcggggaacactgcaatctcaggcaaaagcctttgttgatttccagcacgagtctcgagttagtatttaaatgcacttgcttgaattgaattttttactgtgtcaattgcgttaccagttctaactctttctgcggtaattttagatgacaaaaatcaaggcagtgcttgaccaagagacgtgggtggaagtagatgttcctgatgaatttcaggccattgtcacttccctatctttttctgaagcattgatatctgaggatacagatgatgctcaaggtaataaggaaacgagcaatgccagctcccttgttattgtgtatcttcttaaccaattaaagcatgctaattatagtgaattatccacagagaaatctgcacctgtgtctgagacagttgaaaagaacaaagttgatgttatgaattcttcgactgaaaacaatcataccaacacaaaggagcgtggaaaatctacatctcaaacccttttgtacaaagatgttgggtatcacatggtaaactggttagttatcttattacttagtttttgtttgttctcttgtactttgttctgtgttccacagcttctggttcccacttttcaatatgttctagttctacaaagtagcccaattaattacaatgatcggttcattgtgtatatcaatatgacctcctctgaattgtactttttttttgttcattttaaattgtttcattgcaacttatctatacttgctttactgttggggttatcatctttctatgtgtgtgggtggttctcattttacagagactagttttcattatttacattaaagttattgactgttgcactgtttttactttcaccagtggcttaatattgctgaagatgttgtcagagtatgttgacatgaataattctttgtcaacactttcttcagaaattgttcatcgcattgtagaaatattaaaattcttcaatacaaggacttgtcaacttgttcttggtgctggtgctatgcaggtactaatttttctagccatttcaccatgtatcgtccctgtataatttacaaaacttttaacatgtcttgattttgtcatatatgatgtaaatttgaacaattcctgaagtcgtctgttataaatcaaattacagaatcttaaagggtctttagtttgtctgacatgacttataattgaactgttcttttctgtatgtcacaggcatcagtgtattcattattgcaattatttctccattttagtcctgtgtttgtttctctgagtgattaaagccttacatttttctcatccacttgtaataggtgtctggtttgaagtctatcacttcgaaacatttggcccttgcaagtcaagtaatcagttttatatatgccattatccctggtaggttgtcttaactaatttcaatttttattttcataacgttctcttgcatcacttttcattctctggtactaacaagttttttttttcaacacatatataagaaatgatgatcaatctctacttgtgttgttaatatctggtatgtttagcgatattttgataagcgaggctccctaataaatttgggaggacgtcagtctcatacataagacctgtcttttttgaaaaaagaaatatatattgaagtattcgagtgcaacttttttccccttttgcattaacttggcagtttgttatttgtcaatgtctgttgttaattgagaatatctccttgtctgttaactgttgcccctaaggccttcacttgatataatttttgttttatttatgaaatgaatggcggagatcttgtcaagttgttaattgagaatatctcctccagtctcttttgcttagtgaaaatcaaaggaaattcgttaatatttttctctttcataaaaaaacaaacatctctctgctggttgcatgatgtatcgtgtatctgctagttattttaaaggatagtaagttcttgagtaatatcacttatttatttggtttatatgaagatatcagacaaattctttttatgaaagtacctgatactcgaaaggcaatgctgctaatggagatagatcgagtggctcaggtatgtgattttctactatttcgactactactaccgtattgcaactagactaaattaacattattattttagttaattaacagcaacaccagaaatattatttcttagaaattgtaacaaatttaaaagaacaaaaattatctaaaatatcagttagtaggaagaatttttattgatttttcctattgtagaaaacaaatttcctgactcgttcttgtcagggatttttttgcatgtattttattagcagtattttatgattatataatagacctttcttactacggttctccaccataagtgaggatactcaaaaaaattgggaggccggccagtctaggacaagtgacctatgtct

SEQ ID NO: 379307 - DNA, 2712 bp, Cannabis indica
caggcatactttggcttgacaaagtaaatcaagacccttacttgtcaaggccataagaagatagccaagattaaagactgcctagtcagtcacgcaatccatgataaaaaagtaacaatgccaaatactaacaatgttcaaaagtagagggcttatgggcaaagatacgaacatgaaagccctggggctaaaaataaagtagtgttctaaaaatgccataggccatgtaggccgtgaaagtaaagttccacaaaggccagaggccacatggatcataaaagtaagtaatgttcgaaagatgaaaggccacaggccataaaaagccacaggttatgcggaacatgaaaacattgtcaatgtgatataaatataatcctaaatgctagtattaaaaatacagtctaaatgtgtaaaggggtaaacggaactgaatctacagctagaagatcaagatccacagagtctaggccagccccatcatcagcacgttggctggcctggtggtcaatgtcttcgccagccacctcctccatacatgggttagccaactcctcatcatgtgtacccaaacatgacctttctctataggtagcagcttggtctgtctccatccaactctaaaaaagtacttttccacaggccaacattctttccacaaaatccttactacccatgtatgatagtttagctcaagggttatgcaactgccataggtaagtttagaggataggtcagcatactccttgctaatggcctactggccatcaagagcctcctgtaacttcttcttatgatcatcaaggtcaatttgtaacctggagataaaggcagcttcggcggtgttctctacgttctttgcaccaggcatgctctctaagccaaagaccattctctgtctctctgccaggagggcctctacctagtaatggttttgtcctttgccacaagggaagcctcaaggtcttcactcgctccttaaaagcatctgaaagtccttgagagccacgaggagctgagctcaacttcatcagggcctgaaaaaaaatagcaaaacaacatcaatgtcaaaaccacaacactggccggccagtccccccttgggactactatgggcggccagcctcccattgaagcttctaaggccggctagctacatgaaacaagccacattgcttaccagcctatacaatgccaagaaaatgaataaagctaagagtacgacttaccagagaaagatcctgaagactggtagagtaaagcctgctaggttcaccatcaccaaggtccttcagatcctcttctaggaaaggaagagtcctctctttgtgccacttggctacttcagcagccctttgtctagcaactgacactgcttctctaccaggcctctgagtaccttagtcggcaggccatatcacaagctgcctagctagtgcagaccttggtggaaggggaggtagtgatgacccgaaagaatcctcaccacgggaagtctcggctgccttggccctcactcgcgtcgttggctcatctgaaggtccctcagtaagacctctcaacttggaagacatatttgcaaaagaaagtaccaaagtcacaaagcaatcataaatattcaatacaagaacaaaagtttgatattatcaactatcaataccatcatcatcaaaagaggaactattagagtcctcaatgatagccttgccctagcccctagatgcaggaacatggcgtataggtctctcagaaacttggcctctaggcctgatatgaagagaagcatcacccactggacccccactggccaggcaccggcagagagccttctgtctcttctccaaatttcatccaatacgagacaaaggtacctcctcatcctctaggttaggagcttgctcatctccaaggcaggccccatctgtagttggcactcttgcaactccaagagcaagaggctataagccagacttgtggaaattgtcaacactggtcaaccaaattatatctctctactcagtcaatagagacaggatgtgattttcgctatcccttatttgcaaagtagggatagagcgtctgaagagtggcactggctggaattcgtagtgcccgatcctacgaagaccatatgcaataaattacttttttgtgtacgcactgaactttgacatggatgtgcaattagtgtcacccagccattggtgacccatctggctgaagtaaaaatatccagtcctgttatccagcactgtcccaagttcaatatggcattcagaccatgccaaccaacccggagggggccaatgcacccgatagtttctacagggaatcttgcagtggacatcccttattaagaaactaccaaggatctcactaaaggccccatcgaaaagagtagaaggaggcaagacccaactaactccatgtggtctcacatccaatatctccggcccaagagattactctaagacatggtcatgtcctagctctgaaggctcaccgagccttttcagtggaataccatggccatcatagtgacctaagggacaatcagggaggacagaacaagtcctgtacctcctcctcctcacttgagaagcctcctccagattagattctacatcaaaactcttagccccttggtccatctctggcttagcatcagcaagggtctaagcagtctcctccaccattctaactcgaccccttgtg

SEQ ID NO: 379308 - DNA, 4412 bp, Cannabis indica
ttttatataaaataaaatttattgaaattcaacataaatttttggaaatagaatcattttaatttaatatgactaaaatatcggcgcagccataatttagatattaaagtgagagaacaaaagatttgttgacttagaaagacagcaagataactaaattatttgttagtgtataggatccacagaaactaatatatataattttaattatatatgattaaacaaaataataatatatttggtcattcgtgtggtgggatatataattaattgttacttaaagcttaattagttaatttagtggttgcatgctgacgtagcaattgcatgcccgtcacgattgataattattattttatattctttacgatgacattaatttcccaattatatttctttgctttttattttaataattaataccttgttttatttttcctttcgaaactttttatacgcggaatatcggaagagaacagagttattggtaattaattatggttcgccctttaaattatatatatatttaaaattttaattaattaaattttttaatcctattaggtcattttgtaggttttttttgggaaatttttaaatctttgagctcatgtcattctttgttaattttagatttaccatcttgatcgctcgtatattcttaagcgatttaatatatataatgtttttgggtagaatatgaaaaaaaaatttatctaagggagcataaatgtaaaaaaaaataataataagagatcgaaattattaatacatattttcgttaactaattgttaaatcttttttgtaattaatatattcaaaagataaataaataacattaattataacaatagtaataaatgacaagagaatttttaacgtgattttaaaattaattgtatacagaatacaataaattattttcagaatgaatgataggtataattctctctctttcacaaattggtcattctttgttctctaggttctgtccttattaatttaaagaaatttagaatgacaattattcttttgggatcctatcatttgttaccgttcgtgaaacgtggataatccatgtgttttacatttacacacatgggataatgataaataacttctcataactgctgttttaactttatttatagacagttatgctaactatgctttatctttctcgcaatgtaacaattctcctttcaattaatgctttatcataaatcaacatctaactatgttgttctatttctcgtattcttccattgagcaaggcataagtgagacgcttatcaccatctgataattgcgaggtgaaccatgctgaagatgttatcgttattctttcaacatactcacgagtatgtgggtcaatgagctgagagttcttaggataatttattatctaccatttccaaatatttttattttagggtgtattctgtgtatcccaagatgaactttctttattaagtgttttcattaagcaggtggtttgggctttcatagcttccgagattacaacctggcacttcttggtaaacaaggttggcgcttattgactcacccgttgtctttggctactcgtattttaaaggctcgctattttttatttgggtctttttctacagctgagattggttctaaaccgagtttcgtgtggtgaagtattcttgaagctaaagacttggtggctgttggggttcgtaaaagtgttgttgttggtttaacagtgagtatcttgacagatccttagcttacatgttgatcacccctttaatatgtctatgtatacacatcttggtttagttgataaaccagtttccaggtttatgaagacaaatgttcgtgaatgggatattgagatcctagaagacttgaagctcttgatagaattgctactctctatgttcctattaactcatccattgaagaggatttctggtattgaagcttcgaaaagtcaggttactacactgtcaaaagtgcctacaagtatcttgaagagtttaaaaatggctcttccaatgataattatattggtttttggagaaagatttaggctctaataacccccaaaggtgagaaactttctttggcgtgcaacttcaaacatgttgccttcttgtgtttaattggtgaccaaacatgtgccaattagaactatctgccctatttgtaacagtagtgcataaaccatttttcatgcacttgttggttgttcttttgctcgttcttgttggcacaactcttgtgtcgattttggcagctggatatagactgctatttcctcttggtggcatagtttatcgagcagggtaggggaccgaatgcttgaggaggcagttatggtggcatggggcatttggcaagctcgaaaatgttttcatttagaaccagaaatcttcaataactgctgctattattctttcggctaggtgtgctattgatcaatatcattttgctcagtcaacaaaagatgaatctttattattatttcgcgataatgataaagtttttaagcattggactactcatgtgttaaactagatcaaggtcaatgtcgatggtgcaatctttgagcaatttggacattttgattttggtattacaacctgtggtcatgatggaaaggtggttgctgctttcaacaaatcttttgaggatcgggttcaacctgagatggaagaaatcactggcatcaaggaggcccttagttggattgatagttttacttgcaatgatgtagttcttgagatggatagtttagtttgtgttcaagctattttgagtcatctctccattctgtctcaattttttgttgtttcgattgtaagactttttcttaaatgtttgtcttttgtttctattagttttgttaaacaatatgcaaataaaactactcattatatggcgtggacttcttacttctccacaggtcgtactatctaggaggatcttctgtcttctgagttagttgccattgctatgactaattttttaatttattgaaagctgaagttttattcaaaaaaatatacatctttattaaaataagtgacatttacattacaaatagatgaaatacaatagaatatgatactggtaataagaccttaaatgttcgttgttataagtattttatatcagcgagccattgagccatgctaatttatacactcttgttcccacaaaagcttctataatgtaaggtcctttccaatttgggttaaatacccctgttgcaggatctcgtgtattagcaaacacatgtcttaacactaaatcacctactttgaagagtttctttcgaactcttttattgaagtgtcttgtgatttgatgttagtaagcaacacttgtgatttgtgactcagtgcatttttcattgagcatatccaaggacatcttaagtagttcttggttttgttcttggtcgtagaatttaggtctgtgtatcacaatattcatttccactagcaacatttcttttgagccaaataccagtgagaatggagtcccatcgcatttttttctgttgttttatgggcccaaagaacctgaagtagctcattaacccatcttcccttagccgcatttagcttcttttttttacagtgtattttaaagttttattaatagcctaaacttgcccattagcctgtggcctagatactgacgagaagctcttaataatcttattccattcgcaaaactcagtaaataaatcttcgtcaaatagagtctcgttatcagatactacttttatggggattctaagcttgcatgcaaatgttatttttaatcacaaagtcaatgacctttttgtaagtgattgacaccaaaggttcggcttccgtccacttggtgaagaagtcaactgcgactacgacacattttgtaccaacctgccctgttggttaagatccaatcaggtcaatccctcatattgtaaatgggtaagacgaggtcatcattcgtagttcgagaaccgttggcccttatcacttttttttaacaaactcatgactgtctttgttgatgattgaccaataataatcctgttgaattatctttttagacaaactttgccatcatgtatgatctctgtagaagccctcgtgaatttctctaataatatcagaggcttctatggaaagtacacatcgcagtaaaagtatggaatgttcccttctgtaaatttaccgtcaaccagtgtgtatctcaggcagggccgtcttaaatattttagaggccatgttctaatcttaaaaatttggcccttaataaagataataagtataattaaattctaatttgaatttttttctttatttttttaggtagatcaagtttaaaaatttacttctagaagttttagttaaaaaaaaaatgtttcattcatatttga

SEQ ID NO: 379309 - DNA, 2584 bp, Cannabis indica
agataaagacatacactacacttacaacgtatatcaagattgagatttattgagataaactcttattttatattattgcaagtgggagttggttagaattttatgcgctaaataaaatccatctcgatataatcttattaacagatcattgaatgatatagaagtcaattttatgttacttggtatgttcatgattatagttttaatatataaagcctattaaatcgtgaagttatggataatcatgattattgtgttgtctatacagtaaaataatcataattatatgcttcaatcatttaatcacatgatttatcactgtactagatttacgctaacgtgataatcaacgatggggtttgcttacacttagataagtgatatatcttttccatggaattagtaaagtcaattaaatcgaatgtattagcaatacatcagacaagaaagatattcacactataaaagatatcgtaaacttactgtcatatattttctaagtaaatatcccttagtttatcttagatcaaatatcttaatcttgagttggttaggttttagctcaactttattgcacgtattctttgacttatttgttacaacttagccataggcatactatttacatgttgggaacgcaatagtataattgagtgatagcgctaatcatagaaatggaatatatagcttctataaatacttaaaagtaaaaggatagtttccttagagcttcactaacaaacataaatagaagaaatcttatttcagtaattatattaatttactgaaatatcgtttataaaaagctaagcgttttaaggataaaatatattgatcgataaaacgataattcgagttcctactcaatatagatcatctatagagggtcattaattatttagattgaaaaaattaataatttatagtgtatctattcgtggtgaatagaacgttctatctaatcaatagtacaattctgaatctatagtggaatcaagagagattaattggatagagactttactcggtaaattctactacttattggattcttgattatataggttcatggtccctacactagttgagataatattactttgtagtctcaattaattggttttaattaatcaattaggattctaagttagactatatcttatttataaatttgactaaggaagggcatattcaagaacaaaaaataatgtaaggtttatttgtcaattaaaagaccttataggatctaattaataaataacataaatggtattttggttaataattaattattattcaatatatataaaggaatgcataaaaaatttcatgtgaattgccactattgtctaatctctctttttctaattttctaatttattcataatttttttgatttatttaaatttttattctattaatttgttttaatgggtcttgatgagtttaatttttggaataattacataagtaactatttttggtaaaaaaaaaatatatatttacatttaaagaaatttatacatttttacggtttttcataaaaataacatgaaaataacaaaaaaactacataaaagtaatatgaaaataacatcaaaacaacaacaacaaattaacaagagtacaacataaaaagactgtattttttgtaaataaaatccaaacaattattaaaatgttaaaaattccgtaaaaccgtattttttgtaatttttttattgtttctatgtatttgtgaaataatccatttaattttatcgtgtactcttcccaactttttattctctttaggtttcatttatctcctcccttccattggctctatcttcttataggaaaaaaaattgcgatggttcatttgaattcccaaaaccaatctctaggggaggcttcggttcatgacgaaaagagaaggcttctgatcaatagtttgccccattggcgtcattaatagcactacaatctttaataattcaaaagatggtaaacaaagttagaaactatggaggagaaaacagaggtgggtgaaaaggattgtagagcaatagaggtcagagtaatagaggtcgagactttagagaaaatggatgtgcgtggtagaagaagaagaggacgagaaagaggaagtggaggagcaagaaaaaggagaaaacactttatgtccaagatcaccaaatttaagagtgaatttcgttaaatcattattgggtgagacacacgatggtaagtgcaaatatatatatatatatatatacatatttatatatcatgtatgtatgttgtgcttgagagtttgatgatgcaatatatattttgatgtatatcatatatatgattatgtagtcaaaacgacaatagtatgcgaatcatacgaaacaaatttgtggtaaagccaatagcgctgacatcattgtattattggagacgaggaggaggtaaataatatatacagtagaatctctattcaagaatacacttgggaccaagtaaattatattctaattgggaggttataactaaatagagttacattagaaaaaaaaattaaaaaaccaaacaacatcaatgtaacaataataac

SEQ ID NO: 379310 - DNA, 2507 bp, Cannabis indica
gttggctcttacatgtacatttcatcttggttagaacacttacggacaacatggtagttggagtatcaaaaggattcgagaagagacttcaactagtcggtgttggatatcgtgcaatgttggaagggaaagacttggtattaagtctcggcttctcccatccagtaagaatgacagttcctgatggcatacaagtgaaggtagaagacaacaccagaattgttgtcggtggatatgacaagagtgccattggccagtttgctgcttccatcagaaaatggagacccccagagccatataaaggtaagggtgttaagtatgccgatgagatcattagaagaaaggaaggaaaagcaggaaagaagaagtaagaggcactccacttttctatttctttttgtttttttcgttaatctttttgcttcttgttagtgtacatcagtcggaacagtatgtactaacattaatgttaaaaagaataatttctgtctagttgatttattcttcaattttctacgagctaattatttagttccaaattggagcatggtaccgtgatattattcatttgtggtaactgaatcaagagatgatgaaaagtcaaaaaggacaatctataaaaatgttttgctacgttttcttccttttcgtacaagcctttccaagcaacaagactgtcctagatagaaaaagctaagaatatagtgatcgaaacctttatatcaagccaacaatagtagaattctattatcaacaacttcatacttctcagctgggcacaacattttgtctaactacaatttccatatatcgttccagtctaataatatgcaataaatgctcagagcagagcatttgacaacagggctaagcatggttcagaaagcatttacaaagaaagaaagaaaaaaaaaaagataagagaacaatgatgtcgccacatttctttactaatacctaaatgtaggcaaacgacagtgaaccttccacaacgtcactccaattcatgctaattattgagttcataaagcctctacctgtttgtctgcaagaaaattgcatcaagcaataaatattaagccaacaattgaagtatcttctatgaatcaattattagtacagaatttctaagtagaattcggttttgtttttagcattctatacaatgtaattacctgaaaaagtaataactaagaactatcgttctctcccgattcttcgtggacatatgagatcgatttctcagattcttcagtcttttcgtcctcaccattatcactctgataatttgaacacaaaacggcgatagaataaggaccagaaatagcacattttaacttattaattgatctatatgaatgaatatatatagaaactttggaatctgtatgttaagtagtgaagagtaggaaaattttttacaagcttgatcttatatgcttccacagctttctcatactctactttcctcttcagagccatttcaacgtacggacacttctcctaaaataaaacgatcaatgcaatatgattttgtgattttttagtcacggtatctctaaaatacatagctgacattatatacaaactgctatcaagattgtccgttaactctatcaataaactttaaggcagaataccttacgcattaatctcaactaaatcttatgaacaaattgctaataatctaagagaatagaagaaatcttacagcagtagacatcaatttccacttctcaccgccagcttttcctacctgcaaataaacatttgatgaatgaatgaataaattaacttcatctacggaaacatcgctatatctatacaaatatttaattccgttctcaacttttcattcgatttcttgctcaaattttcgtccattttcttatataaaatataaaaataaaaacgaaaagaaaaagtaaagctgagttgagtcggatcttactgctgagcaagccttcacatcaggatagttttctttgtaagacttcctgaactcctccctgttacatactcgatcagaacacaaggaaacgaaaggatgaaaaagcatttccacacaactcacttaatcgaaaaagcagaatctaaagagagaaaattacatgaaaatgaagaaggcaccggcgggacgcttcggagcatcagagttcttcttgcttgccttcttctccttcactgcgttccgtttattcagcatccttcaaaattcaaaacagaaacaaaagccgtaacaatttaaaaatcacgcacggaccagaaactcttcaatccaacaaaagctaggctacatcagattaaacgatccgagagagaaacataaacgcagcaaaagcaaaacagagagctgagagaaaggacgattgtgaaagtaaaaggcagaggaagcttaagagtttacgcagtgtcaggcttcttgtgagcaattgcagctgatttgggacctctcatgctggctattcctgatttctgatctaaaaatggcagagagagagagagag

SEQ ID NO: 379311 - DNA, 7769 bp, Cannabis indica
tgtgcatggtacacggtatactcaccttaattagttcctactaagtattgatagttaaccataataaattgggaaattttcaaaaatacattaatactgaatcttacaaaaatgaaaatattttgcaattaattgttacattttactgagttgatacggtgttctgcccttttttttttttcttaaataaaaaaattttaaattggataagagctgacaatgagtccacttaaaaaaatataaattttataggtttttataaatagtgtaaaattataattttttttcttttttgcaaaataattattttattggaaaattgaaaacaaaataaaaaatatggaaaaattagataagggtaactaggtactaaccataagggggtaactcgttaccttatactattttttccatatttattttttacttttttttctaaaattttcaaataaaaaaaatttttgaaaaaaaaaattaatacttttgtacacttatatttgttgtttttccctactatttaggaatttttacaaaaatattaaattttaggtaaaagtttacaattttactatcatacagaattttttacaaaaatactatctttttataaaataacctaaaacaattataaaataataaaatagaacaactaaacacaacagtaaaacaagtaaaaaataaccgtcaaataacggtgaaaacttaatatagtacatggtatgaaatttacacatttttttttttaaaaaaaaatacaatatttttttaaaaaaaattccatcattaaaaaaaattaaaaatttcaggtggtgtaaaaactgctactatctactataccggaatcactcccaggtgggcttctttatcgggccatttaaggcccaatgagaacggcccaaaatcataaaaaccctttcttcccgttagatcaacactgactgcctctgctttccatagagaaaaacataacactcgcttacccaccttcggcgttgcaggaactacgaacagtaagtctttactctgcttttgttatattttcatggcgactttgctttcaattcatttcttttacgtgcgcatatttaagatagggaagaaacttacaaatttctcagtttgttgatgccgcatagtttttattttttgttgtagaattattctgtaaagatttgcatttgtaagaaattaaaaaaaaaaattatgtttgcattcgttatcttattattgttttagtaaaaataaaaaagcagcggaattaactataaagtatttttttgttccatgatttccatcttccttagtttccctctacttttcagggtttagggttttaggactcaagttactcttggacttcttttatcttattctcttactctccagcaataattactgggttgtgtctccttaagccgaacaaactgtttcctattcatattatccattagttctttctcaatttcatggaaaacccttaaaccctttaactctctctctccctcctgctacagaacctgttggatcatcctgtgaagggtgaacccgtttttccgattccctatcctttggtgcagtatcataggtcactctttatttttttatatgtatgttacgattaatctgcacacgcacagtagtaatgtaaagacccttgcctacctgtatttcaaatttgatatggtatagatacaagagagttgtttatgttttattattgatttaacagtattgcaggcacttgtgattaaattcatagaaaatgagagaggataggtctaataaacggggcaagaggaagaaggattcctatgatgccaatttccagaataaagaatctggaagggtaactgatggtggttctgataaacatgaagattctcgaaagcattggatgagtacaccatataactctgttgtcaggtatatggatatatgaacttttgtactaatgatgaattgcataggttgttttatttttatgattgcctacttggattattctctcataaagctacctgcacttgctatgttgtgtatatgtgggatttgataatcacttttaatgctccttatttaggaaacaggttgaccctgaaaccatgaaatacttctctgaaattgcaaatctttttgagagcaatgaggttgattgggaggagcgatcggttatgtgtggtagtgctctggaagaaactagaggaaaagaacttgaacttgcaactgattatattctaagccacactctgcagagtcttcttgagggatctgatgttgaacatctatgtgctttccttgagaactgtgtttcagatttttgttatattgcaatggatcgatcgggttctcatgtggctgagactgctttgaggtctttaggcttgcatcttcaagacagtgatgtctactctgttattgaagacactttaaccatgatatgcaaggtatgagtatctatcaatggttaaaattgtatgcattttattaatagttgcctttgttgttaccatactgtagaaattgcattgtcacaaatgtaagaatataattttaaattatttattccttccttttactgctgtcaggtaattttagaaaatcctgttgaggtgatgtgtaactgctatggatctcatgttcttagaagtcttctttctctttgtaaaggagtaccattggattctccaaggatgcaagtcaacaaatcatcaaaagttcttgcagggcgtttgaatttcaaggcatctagatcagatgaagatgctttatctcatgctcataggggattcccagatttacttaagttccttgtctctgggttgttaaagtgttccaggaaagacataaagaccttgcaacttgaccagtacagcagtttggttttttcaggcacgttccagtatactattctggtatctttgtataatgctatgttcttaattcttatgcctgcaagaatgttttatttgccatctttttataacatgtttactcttgtttttttttaaataaagttgtgtcttatgtatatatattttgactagactgcttttaaactattgatgggacatgatgaagaactatcgatgataattcctattattcttgggtgccgaaaagaaagtattgtggagggaaatctaatcgactcaacgaaagtgccatatgttatggatttgttgagagaacctgcatttagtcgtctaatggaggtgcttgtctttaacataacttgcattcttattgttgcagttcttaataagtattttattttttttatctgtccttacaatgtgtttgcatttctttgagtctgtgatatacaaggaaatttttttcgagtacattctgtaattcagtcttcgaatttctttccaataaatcttcatactgtgatcaatatggtggaatttttaactctttatgtgcttttgttgagcaatctgctttacttagtcatttatataagttttcttttaaattaattttcaatgattaggtattctgtctctcccatccccagtgataggtttagctttccctagtttccattttaatattgctttgaaatatttttgcaggtaattttggaagtggcaccagaagtcttgtacaatgagctgttttcaaaagtgttcaagaattcattgtttgagctttcatctcatcattgtgcgaactttattgttcaagcactaatatctcatgcaaagcatcaagatcaagtacgtactttgaattaaaacatttttacactcttaactcctttagtgttgaagtattcttaatctcattaaagatggccaactaatatttatttgaggtagtctctttggtgatcacatttgtcttccttttatgctattcgtttgacatttgtggatctaagttgctattggtattattagttttgttggatgaaaattttgctctagtgtctcttttaaacatattttttaatattctttaacgtcatcatttgtccactagatggagttgatatgggaggagcttggtccaaaatttaaggacattcttcagatgggaaagcctggagttattgcttcaatcattgctgcaagtcaaaggcttcatactcgtgaacaagaagtttgtaactatgttaatcttttttgtgtttccaaatttattttaatttatgttttttaaatttaatatgtaatatgtgaacacacttgaaatcttatttgaaaacctacttaaaaatatgaattactgataagtaaggctgacaagtgaactcttgtatttcattctttaattattttggttccttctcattctaatcataagtattgggtaaaatactttggcagtgttgcgaggcccttgctgctgcagtatgttccgcaactgaatcaccaggatgcattgttcctcggatactttatctagataaatacttcttctctgaagacaaggcaaactggaattggccgagaggtgctagaatgcatgtgattggttctttgattttgcaggaagtttttagatatccaaatgtatgcagtttttgtattgtattttggtttctgtcttttctttttcgaatatttgtttagagtaatttcttctggtcgatgcttttattttagccacacaacatgcgatatagtggattgtctcttttgattttcaattatcagttttttttaagctagaaaaaagtttacatgtttacataaaatgccaaagctgttgtgcattttctaatatggctgaattctagcagtttgctttgatatcattgttgcttatgctaatataagtctgtgcaatttatttctacttaacaggcatttatacagccttttatttctagtattttatcactggaagatgacaatgtcctagaagcagctaaagactcaggaggtgctcgtgtaattgaagcttttcttagttcaaatgtttctgcaaaactgaaacgtcgtttgatagcaaagtaagtcttttctatttttcatgatattctcactgtaatttgtatttaaaaataatagtttctttcactttgtagacttcgtggacattttggagagctttcaatgaatttgtcgggctcattcactgttgagaaatgctttgccaccggtaatatgtcactgcaggaggccatagtatctgagttgtcagctatacgaagtgaactttctaagacaagacagggtcctcatctcatgaggaaactcgatgttgaggggtgagcaattagctagagtgtgctttaaaatatttcaattgttactcagtgcaatttaattttattttgtccttaaccactatctgctggtgacagatttgctgctcgacctgatcaatggaggtctagacaaacatcaaaacaagcaacttatgatgaatttcatagtacatttgggtctggtgatacaaactcatcaaaatctggcaccttccttacccatacttacaagaacacaacacaaccagaagggctaaagaaaatgagggtagaaattgacaataccctaacatctccctctccatttttgagcacttcaggctctaaaggaaagtccaataaagcagaaaagcgcaggaataagtatgctagaacttcctaagacagcgatagcacaaacggtgattttatgaattgtcaccggataaaaaaggagtctctgcaggtcagtgaaatttgccagacaaaacagtgagactgcctggagaggataagcaagacttctacgaactaggaaacatattttggatttaattatgtaagcttccaattttgcaacttccatgggagctgtcgtcttgtaagttatagaaaataactataataagtcttcgatcttaccttgtcaaaatcttagagttatagcttacaagttttgcttgatttagatgttgttcttcctgttctttattatgttgtttgaaagctttctagcttatgtaactctacctcagtttattctacagtaaagaaattaaagaatttttatttaattacccgagctattcagcctggaaacaaacaaaactgtatcttacaatgattgcattacattaaccctctgctgtcactgccctacactagaaaattaatgaaatgaaaaataaacctagaaagaaactatgaagattccagtgtaattgctctgtacttctatcttcaagccatcttatggaggactatacctggcgcatcaagatggtattaagataaactacaggaaatcttctaagttgaagaagcttctaattgttgggtaagtaaaagaaattattacttgttttgtattggattcgaaccgctccgtggtatccttcgaaaatttgatttaacctgctgatatggagttgtcctgttaatctgcaaatccttgacagcttgagttgatgatgatggtgaagaaggatgcagttttgatatcacacgtgcctcacaggaccaggacgatagaatgagtgaaacagtaagtgcaaaagcagctagaaatctagacaaggctttcattatctattctctttgttgtgtcttctaagttgatgaagattgaagatgatataacttgtaagtattttgttaatgtgtgttcttttctagagtcttgtgttacagtgggggttggtttgttgatttatacctactatactaaagataaagttcaatttgggatctgatagtagcatgatcatgtgctcaaacattgactgtttcaagttgctactctgacctacagatttgggaggctatagtaatagtaattcatatatttttcataagggaatcatgtgattaggcacgtgatgttgatattagtattgaccctattctggggaagctcaaaatattgatattatattggtgaaaatcagtggtgttgtttaggtgttggatccacaagctgctgattcataacgtggtggggttacagctatttgggtatcatctgatgaattggtaattggtatggtcagaaatgaaaaattgtctatctggtttggtttgtccattgtttttcattatgctatgttttgacgctttaaaagcaatgtgaaaaggaaaaaagccaaccatgacttttgcaattctttttaggaattcttacatctagctgagctgatagcttttggagttgtgagaatctaaaggagctcatttgtaaatcaccttgtaaataaaaaataaaacaaattttgggattcattgcatacatacacgcacacacacacaaatgattaattacttattctgaaaaaattataaaaaaaaaaaagcaaaattcatatatcgactttggcaacaatattgtattatttcttcaaatttgttttaatgttgttgtagtggctcataataatcttggagtagcttttagattggtctacatttttgttgtgaagtctttgattgcttggaactctcatatatgcagtctctagtgttgtgttgtatttggatatttatcataggatattaaaagtttgcctctagttttccataaatatctcaacttcaatcctatcatggactggattaattaaatgagaaacttgtttggatatactctgtactttcataaaatttagaaaaaagtaaataaatttgtaacgttagttcttttcctttttgagtaatgatgtaatcaaaaactatacttttgtattaaaatattgaaattcgggttcatatggttggttacaaggaatagaaactaggtaagaattttaataaaatagaatagaataaaatttaaaatacaaacaaaaaaaaa

SEQ ID NO: 379312 - DNA, 3010 bp, Cannabis indica
gacaaaaaaattgtttttgaaaacagaaaacaacattttgatgtcttctattttctagtattttaaaactctgttttaaaaaactgtttttaaaaatttttgccaaacaatccctattagtttttaaaaactgttttctgcttttaaaaactgaagacatattttaaattatgaagcaaaataaccccggtcatttccatttgcaaaacataagcgtgttagtgctcattttaaattagttcattatgatatttagagtcctatcctattatgtctaaacctagatttaggccatgattattctcgttaacttaattataattaatgaataatcattatgaataattttttatattttgtgctaacattataaatctatttaatgttcccattcgtactttgtgaagcgataatgcatatagtacatcaactttatttcacacatgcatggttcagaatgacatgcttcatgaaacctatattgtggatattgcattccaaaatagtgtagcagaatgtaaacggagacatcttcttaaaataaaatgatccctcttatttcaaatgcatgttcatatcgtttccacaacatgctttctcattaatcgctcgcatattcgttcttctaaatggggacatcccaaacaaaatcattttttccagataagtcattattttccattaatcctagcatatttggtagtaattattatgtttgggatgttcgttcgcatgtcactaaataagatcccaagtctttgaaatgtgtattttctgtttattctcgtcttcaaaatggtttgaagtatttttgtccctgtcttagtattatctccattgatgttacattcatggaagacactttatttccgtcttaaactattagtacttattatttatattttgaaaaagggagggaggtcatatgttgagactagcctcctctcaaacttattaggcagcctcacttatcttggagaaaaatacatacaatcaactaataacttggaccaaactaggattaacttggtgcaggataagtccccattctctggtaaggccctccaaaccttctgacttataaaaccttgttacaagccaaaacttgatctgtttctctccatccaaactgcccaggaaacatcaagcatggctgcactccatagtctagatgctctccaatttccttttagtttacgcaaaagcaattgtgtgtaggtttgactcgcctagtagcctgctccacaggaattgattgaaggggcagtctagaaataagcaggaagtcgtttccccgttttcttacagcaggaattgatcgagttcattatatgtgtaacaacttggcaatgattaatatctatactccaacttgaagggagatttagttgtataattgtcagtaactatagtttcctaattgtatagtgcaccctctttatcttaggtacgagtcaatgggccagacactgcacctgtgtacaaatttctgaaaacaagtaaatctggatttttaggatctaggataaagtggaaattcaccaagttcttagtggacaaagatggccaagtcatagagcgctatggcacaagcactgctcctcttgccattgaggatgacatcaagaaagccttgagagaagtgtgaggacttacatcatgtgttcaaattttatcacaaaattgttgttagttgttactactggaatgaaagggaaaaagggaaaggaaaggaattgagagtattttgaagtgcataatgtctctgtttgctgctgctgtttaatatttacttttgtcccactatctgtccctagctatttttctctcatttttactcctctacctctacgttaactaatatttgttttgttcataataataaattcatggcgacagtttagtaaggatagattcctagttttgtatatgtgtaaatcttttttcaataaaaattaagagaacacaattcttttacctcacataacatgaagtaaagtttagtaatttgtaggaacaatatacaaatgtgagtaagatttgtgaatactagggtattttaaaatgactgaaagattgccaacaaaaaaaaaaaaaaaagaagaattgaaggataatatattgcatgatttcaaagcacattacaaatcacatacctgaacttcaaaaggatcactagaaatcattaggcgctcaaatatcaacatgcttgctccataggcaatcaaacaatctcgctccatttctcctactcgtagacctatgaaaccaataacatcataacatatgttgctaaatctggaactctatgcctaaactacataaaatggataattttgtatgtttgtaacactatatatatattcatgtgtatgcaaatacaattgttgagattatggaatacaaacctccatttcgagctctcccctcagtaggttgtcttgttagcatgactcgaggaccactaccacgagcgtgcattttatccaatacctaaacattattcagatgaagaaataaactacgaataaatagaggattaaaaataaagaaataaataaaccaactcagtgcgaattaaaatgataaatggtcatcttttataacattcatgtaaaataattatatttattatcaataatatcaggaatgtcccagtttcttaaataaattaatagtaataatcataattctgcatgtataccaaattgaatatgctttggggaaggaaaataataacattagaacaagaaattttgagaagtaacatctaattccaattccacacaatatctttatacagtactctgtgggagaaattattcagttttctgcaaaattttagaactggacgaaaacatttatgataaatttaagataacattagttaatgagtattaccgtgaaacgcagaaaattaggacgataaatcatacaactgccaatataatcagataacaaacatgattatgttgaatcaagattccctgttaaaaattggtgtcccata

SEQ ID NO: 379313 - DNA, 2932 bp, Cannabis indica
aaatgaataagcctgacaataggtggtatcaattggtacagagctagtcttacaaaaactaagaaatttataaagtaatcctgaagtggaagcatcgcgccagacatgagatgtgtttggctccattccccgaaccctccatagttgtggttagggatttctgtttctcgggccaagtggtgaaaaatgccctggtcccgaggcctaattccattctcgcccacaatggtccttaagtgatggacataccccatgggcaagtgtaactccttagcttccaagtcggtagcttgtgtacataaggtgtgaccgggactggaccctgcatcaccatatccagtggcaccacctaatgttgtgataccatgtcttgagaaaaaatctgggcaagggcttcagggtttgacattctggtttgggagtgaagttttagaatttctttgtcaaaagcgctaaaactgtgcttatggagatctttcaagacaccactcatttgaaaaggcaagaattaacccagcagttatcccacacattaaaccctaaataaaaagggaatgggggttcccctaaccactgagaagaagccccctctggatggaagcgaacccatgaacacaaattttatgtgctatacatcgggtgcaaactacaccatgaagaaaaaatggtgcataggacaaaaaagaaaaagggcaaatcccactagccctagtacaagaatctattgccttaagaggaaagataaaggctaaactggaaaatagcacggcattgcaggcatagtaccaaataacacatttttacaagtaaattttaaattgaaattgtagaaacaaaccaggaaaaagttagtaaggttggtaacttaccaatagccgaagattgaacgagaacagtcgttggtacgaaacgctgatagagtcgagcttgacaacagtggaggaaaaacaaaaggaaatctgggctccctaggattttggttagactgaaggttttgagaaatatgaaaggtaaaaacatcaaagaagaaaaacgaggggtttttatacaccaactaaggcgacatggatcgtcggtcatccaactgtcctaatttaagagattaaacgcctcacgatccaacggttggggtgataggtggcatatggacaagcatgaaaaggatggttacactaatcgagtgtgacatcctacaattaatgacatcagaatcgattaaaaaccgaatcattttatcaaaaacgagataaattaatgagcagtatttccaccactatcatgagcctataaatatgccaatgataaatagaaatggagatcaatcgcaaaattctttgtaataaacactctcattaatagagcaactcgtagactaaggcccattaatgtctcaatcacgtaaaaattatctcttttaacattcattaattacttcatacccctctaattactggttatcgaaaatcttggtcaatagttcatgttcatataaattttgtacataaatttttgagtattttatatttaaccccataaaaataattttttttatctatgtccttacatatttttatatttgtccctataaaatttatatatatttttttttattttctccatatattttatttgtatccttgtaaaatttatgtttttcacttttattctcacaaaatctgtcttttttttcaataaaaattatatttttcattaatgcttcaattttttttgcccaactaaaataatgggctggctcctccactgtatccactaaccaaaaatatcactaactaaatttataaaagtctagctctttgggtgtgctgtttgagagtgttatagttttattgtttaaattttttagggcagttttatcccatatttgttcgttgactttagtagttcatgatttgataaactatgcccttcagttagacgatgagctatccaacttctagaagattcctgcgctatttgtgaatgtttacatcgtaaattcatgagtaattctaatcactatgtaaataaaaaagtctaacaaatgttaattaaaaaaaactcgtaaaacttataaactattcagtattttttaacaacatatattaatatatgtcattaatattattattaatttatttatttcataagaaattatttgtattaatttaaaaataatatcaaacaaaaaaaaaacaaaagtacttatctaatttaaattttgtaaatatttttttttctaattttttaatcaaaattttataaattaaataaaaaaaacaaaagtatttatccaattcaagttttatagtaatattaaatatttttattgaaaatagaattattcctatctatgtgtagtttcaatataaaaaaaagaaaatgtgacaaaatagctttttaggtgcttttatattgcaccaaaaaaaaaatgtattaatacaccttctatctattttgacatccagaagaatatatatatatattttatattcgtatatattatagttatttaagagagaaatactaattacaatctcttattacaacctcttagtcaatctctacgcctgaaatcacatgccagaatatttttcttcaatttttttttcatagcggtaatcgttatagttacaatatcattcatgaaaatttttgaaaaattgtaaatagtgtacagtgccaaaaatagagtttctgatattctagtctaccatgcatgttcaaaaatcttcaaacctatttttggcattgtaaactattcgaatttttttcaaaaatttacagggatgatgctatactataatgaacactgccgtgaaatttttttgaaaaaaaatatttcagtatgtattttcgggcacagagattgactaagaggttgtaataaaatgttgatggtagcactcctctacttaagatatcctacaaaatt

SEQ ID NO: 379314 - DNA, 1849 bp, Cannabis indica
ttctttttaataataagataaaataaaaaaaatgatcttttatgtgcaaactgcctcctttttttactttcgaattatttcttaaatattctgctaaatatcctgcataatgctttctctcgctctcaattttgtttggtattatgtgtgtgcaggctgctacaactgctgctgaagctgaattggctcctacacatccaatccggttaggattggctttgaacttttctgtcttcttctatgagatcatgaattcacctgaaaggtttgtagaatatattgaagttggttgcgatttggtgttttgctattgatatagtatcttgattgatgtggaggtaatttcaacagggcttgccaccttgccaaacaagcttttgatgaagctatttcagagcttgatactctgaacgaggaatcctacaaggacagtacactaatcatgcaacttcttagggacaaccttactttgtggacttctgatatcccagaggatgcaggtaaatttttttattaactggtaattaatatttctttctaggaaataaacaattttattgtcagttgcccttgtcctgaaatttccgaactattctaagttatttgaagcaggaccaaatattaatatatttccaataataggttgacataactattagtctattaggcattaacattttattttgcatatattcagtagcttcattgccatggtaaaataatggattaacttcaattctgctgtataaagtatttactttaaatatgttgaatgatttgtaactttgacctctagtgtatttaatttatgagtaccctcttttgtgcttcatttcttacgaattatttcttattcaattccccattttgctccagaagattcctagaagatcaatggcactgccaaggctagcggggaaggatgcagaggtgttggattttatggtctaaatctaagtagaaagcgaaagcagtttatgaaaaatatttttagattcacataatctgaatcataatccccaagaacacaatatatttacatacattaaatctacactatgagatgagatcattatacctgttgatgcactatcaggatatctttgattttttttttgtattatcaaacgattatccaatccaccctagttgatttggcaagaatttacattacagatttttcaaatcagtctcaacactctagatgagtgtggagtcgtaggattaatttcaggatgacgatttttatcacgatgtgtacataacttatgcgatactgtgataatgagagaaatagaggaagctctaacgcaaagcacagtgatagagtgtataattagctagggatttttagtaaatctataattatatctatagtttttatttaattccaataaaataaataatttatttaaatttaaataaataattgaacaacaatttatatttatatatttaattataaatatttcatcatataaaatattgataaaatatttaattaaattattatttatttaaaattatttatataaataattaaaacaaatcctataggccttactagggttcgcggtgcgggtggtgcggtttttgaccattttttcaaaccaacacgcacatgcggtttttctaattttccaacccgcacccgcaccgcgaaactaaaaacccgcaaaaaccgcaccgcaaaaaatagtgcggtgcggtgcgatttttgtggtttatgcggattggactatcactaattaattaaactatcacaaatacaacaaacattgagcaaaacttgtcaaaataccacaaggcttgaatacaaatagaaaaaaaaaattaaatgtcaacaata

SEQ ID NO: 379315 - DNA, 3219 bp, Cannabis indica
cataaatggccttcacgtgccactcttaacgcttatcatttcttaaaaaccactaaatccaaaacccactctgtctcactccaactctcactcactctctcacccaaacccaaaagatgcaccaccattactaccctctcccactcttcccttcttcatcttcctcctcaccatgagaaaaagacgaaaacgagcccacaccaaatttctaacccctacaattatcctctcttcttattcctcttctctgttaaaccccaaataaaacatatcatattataatataattagagtatatacaaacccagattcggatttttgttgataacccagaaacaggggtgggaattttttcttttttaaaatatataaatatattaagtatgtgttatgtgggcaaagcaacaaagatctttattttcatagtgacggttctggtggttattggtctgatcttgggatttggccttctacgccatggtgtccatcacaaggaccataaatgctccgatgcctcgtgtctatctccaccggcattcttccctaatccgaatccgtatcccaatccaacttcaagctctggccaatctagcccaacaaccccagatcccagctcaggccaaccaaccccacctcaatctcaaactcaaacttcccctcctccaccgcaggactcaaacccagtcccacctccgcccaacgctaaccccgtttcacagtctccgccgccgcctagccccgacctaactcagccgccgccatcacaatcgccgccgcctccagccgtcattgttagtcctgggccaacattcagtcctccgggtcaggtccagctgactccaggtccagtcaatgcttagcttaagctgaatttgagtaagtcttcttgaaaatttcatcatgccgattcttttatgggttaattagcaaatttttattttttttaccataaagatttcttgattcttggatcagtttgtatagaatttctgcttaattgttttttttttttaattttaaactccttgggaaatggcaaattcctattttggtaatgtgggtttgggtaagacatcttcgtttgtacatcctccagaaataaggaatttactattgattttttccctgaaaatagtttaatttacaattgggtccgtctttggttatggctctattaatttacactgaccactgtgaccagtgtggatcgttttggtaatcgaagtcttgagggtcagggacttcggggccctcgagaaataatgccctttgaccataaatttttaacactttacagccatgcaatgcagattcctttatttatttatttttaattaaattaattttctctttatttctatcttggttttggtttttggaagctctgtctgactctgaatatgctaaatccgaggtttgtaaatcaaaactgttagaatccaatggcagttaggtgaacgtttcaataaatgacgcaattgaccctatgttgaaatgaaaatataatgatgatgaaaattaggatacctttataacgtagctttcatcaccaaatggtttactctaattgggcttacttaatacttacgaatgaataattaacttaaatattgtgtttcttacgaaaacaaatcagtggtgtgtgtggcatcaataagttgtttaaatatttttgcaaggcaagctaggtgaaaaagtagtaataaagttcaagtaactgtaaaaaaagaaaggtaaatcaatgcttaatttacgccatgtaaagacgatagaggttgggaatccaatacaaattgtcctttcaactacaaagtcaagaaatttctatcagtgactcgacgtgttgtgagtttatttctcatctcatgtattgatatgctaatgataactactgaaatgggaagcagagccagagaatcttcaatctgctctgtcagaaacactgcatcacagatctatctatttcaaaaatatcagtctcagttaactgttttactggtccttagtttggcaattaccattcgggtgttgatggtaatggaatccaatgtccaaaatatgtcaaaacttacaatttttctttaacacagttaatatatctaatccaatcaaatggctgttggaaaaagtaaacaataatcataataaaatggggtgctgtggtatgtacgtaatgtttagattttgatacttgacaggaacatgatgatgatataggggacaaactaatcaaaagaaaaagaataggaaatgagtgatttatttagtggggacgggggctgtggcctgtggagggttttttggtccgagcacaagaaaaggtatagtatcagttgtggaagtgacagtgacaacaagtgaggtgtgtccacgtacgaaggcagaggccagggagggccacgtcccctggtggcgattgttccggcgcagggtgcatgccctcctaaaatttacggcgtacgactacatatattactacaatacctttattattttctgacacaacccaccaaccaaaccaaatcacccctgacgtaagtacacagtgctaatagcatggttacattgccccgtcggtggccgcttcattaacattatcattattattatgaatggcaaaataatgaatctcccaataaataattataagtagaagataataataaataataaagaagaagctataaattacttatttagtttcatttattatagcaaaagttttgacaaattatgtagtagattactagatttttacacttgcaaaaaaaattgatgacaacactttacttataatgtagttctatatttccaatctttaagcttatttcaaacttggtgtttaacagtagcaaaaacttctttcttttatccacaaacatatcttgtgtgacattcaactaatttcaattcaggggtagatttagcgctatttctctacccctacattcatcaatgctctcatcatgaccttcctctttggtaaaatttagttaaatgaaactagtgaaaattacatgaaatatgggatttcataacaaagttagaaaaatatggcatttttaggtttgccacttttctatggcattttttcacatttaagttttttatggtatttgatatgccatatttttataaacttattatccaatcccatattttatgtttttgattttagcttaattagttttatttatttttttaatttattttacactt

SEQ ID NO: 379316 - DNA, 5766 bp, Cannabis indica
ataaatattcaatcttttactttttactgtataccaaatttttttcaaaaatactgtgtaagtcttatactgtgtactgtgttaagttttatagttgtaccacagttgttttgagttgtttcataattgtttaataatttaatttgttgttttacggttattttaagaagataaatttttaaaaaaaattccgtttgacagtaatatgataaattttggcttaaagttttaaccgtgaatttggatgaatcctaagtacgagtctagcccatcatagctcaagtaggggtatgtattgtggttgtgggagtggtaggtgaccatagtaccaaaacttttaatttcgtgaagaacgtgcaaaaattaatttcgtacaataatattactatttaattttattataattattgttattttgaaaaatttcaataacacatataacattttttttaaggggttttgtagcataatagcattagatggttttgtagaaaaatctaattatataatataattattctttgtatggcatataaagaaatttatgataaattgaaaaatatctcattttttatttgttaataaaaaatattgttatattatatttcattaaaatatacttatttgtatgagtatgttattcaatatatacatttattttctacttaagtatattagtctaacacataatttatattaacctaaaaagtataatggagacaccaactataaaaaattgatacatcttaaagaatatagaaattaatgtaaaaattaaaacaagtgaagtaaagtagagtacactgatgcattctttatttgtttcggtatttaagagaattttttagtctattttttttagtcatatacattctagttatttaagacatactgtaaaaataatttacaatataaaagacagtgttcaaatagtctggcgtataaaataaaagaatcacacgtgcaacagattctttaaatcatatttttggcgtgtaatttttttttttgaatttctcaaaattttacaaggtgtcttaaataactacatagtatatatgagcataaaaaaaaataacttaaaaattctctcaaataccgaaacaaataagaattgagagagtgtacattgtagaaaatttttatttttttaatatatgtgacatgttacacacgagaaagtccaagtgttattgggtactagtagtgtccaatactttttataggtgtcaccccatgattagttagtaatatttcgtaaaatctatttttttaagttatatgaaacatgatacttaattacatcatagtcgtataatgtcgagagaggtgctaagcatctctttgaactaagctatacaactaattatactctttttttttttggaaaattaccaatagtgtatacatataattattttcttaaagtggccacaaagtatgttttctattccaaccaaaataataaaaagtgaaatatttgatatttattagggctcgtttggtagactgtgtaaatgtcgtattgtattaactacgtttggataaaatattgtattgtattgtattaattattacgaccataattttttttagatagaattattacaaatataaattttaatacaatgtcaatcgtattatttaatacatataacaaattatccgcattaattagcttgtattatataatttttacaaatagtttggagttggaaacctcaatctcgaacccaaatctgaatctgacaacttggccctagacatggacctagaccagtacttagacccaaacccgatccttgtggttaattttatggtaaatataatataataattttacacaacttattatagtacaacttattaataatctaatttaatacaatattatacaacacaacgtaccaaacaatgggctcttaatggttatatatgaggtgtcatatacaaacatcttctcatactaatattaaggtatcattaatatctaataataatgaaaaaaagggtcttgactttttggaggagtagttaagtgtctttcttttatgtctagtctaccattcaaagtgagctagtggatcttcaactaaataattaatattatctttctatttctctattatttgataattattatatggatttaagtaataaatagcatattttccgtttaaaaagtaaaaattatttggcttaattatgaataatattcaagaaatttcaactccaccagctgtaaatttagtttttttacagtaaattttaaatttggtattatatcaacaataaaaatacattattttaatactatttttttttcacattttaatcataatattaaaaattacaaatatatttttttattattatagtattttattaatataatatgagtttcgattataaatgaattatttaattatttatttcttttattaaatggttattaaattattataaaatgaaaaaaaatatatatatattgccatgaaggacacttatatagggtgatatattatttagcgttgccttagagtgtgtcaaaattctattatttttaaaattttacgaagccctaagtgtaattaaatttatcgaaaaaaaaaattattgttaagatatatatatatctatctaattaaaaaggcattgtgtaacaacttttttaattaataaactaattattctaacaaattattattgtaaagttattaaggtcaccctttgatcctataatttcttttctttttttaagccatttgatcctactagtgagtaagagaacattaaactattggaaatttctatagtaaatctccaaaaggtcaatagattttttatctgttttgatatgattgcgtacgttgtaactatttaaaattatttgtaaataactatttacatgcaattttaaataactataatatacactattatatgtcgaaactgaagagaatgcactgaccgaaatactgcttcaaaaaagtgtattgtatatttatccaaaaactatgtgtagtaatttttaatatgtaagttgtacatgagaaaaggggtaagaactcaagtcaaatgtataatattatagacttatttataactacaagatcattaacaaagaaaataaaaagatcattaactacaagatcatatatatatataaacaaagaagggtacataataatataaattataatcacgttggcaaatgggtacatatcataagatgagaccaataaaaccctaaaaagtgctcaaaccccactaaagaaaaagaaacacaaatcttgcccaaaagcttatttgttttacagattaaaacccactaaaaaaacaaaaaacatcaccattctccatcactactactcatcattatcatcactaattggaatataatatccaatcccaaaacacatgataataacaagacacacatacactcattattcatagtacgatactatatatataatgatactggtcacattatgttgatatgtttttcttttttaattaagtaacaagatcaatcctaatcccaccaattgtgacaatttcgttactttttgggaccaaagtaaccaaaacattctcatcatcttcaactccaatatcatccaacaactcagttatcccgagtttcaaactagtgttggtcttttcggtgttcttagtattgtgcggtacactgacaaagcttcctgcgaactctgatttgtcaggaccgctcgttgagtcctgatcctcgtcgttcacataaacatcgaatttcactggttgattcctattataatttatccccgaaataactaaaacctcgtcctcatcctccttctctttcttactcctcccagtctttggcctggctaccaaaactcttaccgaattattcaactttacaggaaaagaactcagaggtgtcagacctgctgacacctcatcatcagcagccaatgctgtcccaattccaccaccaaataacggggtggtggaggctactttttttgactttaactttgacttcaactttgactttatcttgtcacttattttcttgccacgtggcttaggcttagtcttcaaccaaggaagctcaacatcttggtaaacataccccaactttttagtatcaagtgagtccttgacactgactcggacaagttgggcattctcgtcataaaacaagaaagtagtgttcaaccagtctggatcgctaatatctttcctcctcttcccagacaaagtcttccaaatactccacattcgatcaacattagcatggtgacagtaaaacaaagggtctcgaccagcagagtaaaaatttcccatattttcgaaatttgtttgggtctcgtccccactccaaagatgcaccggtccatgaggaatattctcaatggaaccgggtgagttttcgggcagttctcctgctcgaaaatctccaccaaaaaagagctcagtgttggttgcattgctcaccatcgacctatacatgacattcaaattagtactaatttgttggtcgttaggtactgacgtcggtgtcaaaatgtcgtcgatgttataatcgagatcaatgagcttaggcggttgatttttcgagcttcttaacttgtcgaaaagagcagtgttcgggtttgtgaacatggccggcatttgcatccccggtggattatcccaattccaataaggaattgcgaaagtgggatcatttataagcttcccaagaatcttttcataaaaatataagtaccaacgatgaaaggggaagaaaagccatgaattgtggatttgaagctcaacacctgggaaaccattttgatcataagctccattacaataagcacaatgaatatcagcttgttgcgagaagcttcgcggatctgtatccggtaaagctttcataagctctaaagctttgttgtacttagctacaaactccttatcagctttgtgagccgccgggcgaacccttaaacggttcacaaccggcggcttaaaatttatgatttgtgatgagtttgggggacaacagtttgccggaagagaaccttctggcaaatctgcttccccacatttagacaggtctggtgcctgtactggggcggcaaaagcaaatggatcagagactgctaagcctgccgccccatacagaccgccgagtcccagaaggacatttcgacggtctaacttgttgttggaggaggaagaggaagaggaagaggaggaagtattttcttgggaagaattattattagtggctttacatgagaagtagggtttggtgttttttggtgtgtagtggtgtttagtgggggtgagaagagagaatggagaagtgagtggaagagaagccattgatgatggtgtgtgaggagatattggagtgttagtgcttcttatataataatggaaattttcagagtacgagaagaaggtaacaacgtttttttggtggggtggtgtagccatgtgaagatgttgaaatattaaattccttctttttttttttaattattttaatatatgaaaaaaatatataataataattaatttaatatgtaatactataaggaaagtgggtgagagccttttcaaacaaaaggaaaaaaaaagtggttgaagagttattttaggaaggctaacaaaagaatagaaagaaataaaaaaaggtaaaatgattttggaaaggaaaaataaagtatttcggtagaccttttatttagttcggtattaagtaaaaaaattaatttttttttt

SEQ ID NO: 379317 - DNA, 2593 bp, Cannabis indica
aaaagatgttgattgtgatttgagataggtctccaatctaaggcacactacaaatttaggggcttgacccaagctcaactacctatctaagcgtgaaataatttattttttttttataatattttaataattaacattatatggattattaaaaatttgttatataaaagtgtgtacacgtcaacaatttcattatgacaactaagatatttttaaatagataagtaaagaaccaaatagaatgagagtttacgcaattttgtcctaaaaattcgatttttgtacttctgttatttcaagtgattttatcgctaataacccttttgtgattatgacttccctcttttgtttttaccagtaaactaattttttttgacgtactaaacaatttaattttctttaaaaactgaaaaagaatcgtaggacaattaaaaaacaaatatatggcacattgtcacacaaactaacaagaaaataaagaaataataataaaacaaacaagtaattataagtctactagaattccatgaccataaatagacattcattacattaaaaaagacaatttatttgcttagaattatttattattaaactagaaaaagacaacatgaactcacagtcttatcatttaacagaaaatattgattaattaacttccaaattccaatactaaaatatactaagttccaccatttaagctttacagggtgacaatggagctccacaaagacaatcattccccaaaaatacactcgccggaaacttattcgccggaatagctccacacaaatgattatgactcaaatttagtttcccaacccctgtaacagccttaggaactttcccaaaaaccaaattcttcgacaaatccaaatactttaatgtcttcactatcttcaacttctccaaatcgaacttcaatttgttacccgatgcccaaaaacccaccaacaattccgttctgttcagtaacccgatcggactaccagatatctcgttctccgatagatcgatgaagtcgtagaaatgtgtctgcgatggcttccaatcatcgagcttcattttgattccacacttggcaagtttcagagaatatatgatcggagaagtggtgacccatttggggattgttttcaaatggaagttgttgtacgacaaatctagtgattcgattcctttaactttcaattcaggaaatgggtcggtgagattattgtgagaaaggtggagattgaatatcttggtgagattcacaaaggttttcggtacagttcctgataatttgttgtgtgagagagaaagggtatcgagtgccttgaattttcctagaaaatctgggattttcccggtgaaaagattgtggtttaactccaggaaagttagttttgggtacaaggtcgagattgaatttgggattttcccggaaaatttgttgtgagaaagattgagaaacctaagctctgaaaatgacccgaaaatttctggtaaaggaccggaaaactggtttcgatccaaatacaataaagttaggttttttaggttttggatcacagttgggaaagacccagtgaagagattcccaccgagtttgagctgagttaactgagtcagcttcgaaattgaactcggaatcgttccagtgaaccgattcccgtataagctaagagcacctaaacgggctaaatccccaatgttctcgggtatccgacccgaaagcctgttgttctcaatgtagacaaaatctatgttgggcagctgaaaaagcagacccggaaatggacccgtgagatttcgaagatcttgaaggtaaagaccgcttaaaaatctgagctttgcaagagatggtgagattgtaccagataagaagcttttgggttgatcgggttgacccactaacgaaagctccgtgacccggttgttgatccgacagttaatacccggccaagaacaacagtcagtaccttttttccaagagctgaggatgcctgaaggatcagctgtgataccagatttgaagctcagtagagctgattcgtcatccacgtggcaggcggctgaggcatctttgacacagtggtgggtaagaatagtggtgatgaagaggaagagggtgagatgaagtttgctcatttttgggttttgggagaaaactaaaatgatccaagtgaagataagtgttgattgtgattgtgagaagcttttattgaagattggattttgttgacaatgttgactttgactgtgtttaaataagtgtagatgagatgagtaatgacatttgcacttaattatatattggagtgtatcacataacttttctaagatttaatggtgtggtgtggttggtactagtatggatatttttattaaagattagattttgttgaagatgttgactttgactgcgcttaagagtgttgttgtgatgtgaatagttaagttgagtaaatattaggactcaaaataaatgatcacatggatagatttgggaggtggcggcttgttagccattaatttttaatataacggataattattaattaaagagttatattagggctgtacaaaaaaatttgtaaaccgcctaaac

SEQ ID NO: 379318 - DNA, 1458 bp, Cannabis indica
tttcgatattactttcactaataatctttacagggaaaagacatgagaaccataaagctgtagcaaactacaatctggaaagagatgtaggctgctttcaactgtagaatcacaaagtgagcaatccttattttccagaaagtgcagctctttctttgttgggaaggcatcgatgaggaatctccacactaggatctaaagtttggggtgtaaatctgattgctacaaccaatttcaaatttctttttgtgtttcaaattttattaagagttagtcccacattgctaatgtgtgaaaataaattgtgatatataagatgaatgggctactcctcccattgccaattgattttgagatgaaactccattcatcttattcctcaaattctgaaactttgatcaacatagtaggcactttttacagaaaaaattatgtcatgtttatgcttctaaacaagcatgtctttatgaggagcaagtaatcttgggatctctataatgtgattacccaaaacttctctaaagatatgtaacaccacttctttgttcaaagatttactaagagataaatctgttaggagaattcatcaaatttcatccatagaatccaaggttgattccatatattaatggagctacctttaacagctaaataaatagagcccttagctaggacgtttcaaacctccaaaatatacttccacaggtatgggtgagtagacattgagcctatggcttgtcttcggatcttgcaacgctccaagcaagttttgcaagagggatcaattcatgtcctcaaatcttttgatcccaatccaccagagagcaaaggttgacagattttatcccaagattttagagctaagtgtctctccttgtctaactttccttgccaccaatactttctaagcaaagaatctagttctcgagaagtagaagttggaactttgttagtagacatcatgtagactagcattgacgatgccactgacttaatgcgagtaagtcttccagaatatgacagtaacttcatcttccacccttcaagccttttcatcaaaatttccttagattcttgtaatttttatttttacgtcttttgaaaacaaaagggttacctaggtagctttcatcaccttgggattacttgtgtaataaggaatcgaattagcaaactctaactagttaaatgtgtattaatgtgaaattatattattatataatttgatatatatgaattatactgataaatgacatattaagacattgttggtgagctaagggcatttttataattttcacccgagaagggttaaactgtaattttaatgttatatcgtgcttgtggactatattattctagtatatttgttctgtctttctgtcggtgttttttgacaagttggcccggtatagtcacaactgagtattttggactgaaccgggttcggggcccgaa

SEQ ID NO: 379319 - DNA, 1331 bp, Cannabis indica
gattatatgtacctggttaagttaattttataagatataaatatgagatataagtgtaaatacattaacacgcataattggttttctataaatagattgatagatatatgaaattgataaagctaaaaacattcaaatgataaaatatttaagggagaaaaaaaaagacaaaatgacaaaaagaaaaaattggtcatcacgctaaataagattattcatcaaatatataactattcaacaacaagtgagtctatttttccggtttgcatatacctctgacttggtatgattatgtgtcacagtcactcctgtcaagcttataaataatgctgtcccacctctttatttcaaaataagccataattagttgctttgacattaccataactagccaagtatcaggcccatatagaaatagaaactaagtattaaaattggtaattaggacgatgagataataatgactttccagaatcctgcatcatcataaatataagggaaaagaaagaaaggaaagattaagtaaatgtataacgtatatattaaattaaagaaatattatcaccaattctagtgtagtatagtactgtacgtacatatatacgttgtttgggccatgtttgaatccatgttgactcgcaattatagtgtgatatcattatattatatatattattaattacatacatatggatatgagagatgtacatatgtattgatcgagctttgctagcctatattggtgtttctatataattatctctaatttttattttgacaattaatgattaagcaaacttaagaaaaaaatgagaaaataacaaataagaaacagaagtcatgtctattgtactctcaattcattatgatatcacatgtactactagtgttagctttaatgttttcaaggaccaattaaacaaacttataacttcaataaattggttaaagattctttttaaaaaaaaaagaagaagaagaataaagaataaattggttaaggatatcataatattatatcatgtataggtgtaatattgggctagcttctccacatctgtacgtccaagagagctaaagagactcttttttcactactacaaaaataccttttagtgacacgttttgagagtgtctaaagtattttagtgacacttcaatgcgtgtcactaatggaggtgtcactaaaaatactttttagagttacaaaatgtgtgttactatatcctttttattattttattttttatttaattttatattttatatatatagtcactgaaaatgtgtgtcactatatcatattttattttattttttaatttaatttt

SEQ ID NO: 379320 - DNA, 6700 bp, Cannabis indica
tgtttaaatgtgtatgttggtaaatttattttgatgggttagtgtagttttgtcgaaatgagttggtgtagcgtaagtagtctaggaacttgggaatgtgttagttttggagtcttttcaatgtagagtaagggtatctcaaatcaaacggtcatgtttgtggtttgctcctctcagattcgagcccctctcctagacacttacataaatttttctttttagcctccaaaaattgttggatactgtaggattagccattacggggtgcctatatttttttaaagagaaggaaaagaattaagagagagttgttatttagatggttgctttaatttgtgactgcaaaatcaaattaaagcttcaattttggtgataatatagtaaatagtgtaccataggttgtattggtatggggtaagggagggagatatgaaggaaagaggagagaaagagaatggctgaaacttaagtagatacacaatctcaaattttatcgttaatagtattatttatgaaattatttttgtctggactctcgaattgcagtagattgatcagtgttacaccaggatactgtttgcaaaaatgaatgaaatacaacaaaagaggcaagcttgcaattatttccaaagttcaagtagaatttttcacaaaaaaataaataaaataagtgtcatagttcatggaaaacaaaatcttatttattctataatgtttttttctttatggcctccaaatattgtgttggatggatattgggaggtgcctcgtcaaaaaaaggacaataattaagagaggtgttatttagatgggttctttaacttgtcactgtaaaccaaagattcaattttggtgataatatagtatatataccttaggtttgtattaagggagggagatatgaaggaaagggaggagagaaggagaatggagactgtacttttctattaattgtgtttggtactgagtgagaaggttttatttgtacaacgaactctaaacacacttggaagaatggaaaatttgcttaaaatgaaaatttgtgatacactgcctaattttctcactaaaccttgtttgctaagcaacaatggtacttcaaaatatatttatgaaccctcactttcctttcgcccacctatgaagcacacgtgatcagctttaactttgaaatagtatatttcattgagttgtggtttgccccttaccttttttggcattcaattccattttcttaacttataagtttacatatattttttttgctgagtaaaatttacatatgttgttcaggcaagaagtggagtctatactgttggtgattttatgacaacaaaagatgatttgcatgtggtgaagcctacaaccactgttgatgaaggtatttttcatactttgtctgatcattttactctacttgcaaattttctttttcttttattttttcttaaatcttttcttacatatttacttgtggtgttgttgctacagcattagaaactcttgtggagaacagaatcactggttttcctgtgattgatgaggattggacgttggtaatttacctttctctacgaggtcatttatcttagtaaatatatattagtgaatccaaagatgtgtgctcatgtatcatttaattggctcaactctctttagattctagttccagactgtcaaatgattttaatttacaatattggaaaacatacatttaattcagaatttgatcaatcaaatgagtctattctaaattttgaagaatgggatacttatgctggccctaagtcaggttatgcataagtgctgaagtttgaaataaccttgaagttgatacttataggctaaatacatgtttgtgaaattttgattggtatcttctttgatataggactaaatggtgcatgcaatttttacaatcttcaagtattatttttgaagtttccaaatttgtgtgtcaactattcaaagttctgcatcacagttccgaattacatatgtttgttattcatttgggtgtgccctattttttaataaaatgcttattgaattgactggtgtttgaaataattttgaaggctctttgttggtgcaggttggtcttgtttctgattatgacttgctagcactggactctatcttcggtaattgattacaaaactattgtttgctatataattgggccttgtattagaaatttgattatggatttttagtattaggcaacttaaaactcaacgaggctagaaagtttgtgtatgctttaagtcatcccttacataattcacaatgtcctaattttcaaaataggtggtggacgacaggacactggtatgttccctgaagtagacagcacttggaaagtaagtgaaatgttttttttttttctttcttaaggtttaataatttaatacagctgattgtcaaaattattttcaactttttaatgaggagtttcgtttaaatttctatttgaagggtatttgagaaagttatatttagagttcatatagattttagttgttctccactatctttactgtgcttttttggtaaatatcattttgagtgggcatcaaatttaacttagtctcacaaagtgctcctgctgtaatttttaccgcagacttttaacgaggtgcagaacttgctcagtaaaactaacggcaaggtggttggcgacgtgatgaccccagctcctgttgttgttcgcgagaccactaaccttgaggatgctgctaggttttattttcatgctatctctatctcttctaacttcaattcacccattagataaaaactaaacatcaatttttccatattacatcaaatgccagattactactcgaaacgaaataccgtcgacttccagttgtagatgctgatggaaaactggtaatagatgcaatccttttttattctttcaatgttcaatcttcccaccatgttttcaattttcgactggtcttctaacaatagacttgtttattctgctaaggttgggattattacaagagggaacgtagtaagagctgctcttcaaatgaaacgtgccattgaaaaagaataatagggacatggagagattgttagtagagattccaagtaagaagctcttcaaagtgctttattctagaagaggttggctgctttatgatatgtacaattttggtctatgtctgtataaaaacgtcagcaacatttttctcaacattaatgatacaactgttgattttcaagttaaatggacccatgcttgtcaacccccaccactccttggaggtgaaagaaagaaagaaataagaggaataaaaaactatgaattatgtgtcatattattgttataattattattattagacttagctacattgtaatatcatgctactatatatacttttataatatctcaattgctcagaaaaattgaattcagtgatttagttatgatagtcaacagtgttaagtagaggaagaattgcattgcatgtggtgtgtagttattagttaacactgtatctgcatatatatatttataaagcggttttagtactgtgagtggttgaacagaaggaacaggagttgctcaaccaagatccaagtactggtttgttgagctataaagttgacaaaaatggctgagggtacaaagttgacaatgtgaaattgataagcaaatgttctttattaaactatatgttgatatagtttatatgaatgaaatgattgtctaattgaaagaaaatatatattagtcatttaactcgaggttaccacttaacaagggtaaagaccttaacaaaaaaaaaaaaaaaaacaaagggtaaagtaaaacggttgagataagaaacatattccttttcctagaacatctacatcattgagatttgggaagctgtttgtcaatgtaaataagtttttttatatataaatatatcttgtaacatagaaaataacatgaaatgttccggtaattgaggaccaaatacttgtcctatactggaaagttagcatgggattgggagttgttagccaaaacatggattacagctcaaatcaaaaactctgttttttctaggccattttaaacaaagaaactagttagtatagtatagctagctcctcctgatattatcattgtctttgtagtggggagtaactaaagactttgaagggctttgttattttgaccacctttgctaaaaaaaaaaattattttgaaccccaatccccatgggagacaaaaaccaatcaagtggtaacaatcatcatgatgatgggtgcaccacctgcaatctttcttttttcttagctcatttgcccccaccacaacaacaagccccaaattcacaatcacctacagtataagaaccagaaaatacctaactctcaaaaatcttatcctctttatatttataatacttatattatagcatagctttagtggttagtctggttctttgtaccaaaatgccatattgtaggcccttattaattttctccttcttcttcttcttctgttatcactgtcctttattcaaatttaaaggtgtttattggctcctaaaaattaaccctgttttattgggtttcttaaagaacaaaagacttaaaaacacagatagttataaagactaaacctgattaaaccaaaaagtaacaacaactaaaataagaaaggtggaaaatatacttgattctgctaaagctaatttacatttttttttttgcttaatcactttttacaaaggccaaaatttcttggtcgacatacaaattacaagactaaaaaattcaaccaaaaaaagaaaaactaaagaggaaagtaaagaaaaagatagcagagtgggagtggaagtgggaaaaactacaacttcaattaatgaaagtggagaaggcgtcatcatttcttcagccgtcaaaaaaacataacctcattcggcgcacgttagcaaaaccaaaaaaaaggctgctcttttttttttttaaatcttttttctttttccctaatccgagttcctatcccactccaactcaccgtccgagttctccggttcgggcgttttattcaagtcgggtcggttcaataacccggttccaggttttatctcctcctcgacggcgccttcccctgaatccgactggctatggttgtgattgtggtgaagatggtgaatatgattatgatgatgatgatggcgtaaagcggcttggtgcgcgtcgactcttgcgccgacctcagtcgccatctttctaattgaagccgccgacatgtcggcggcggccacgcagccgcatccaccgctttcttgagctagctcaggaaaattaagccgagccgatggtcctcttaggtaaaaaacagccgtatcgtaagctcgagccgccgccacagcagttgagtaagaacctaaccaaatcctcgaacgtttgttgggttctctaatctcagcgacccacttcccccactttctcatccttatacccttgtactgcctctctcctactcctcctcctccgccgccaccaccacctccgccgcctccggctgcagttcttttccgtgtggtttctctcggcggcggtccagctgtctccatctccggctccacctcaagattcttcctttaatactttgttgtctcgtttctcttggttaatatttcttgattctgagaccgacccagttcgaatttgggtctaagaaatagtgggcagtggttgaatcttcataagaaagtaaaaaatctaaaccagtagaggcagagccaggttagggaagagaagaataaaaagtttggttttttaaaaaccaaacaaaactgaaaagaagaagaagaagaggagacctctcatgctacttggccactatgtttgtcatctgggttagcctccacgttgattatttcttccgacccaattttatttaaaaatgaaataaaataaataataataatattaatcagaaaatccaaattcaccgacacaatctcacaaatatgtaatttataaatatgtggaaaaaaataaatatttggatttcctaattagtaataggtattgaggacttcgtccgagaaacacaggttgtaaaaacttattagatatatatatattatgaggtctctgttttgcccaagtgaaaaaggaattcgatttatttatttatttattaaaacaaataatattaattttttttttgattattattaattaccgagtggtggtggtagggttatgggtggtgtcttatgtgggcaggtgaggtggaattcaaaggttgagaaaaaagaaatgtcaattttcacggtaagcaattaattttttatttttattttttaaaaattatttagattaattatttaaaaaatttatttctgaaataatttttgttctaatttgttagagagaggtggcaaagggtaggtcggtggtcggtggatagataccgttagaaattgactttccctctgcgcaataacgatttgagtggatgggcatttttgtccttttaatacaatgttatttgggaaattttatttacaccccaaaaatgtttaaagacaccccattttaataatttttattttctatgaaatttatatctttaattgtagtaagttttttaaacttttttcttcccattcatattcttaaaaaatatacctatcaaacaaaaataaattatattttaaatact

SEQ ID NO: 379321 - DNA, 1049 bp, Cannabis indica
taactgagttggagtgatataattcaacgacaagtttgtatttactttgtatatgtttaagatatgcacttgaatgtcaacatggtgagataataacattttcatactgtttaaaagagttgatttaacatgtgtgtaataaaataataagtgttgtgaaatacttgctatttttagtaatattctctgctttagcttagattcctttggatttccttctcgatccttccttctctagtgatctttgatttggattgatgggagcacagagattttcatgtagaaaaccctctgatgccttgttaggaaaatggatgcaatagacgcagggtaaaataggaattatgcaacagcctcatctagttggacaccttattattggggaaatgattagagcatctcttctattagaatattagtcgttgtaccattatactgtacatatttttctgtgccaatgataggctggcagggcatacgtgtcctactctagaatattcttgtaaacctgttcttgctatatggggctggacctctataaatatgattttttttactttatattatttacatttgttatttaattattcttaattgctttaatttgactcactgtcgctgactaaaagcaagattaataattcgactttggcctttggcactgagctctaagtctcaaacctagccctcgaattgacctcggagcttgaccctaaacctaaacctaaaccttagcttggaccttgactctagacccaaacttagacttggacttgacttatgacctaggccttcgaccttaattccaacctaatcttggatttcgatctaggactcaaaccttgtggacgctgacctcgacccttggatcccggccttggaccctaacccaacctcattcggaccttcatcccaactttgactttaccacaaaataatctaagttcataaataataggctaattgttgggttttatgccctaaataaaactcatttcaatataatcagatttacttattgatatagatcagaaataacatttaatgtt

SEQ ID NO: 379322 - DNA, 3804 bp, Cannabis indica
agattagtattgtaggtttgaaaaaagtttgtcttataattataagggtaaagacaaaaaagaaaatagatttgtaataaaattaaacttataaaggtaaaatagtctataaatattacacaaataagccacttttataatagtaagatataattattttacatgtatatttatgtaaatatcatataacaggagaagacagcaacaacctaaaaaaataaaaaccctattacaaatttacaataagaggtgttaacaaataactaacaaaccaaccaatatccaaacatttcattatattcttttatctcattcctatgtttaaacaccaccacacctctggttggacggattttcctctacttgtttatgataacagagtttctattttatagacttttgattgaaatctctagaaaatgcccattttaaataatgacctcttgttgtagcaggtataaataaaattttgacttctctctcctactacctgtttgttaatttgctagagagaaaagacagaaagaaagaaaggaaaacgaaagagagatagagaaagattgagagctctgtgggtggaggaggatagattaaacgagctttgtgatgaagaatatgttggactgaagtgaggagaggaccccacatatcacgttcaccatcttcttcatcaaatctttattctatctatcccctcttttcttttttcgtttctttctgtaaaacttaaaagaatattatatcaccaaccaacccaccaccttaagatcctcctccttcttgattttttttccttttaattttatggtcatttccttggttttactcatattaactgttgggttcagcttattttgatttaacaccaacccatcaggtatttgtttttcttttaataccttattatttccaaaattttgtttgtttcaaaagattgaaatttcaagagattttgaagatatgggtctttgaatctagacttatcttcatatccttttattgggaactccaggtgtcagagaaacccatatcagatctgagtgccccacctctctttctctctcttcattagcttccttgattcatccaattaaaccccatttacttatttttttttctcctgtctttgaatgacagctgtttaaggtgtctgtacgattgggttcttgttaaacaagagcatatcataaagatcaaataaacacgtattaactattaagttcctttaatttgtagcttggttaaggtggctgactgcccaccaaatttgtctaaaatttacccttttttctatcttctgatataaaattggaagaggaggcccaccattgggtttggtgggcttcgttaaactaattcaataaattaaacccaaatttaatcaaagtggggagttgggttctgtttaagatcccacattttccatattttctttcattttttcactgattatttgtggtggaaagaggaacgaaacacaagttcaagcttccaatacatatatttttaccattttggttttgttaaactttttatttttttatcatttatgccaaacttgagtttgacccgtaagagaaaaaatattcaccttttctcatgctactctacttgtttataacttgtgttcccttcttcctctttttaaagtctctctctttaaaaccactcccaccatgggcaagtgagatgagattgttgtcaacctggttctggaaatatttgtccttctttaacaaatcccagctcacaaacaagaagaagaagcaaattcatatcttttcaagtttgtttctttctcaaaatatgtctctgaagaggaagactaatctgagttcgaaggtggagaatgtcgaggagatgggacagatgtcgtttcttgacttgccagagttggtgttggactgcattcttgagagacttccacctgaggctttatgtagcatggcaggtgtttgtacttctatgagagagaggtgtatgagcgatcgtctttgggagaaacacatgaagctgaaatggggtagtctcattggccaagctgcttacagagagtggcaatggcatattgcttcaaaaaatgatatgggcaatctcaaacaagggaaacaaagaggcctgatgagaattctttctcttggttggcctttttcatggattgttagatcaaaggttgacgatattactagtaagcagaggagtactttgcctgttgattccatcatggcttggtatcttgctcttgaaaccggcaatttctttttcccagctcaggtctacaatcgtgaggtatatatatacatatattcattagagtaatttatttccatctttgaaaactgaggaaaaaaaaagggttcttctgcatctgatgtcattttcttccaagcttcagagtttgtgctttggtttttcattggtattcagaggtttccacactgtttattgatatctattgttcttcatgtctgtattttatgcagaatggtcatgttgggtttatgttgtcatgctatgatgctcaggttagctacgaccctcgtactgacaccttccaagccaggtaaattgaagcttatttttttatataaaaactgatttgaactttttccaatggaaatcttgttacttgtattgtttagctttttgggttcaagagtttcttcctattagtttttttccctctttgctttccacaattagtatgtgcttaagttggtgctgttcttttaactttaggctcctttattttaggtacccaccacacggaaggagggcagtggcagttgagactggtgtaccatgggaaaggcttagagcaccacctgttgaaactcctcctcatgatcttcacctctctgactgtttgcatgagttatgccctggagatcatattgagattcagtggagaagaaacaaagagtttccttacggttagtctctggttttaccaaactcttggctttttcatcttattgtttttttagcaaaattattgttcagtttcttttgaggatctgggctttattttccaagtatgttttccatttttggttttcttgatttctttctatcatagtttttgggggttggggatgttgtaaagcagaaaacagtgatgtaggaaagtttggctacagtttccagatagatgattctgcactacacgtaacatatatttggattttttaaagtgaaaagaagggaacttagtttgcaccaagaaaactcatactatgatttgattattccattgttgactcttttaaagtatggtatggtgttgatttatacaataatcattgttctaatggttcaaaatattcttcaatttgaaatttcattaacacactcatcctatgcatatcacttgtattattctaccaaggtatatgtatctgtataatcaattttcagtgattgatttaacatcatgacatgctttgctatgtatatgttataggttggtggtatggagttgttggtcacttggaatcatgtgatgggaatgaaaattactgccgctgccatgatagtggtgagatgttcattattatctcttagctttgaaagaaaacaaaaattgaaaattctttttcttttctttgcaagtaggatttatcctttgaattattgaatagtatagctgaaagaattatagctagattccaagccttattctcttcatgtttttccttattcactttctctcagtctcatgtgcatttgacaccaaccaacccactattgaaagacagagagagagagagagatatctgttaaagcttatattgtttctgaaaa

SEQ ID NO: 379323 - DNA, 2992 bp, Cannabis indica
caaaaaattgtgtaattttaaaacggaaagattttttttgggcccctggactaggtgggccctaggcacaggcctagcctgcctatgcccagagccggccctgtatatgtatatatatatatacagtacaactcacataccgtatatgaaccaaaagggaaagaaaaaataaaatcctaattttcaaaatcctcaaatttcattaacaataaaatcatttgattttcaatcaacttagcaaaaagtggctctgataccacttgttaggatttataaaacacttaagaaatgtatgtatcacaaatttaaatatattcctaaatgtactttaatatagaaaatcctaaatcataaatctattgtgaaaaattatactattttttaccataaacctaacctcgatcgcaccctgcctcatactcgcacccaaaacctgaccttggagcccaacctaaaccctagcctagacctagactcagacgccgactctgaccctagattcgatcccagccccaaactcggactttgacctcaagcccagaccgtaactcgggcccttgctcccgatctcggacctcgaacttgaactcgaacctcgaccgaacctcaactcccgaccttagaccccagctcaaatgcgaaccttacggacttggatcctaaacctgatccctcaaactcagctccgaaccccgaacctggccccaaatgccgaacctcggctccgaaccccaaaccttggcctcgacctgagcctaggaggcgaacctcaacctcaaacctaatcttggaatttgacaccaaacctagaccttggccccaaaccggaactacaaccctaacctcggactagaccatagatccaaattccgacccctgaccttgaccttgaacccaagccacaaccctaacctcgaaccctaatctcgaaccatttctaaatatttattatgtattgaataatatagtttgtattatattaaaatttataatggtaattattaatacaatataaagtctattcaaacataattttttttctttaatacaatagtataataaggtgcctctctctcttccttcatcattttttttttttgagacagatcttccttcctcaattgaattaatcttcaacccaaattttaatgtactatttagccgttaatgtagtgttgacaagtcaatctttcgagtatgtttcaatataattaactttgctaattttgatgaaatttgagctgggattgcaccactatatacacataaagtgataagacaaacagaatggctaggtcgggcgtttttaaatggaattatttatttaggcatacaacttgtaattatttaattagaattggaattatgaaatatataaataataaaaaatcagtcttacagctcgcacagtctatggatatatttatagaacatagtgatgatcaagctatgtctttatttaattttataaatagtttaagagaaagacaaatacactttaacaaagtacggtgtatgaggattttagggccacctttttaatttctgggtgctataatcatcgagtgtgtatgactttgatatacacatatatatatatcttttctccaaaaattaaaaagtgactaacaacacaatcatatctcctaagaaagtaaatattatatacacacatattaccatcccacttcttttatggcccacccgacccaagcttctctgtctcaattttcaactccacaactctattttattttatttttgcttaatactttcaaatttaaattaaatttcctaatctttttaaattttcttctagttagtaacaatatatattacatatatacgtacgtacgtaattcggtataattgatgttattattattagttggcaattatatctgtaatacgtattatatattatatgttcttgacttaggttatgtttttttttttttttttcattgaatgtatcagctggttccttttttgcgagtgatgctcaatattttcattgaaatgtaccaaagggtatgtgccattgaaatataaaatcaaatatggaatgtttgaaatatttctactcgtgggttgtgtttaactcaagatgagtacaatttctcaagtttcctactaacacactacttaaaattttaaaataggcgtacgtgtcaatataaaatcaaaacggatgaaaaaagcatttcgaccacacgcctatatgttggacaatattatctcatagggataaaatgaaataatattatatcatttataagaacatgagttattatgctcactatcaattgattgattgtgagatagaacctcaattactttaccatacacttacattcattttactttctaaacctcatttccaccacacttttaaattctaacatagtatcattctattctaagtgatattcagacttttgtggaagactgtgttgaacaccatcgaaagaggagaacattcaggttcagatcttgataattctctgttatagacatgaatcaagggctagctagagatctaaatggaaggagtcatattattccattgccatcattgtaaggattctttattgtgttatttcattgttttaggaaatttatatttagaatgttaaattatagtattataatcacaattacgtaaacgggtaaaccacacgccaaaacccttaacccaaacccctaactatgggttctgctattgatgataactaacttaacaataccttaagtaacaaggaattaaccaaccaagactctgaaaataacacgaattgacgaatcagcttgttcgaaaaacctgtcccataactagttaaccgattttacactacctgtcaaaccggttaacctgtttgcaccaggtaacctaaaacaaattctttcacccacactactacaatatgggcctttagcttccctttttttaacccattttataaaaagggaagctaaagggtgtgagaacacc

SEQ ID NO: 379324 - DNA, 2614 bp, Cannabis indica
ggctctccacccaactatcggtgcccctccctctctcccatgtataacgataaccttgcaactccacatccaccaaattacaactctgtaccgcctgttgaaacccctccaggagccatcgaggatagcttctcccccctcgctggtcactatgatgcaggaggtgattcatatcacctataacacaccacgacttttgagagtcattcaccagagatcgaagaagattccaagtattatgacagcaacgtctatttggttcaccgtagagaccggtgagtctccattgtaaccgatcaatagttacttcaacatcaatatgatgttgtgagtaacccagaacacgagcctcttcctcattcttccaacataaaattagcccaccacttaatccttgggcctccactacaaacacaccttcaaaacccaatagctggcccaccacagtaacacggtttttatcacattttgtctcacataaaaatagaaaattgggtttcttttgagaaattacctcttttaggaaatgaatagctcgttggttcccaagctcccgggaattccagcttagaacattcataattcttggcgggcctggacaccaaaacccgcaccaaatgagttttttggaccctccaacactactgggcccatatcatgaccatcttttattccactatcctcctttgaaaaagtcttccttcttttactctccaaaatgactaattcatcctcctcattaatttctttttcatttgcttctgtttgaccacgtgtaatacatggagatatatccatcaaattgtcaccatcacttgtcgtatatatatttgatgatataacattaactccacccataatttctgaatcaacaattatctttccttttccatttcgtatcaattcctgatcctcctccatagattggtcattgacattactatcttgctccctcaacccacctcctccctgagaacccgaggaacccccagcagacgacgaactatcacagagccattttgctctgatagtatgctgatgacggtgtcgcgactctgctttcatctcaagcccataattctttgtaatcaagtgtgcaggggttgtaaaatttgtgcacataatttctctgagtgccccagtaccccacaaatgaaacaaaatattgaaagatcttcatactcaaattgtgcatagcactctgttccattccgcaattgcaacttcttcctgcgtttcaatgggagatccactcggactgtaactctcacacgaaagtaatccctccacaaccccataaaattatttttatctaattccacaaaggaaccaatatagtttcccaattgtttcaccacattctcagatttaaagccagcaactaatccatgtatttgcacccagaaatctagcttgttgagtatcaccttccttggatcatcaccctctttgagtcgtgcaaatatcaaagggaccctgtcaaacgtccaagggctgccttcgatcaccctcgccacatcaaactcatggaaaaacttgaacaggtaaaggttaggatcaagctccttcacacctagtcccctgccaggcctccacagggacgccattttatgttgcattgccaaaaaatccaacgatcggtctgtcaagaaatgaccaataatacaccatcaggcatcaaactcaggaagctcttgatctccattatcgaataataagccttcatcttcctcatcatctaacgagatctgcgcataccctcttcttacttctttatccattatgagacaacaatatataccttatatctcacaaccactaaccaggatcaacaccagacaaaaaaaccttttagacagaaatcaaacatataataccatgtcagaggacaagacagagacacctccaaaatatttgtttgagtttaatatagctagagatatcgatgagatgcttgcgatggtcgtggttggatgattttgtatttacaaggaaagtgttatgtgctttgggttttattcatttttgtagcaactatgggtccttctcatattaacattaactggaaaagagtttgattcaatttttctttggctatttattattgttgttgggaaggttttgggcaataattttttatatttttctttttgtttaactttaaatggtttggttagttgtaagaaattttaaaaatcaatgttaataataatttgtatttgataagaataagtgttgctactgatgagctttttgtagataattaatcgcatagttatttgtgtggcgtggtttaattttttatttattttttatatataaagtagtatccaaaaggaaaatcaatgatgcaacgtccacatgagaattacaacaaccaatctgaagagccacatatatacagagtcctctaaggggtgatagtttaaataaaaagtatattaattcaactaaataaatcaagtataatatatagtttttatgaatcaaaatcaagtatattatataaatacacggatgtgttgggttttgtgccttaaataaaatttatttcaatataattagatttactaattaataaagatcagaattgcttttatgttgcatggttcac

SEQ ID NO: 379325 - DNA, 4080 bp, Cannabis indica
ttttttttttttaaattaaaattgtgctcatgtaatagttgtaaagctaagtgtgtgttcttgtaaaatctgtgtatgagactaaaagtacatttttgacaggtgcatgggcctggggctgatattgacaccctttgtgttgggccatcctatgtgaatcgagaggtgattacatttagaccatctccaatgcatgatgtaaaaaatgtgctgagtttggcacaaaaactgagtaaatattatatttagcacaatttattgtaactgtgctccaatgcacaatagcaaaataagatgcaaattgacataaaatataattatgtttaataaattaaatatttttgttaaaaaaataatgacaatattgtaattaaaaatgtgtattaaagtcactcattaatgattaatcgatattgtaaataaaagaaatgcatttattgatgtgccaactttggcccatgttttagcatctgccaaatttggcaagtacaccattagagatgcattttttcttatatataaaaatgctaaaatatagcattacattacaaatatggcactctgagatgctcttatctccaatttgtgtttttttttaatagattcactctttcctatttatagctgatgagtgtttgtacttttacaggaggatttttttattgttttgcacaatatacttgctgaaatggaagaagttgcagaacttcaaccagttcctgatgcacatgttcctgtaatgaagttcaagttccaaggaatttcaattgatcttctgtatgcaagtatatctcttttggttgttccaaaagtaagttagtatattgttttgcgtacttattcattttattccatttttatacgcgctaattgttttatgcaattttttaagcccgtattaattctatgttgctgaatgcacatttcttctaattccatttgttcctttgggctctgatttttcaaaattgttgtagtggctatttagcaatataatgatgtatacttattcctgcattgggtaagacaccattttgactgcaaagctaactttgtgacaggatctggacatctctcatggatctgtgctatttgaagtggacgagcaaactgttcgaagtcttaatgggtgtagggtagcagatcaaattcttaaacttgtcccaaatatagaggtgggcctatcttaaatttcatcactgcttacataatttgtattttataataccaatttaacatttttttttcaatttatttatgtagcattttcgtacaactctcagatgtttaaaattttgggccaaaaggcgtggtgtttattcaaatgtaagagttgaacatctgctcttgattactgacttgttgcttttattactattccatcattaccatgtgtatctgattaacatttgcatgttcttcttgcgtataggttactggattccttggtggtgtcaactgggctcttttagttgctcgagtatgtcagctttatcccaatgcaattcctagtatgctggtttctaagtttttcagggtttatacacaatggagatggccaaatcctgtaatgctctgttccattgaggagaatgaacttgggttccctgtttgggatcctcgtaaacaccctcgagatcgatttcatcttatgcccataataactcctgcgtacccatgcatgaattctagttacaatgtctcagcaagtactctgcgagttatgacagagcagtttcaatgtggtaacagaatttgtgaggtgagagcataatttgcattttctctaattttactggttgaagtctattagagctttcttttctgttggttggcaggatattgagttgaacaaggtccagtggagtgctctgtttgaaccttatctatttttcgaggcatacaaaaactatttgcaggtggatattcttgcagcggatgctgatgatttgcttgcatggaggggctgggtagagtctcggcttagacagcttacacttaaggtaaaactcagatttttattggtgattttataaaaggattatgcatctactgcattatgtatgcattaatggtgctcagctcttttgatattcacttgttgcgagatgtaaatgtgggtttttttctccttgtttatgagcagatagagcgggatacaaatgggatgttgcaatgccatcctcatccacatgagtatctagacacatcaaggtcatctgcacattgttctttcttcatgggcttgcagaggaaagagggagtgaagggtcaagaaggtcagcagtttgacatccgcgaaacagttgatgaatttaggcaagacgtgaacatgtatgtgttctggaaacctgggatggatatgtttgtttcacacgttcgtagaaagcagctccctgcctttgtgtttcctgatgggtacaaacggtctcgattgtcaagacatataagccctcaggccaaaaagtttagcgaagatgctgcagggtgccagccatcgtctgctgaaaagaagaggaaacatgattctgatgcagtggttccaaagtcaagcaaacaaaataagcaagactctgctagcccacaaaggccatcttctgtgtcccctaatagtaatttgtctggtggtgttaaattggagctcctaggaactgattattccaactgtggttctgagtttaggtcttctgatggaatcttggagagtgagaataatatatcagggaagaatgtggagatcttcgaaaatatcaccccagaactcgtttctagtcatttaactttacagcccaaagaaaccagtggagatgctgcagtatcccagccatcctctgctgaaaataagaggaataatgattctgaagcagtgaatgtgaagtcaatcaaacaacagaagcaacactcggttagtccacagcaaccagcttctgtgtctcctaaaagtaataggactggtagtgttagattagagtgcctggaaactggtgatgtaaattgcagttctgagtttgggtgttctggtggactgttggagagtgaagagcttatgcctagcaataatgtagagatggctcaatatgccaggaaggaacttgttataagacacgttagtcaacaggctaaagaatctagagaagatgctgcaggatgccggctttcttcctctgctacaagaaaatgtcaaagtgattccgaagcgatggatgtgaagcctgtcacagcacagaagcaagcctctacaagttcacaacaatcagcttctgaatctccggaaagtaataggtctgatggtgttaggctagagtgccttaggaatggtggtgaaaagtgcacatctgaggatacaattgggagtcgtgtagagatggctcagaaatctatgcaagaatccattttgcctgggcctggggatgagttcaggccagttgattttagtgagtctggtgtctcatgtgttgtactttgttcagaattcaaggatacgcagcagattggacataatggtaatggagacagagttgagaatttgacattagttgacatggaaaatgtggagagtacatcttccgggaggcggctgaattgggcagaaggtgctgttgatgttgacccagagctagtcaagccatgtaatcaaacatcaatcatagaaaatgctgaacaggcatttaaaccaagctctaatgttaagatcctcaattgcgaggtgagtttctccatttgaagactttggattaggaattgttgaggatggctgtgagatactggaagttctagagatagtgagtcaggggtctttgcagggtgatgtatgtgctggtgcaggttcggatagcttcactgccgggagtgggttgcttcagactgggttataagaagaatttgaggtcttgcttgaacttaaaaacttatttattcagctacttatgtgggttgccttttgctttgctttcctaatcatgtggtagctggtatggttaacccatagctcccattatgattttgcttcgctatagtttggtattttccttctaggtaatcattatatataatatgtatatatatgtatacattatattt

SEQ ID NO: 379326 - DNA, 3721 bp, Cannabis indica
tgattatacatgactagaccgattgaaataatatcttttatcaacgtaccatttattatgaaaaagttattcatatcacagtaatgatcattagtagatcagtctgaatcctaagtaacataaactcctatttgtgttcattgcgttctttaattcactcgttaaagttactcaaagaagattattcttgcaacttctgtttaagagcttaataacatgagcgactggaaacatatcatataataatggaatccaagctttctgaaatgatcgaatactagttctcttatagtgttaattctaggagtgctaacaattggatctaaatctataattagattgtaaattaactattcacattgaattaatggtacataaagtattcaagagataattagaaggataaaataataattttgaccaactctaattataaactaataatttgagggcgaactacttatattgattatatcaatagcctacaagtaagaattctgtaaatataattttatatcgtcaaagtgtgtaattctatatttatagtagagtaataatagaattaataaatcgaattattctattaaagagttcaataataatgtgttcattggagcttcgaaatataggtccatggtcccttgatcacctctatacaacattgtacaagggaaggtttaatttaaaaatttaatttttataagaaaattcttgagggcaaaatattaattttgtataattatttttttgaataattatattaattatgaattgaataattatattgattatgaattgaataattaaaataatatttaactattaagttttatctgataaaactatattaattagttaaatataatattattcttaaatgatatttaaagagaaatatattattttagtgtaaaataaaatttatttaatcctagttgaataagtgattaataaaaattaattaattattatttattacaaaataaatagtaaatcttatttgtaacaaaattaagaaatcaattttgggctttaaaatatggcccacgagtagtgtagggtgacatataaaagcccatttaattgttttgattatttaatgtaataagataaatcaaaataaaatattaattatttttttaattatttgaattaaatatattataggatatgtatttaaattaaaagataatataaaataatgagatataactgaattctgttattcaatatagatattatttttgaatttaaattttgaattttgaattaaaaataatactatcattttattttaaaagattaaaaatagtttaataatgatatatattataaatatacgacatagactgatgagatatatgatatacagttttggagagttctaaaaatatacgatatatttgtcaatcctaaacctaagtgtcgaaccctctctctctcatcactctctctcacgcatctctctctagagattggtgctatctctcatctcaggttactgtgtctcatgagctgagtacacattgtaacagaaaatttcattcatcttatcaatcctatcagcctactcttgtcctgagtgttgaggctgatctagaagatttggtgtgaactcttcaacaagtctattatttctttgaattggatgatcgaatttgtatataaaaagaaacaaggatcccctgattggcatcaagaggtaaaatcttttttcatgttgttagattaaatttaagttatattgtgttgagatttagggtttaaggttcatattagattcaacaaatatttttttaaacctgaatctatttttctacttccattgggactttgatatgaatcctaaaaaccaaaaacacatcagtaggagcaacaaccagggaatacaagggaagtacccattgaccgagaagaacagtaaaatctaaatggtcaaaatcaaagagaaacacgaccagacaactcgaggccttctcatagaaatatgagaccaccaacagaccaacaaacatctcggccctcaaattatcatcgtccaccacgatacccacgaagggctagtcgcattcgcatatcctatttattcaaatggcatcatccaagacaagaagctaatcctcgaaggacaaacttgaacattgtggttagtgaatcgaggggaaaccacacatagagtcggtcttcaagatcccgtacaagggaaatctcacaccgagtatgaagtgaaactcatcatcattgccaccagtaagcaaacaaacatgagtgatttacaaagttactagtcagaaagtgcctcgccaacaaggtcagtcagtaattacaataatagaaaagaaaaatattgtgggtatcgaaatgaacttgatctccaagaacatttgaatcggagacagcctgacctacgcaagcagttaaaccgcaatgcacttaatctccaggaggaattaaattataatgctcataacttatgcaagcaactaaacaatcttgcaccagatgacccaataaaattaagagttataaagttggaagagcaattccgtaaataccaagatgaagaatacagaaaactgcttgggtatgacttagacgaagaactcgggccatttcaccctaacataacaaacactccattccaaggggatttaaaaatctacatgtggctccatatgatggaactacagatcccataagtcatttgagcaacttcaacaccataatacgagccaacaatgtaggattaaacttgtgttgcatgttgtttccgacctctataacgggagcaacaaaaagttggttcgataagttcaccaagcattctgtcacgtcttgggaatagttgttttaagaatttaaaaagcagattactgcatcaaggaattatcacgatcacactatcttcttcgtgttgctgcaagaggttacgaatcaggaattatcaacactattagaacaacctaaaatctggtgagttttcatccttaagcccccctttctttctatctctttgttatttttcttgttctagctttgcacaattttgatttgaagtggtaaggtaattatttttaggtcttttcaagcagttcatttccccctctgaattaagtcctttccataatttcagaatccttgaggaatttttatttgtgacaaagaatgcctcatgtctgattttgaattggaatttccagagttcttagaatgataaatccaaaattatttgccttacccttcaacccacaacctatacaaccaaaaatgatattagaaataaatgatgagaaaattaggttatttaatgaaaaacttgattgaaaggatgttaacctacttcagccaaactaaacctagttttcattctctgacaactagtagatgagagactcctttcttagtgatttcgaatccttattcattgttcttcatcaattcgaaccatagtgatagagtaccatgcctacacatagcaagtcaagtactcaatcatagtgcggaatacagtggttaaccaaaactgaaggagagaaggagatccaagctcagatcttgttattactctgcgacagaaaggaacaagggttagaaatctaagtgaaaggagtcattaatattccgcttccatcaatgtaaggttttttaaactcttatgtgtttaatttcatcgtattagagaattcatatttagagtgttaatcaaacatacatgttagta

SEQ ID NO: 379327 - DNA, 980 bp, Cannabis indica
aaaaaaaaaaaaaactcatatagtagtactatactaccactacgactactggtagaagagagtaacttagaatctgtgaagatggtactttatgcaggcaagaatctttttgcctggccatagcatgtgccccatgccccaactgtaatagcacccaattaaattaaaaaaaaaaaggatttcttttatagaaaataatttatatatacatacatgtttgaagatgtgtgtcaatatgagaaaagcgagtcattgtgtagatcatagtgaggagaaaaaaaggctaccactgcacatggaattatatcatatggtgggtctacctaaaagtataccctcttattaaaatatacatattgtgagtagagagatgaggtaagtgaaatgggacaaaatattataccaatgtacacaccacagtgaggtattttcaaattgtttttcttactctcctgttgctttctttttttacataaaacattttatagtggcactacggtagtagctatatagctagggctagggaccaaaacaaataacaagtcaaataattcaaatgtagtttagatttatataaatctgacaaagtaataagatctcaaaatatataggacacttccatatatataaaaagtaatgataatattgaactgatttgtataaatatataatgcaaattaaagcagcgttttatgatgaaagcactagcttttgaaaccgagtagagaggagatgatgatgacattttagatgttatgtctctcacgacggtacatatatattataagcatctgcagctagttaattattatactataattaagtcttcttataaatccttaattttagttatgttataatgagatcaatatcttttttccaagcacttagatccgtttcgtttttgttcctccttttattgttgttattaatttatttatgctaattagaatttttgtcccctgaattttgacatgtac

SEQ ID NO: 379328 - DNA, 4489 bp, Cannabis indica
ttttgtatttctcttacaaatgtagcaaattgcaaattataatcgccaattgtcttaatattcttcccctcttcttagaactgaaaggttactctcagttgactcttgtcatttgacgttgctttgtcttacttagggccttgcaaacaataaatatccgagaagagaatgagaagctcaatatttgggtggcttattttaatttggaaaacgaacatggaaatcctcctgaggtaacatcatgtaaagttgacactttgtagttccacttgtaatttgtgttacatcggtattaagatctcttaaattggatttttttttcaggaggctgttttgaaagtatttcaaagggcattgcaatacaatgatcccaaaaaagtttatatagcactattggggttgtatgaaaggacaaagaaacttgggctagctgatgaacttgttgacaagatgaccagaaagttcaagcagtcatgcaaggtattattgtatgaactgttaatgctgttattttttccattcagaaaatcaaattcataaaaaattaagcatcgatattttgtggaaatttaggtttggttacggcgggtggacaggctcttggaacgacaacagcaagatgcagttcaggctgttatcaatcgagcactgttaagccttccacgtcacaaacacataaagttcatcacacagacggctattcgtgagttccaccgtggtgttcctcatatgggaagatccatgtttgaaggaattttgaaagaatatcccaagagaacagacttatggagcatttatattgatcaagtaaatccctttcaaagttgacacaattacattatttccaagcttatcaaactgtgggatggcaacattctagtgttacttgtctattcaatttctgttcactgtagaaattacattcttgtgtcaattgcttgcaggagattcgacttaaagatgtgaatgtgatccgtgctctatttgagagggcgacttgtttgagtcttgcacctaaaaaaatgaaagtatgtacctcttatcttttcctttcagccaaatatttcgtttcctcgtttaacttactgttattgaatgttcgtttcctcgtttaacttactgttattgaatgttcatttctatctgattttatagttcttattcaaaaagtatttggagtatgagaagtctcttggtgacgaggagaggattgagcatgtcaaaaagagagcaatggaatacgttgagagcacactagcagagtaagcgtcgcgttgttcatgttcgttgaggtaaagttaagttagtctcttcatgcgtggggcacagagagcgcagaaattttccctggaatacaagtttttgtcgttttcgggtacgcaccacacctgaggattctggagtaacatatacatcccttttggatttcggagatctgctacatttaagaatcttcaatacaaagtggggtgtggggaatgtagaaaaatcatgattccaaatgaaggtgtagttttggggtttgacctatttatttggaagaaaaattttgacacctaaattcactctgtaagacatttttacccttgggaattatcaggagtatatgatcagtatttatttcttgtaatgtattatcttttgttctacttctgtatttgtacagataaaggcattctttacagaactaaagctttttttgttgaaataaacttgtgtttcttaattgaatgcatttggcatcttttaaaattgataagtaccaaattaattttctagttgtattatttttattttaatgatttaagtaaggtggcatgataccaaaatactaggacaataccaatccacctaagactaatacattagactttcttctattaagtgcttgatataaattaaaggccacaacggtcgtggcaacattgaatacattgatagacaaagtacaaggtaatgctactcacattcaattatgataaagactaaatctaacaaacaagatggtctaagtggagatggagaggtacactaaaaccttgaaacttagaagtacttagacaaattatgctctttttttggtcatacataaaagtggtatgagaaaatagaagaaaactaatcatctattcaaacactactacttcgaccacgttaggacaacactctatcactgagctatatcccttcccttgttcaccatgagaaatagaacgagctaatcctaaggcaaacggtcgagaatagctcataaaaggatcttcaagctactgaacttgctatctattgatatgaaaaactgtcttcaaagctttcaaaaccatatggtaagcagtcagctgaggaaaatgaccttctgttttaagtatgttaactccagcaggggtgcctagctttcttttcatgaagaatgcaactgattttggaacgacaaaatccttttcggattggattatgaaagtgggcacagaaacttgaggtagaatctgccttaggtcacttagaaaaacagtcttggctacactcagtgcaatctttggtttcattctccccaaactatgttcaaactgagcaatggcagcacttctgtttagacctacagctattggagcaaacctttcaacccagtttgggaaatcggttttcatatctttgaagactctgctgagttgcagcctctcaaaaccaccattataatctttcccattaagatatctgtgaacaaaaatgcaattttccaacagataagtcaaccacatctactaatatgataataaatcataataagaataggaaaacaaaatcagacaaacaaataacaaagacagcccaattaagtaaaaaagatcaggacttgaaaaatcccaatgaaacatttcagagcagaaaaacatgtaataccttggtgagccacctattaagacaagttgttggaagagttctggtcttcttatagaagctacacaaccaatcatggctgacatagagtgacctacatataaagtgttcttgacattgagttcatcaagaaggcagagcaggtcatcagcatagccgttgaaattcgagtactttgtttggttgtaaagcttaggatttacattgggtgagaaaaccaagtcataaaccacaactttgaaataacatactaagtaaggaatgaggtagtgccaaactgtctggtctgcaccaaaaccatgtgctagaactacagttcgggtgccatttccataaacattagcattcaaggctgtcacaacatttcctccatggctgcataaggcatccatgttcatgaaagctagtctagtcaatatataaatgattgaaaatcttcaaaattgaaagtttcctatcactctcttgcaaatgttatatatatatatagaactctcttttccatgtcagcagacatttcatattaataaaattattgtataattattaattatggccttagaaaaagtaaactacataagcatctataatatgtgaataagttggtcattaaaaaattgtttatttatttgactaattttcttgctgagctttgtttgttttcataagaaccacatgaatatgtatggggggagatagccttgtcaattaagtagcttaactgaataagctaagctttgtagaattataattgaaagtaaaaataatggtttaaaagattcttttggtatcattgacaagtgattgctctatatttcaatatttgtgtcactccataactatatcagttgggtatttatataatttgtttacatataaattcactttactcaaattttgactagtgatagtgaagctcagttgctaatacatgagtaaagtcaacatttttatgtctgaaaatacatgttcaattttttttttttcaaaattatttttatagctgtgtttgttatagttacggtattattcctgtaaatttttgaacatttttgaatgctttacagtgccaaaatagatttgaagtttttttaacacgcgtggtaaattaaaatatcaagaattctgttttcggtactgaaaaatatttaaaatttcataaaaatttatagagatgacattataactataacgaatactattatgaaaaaaaaaaattaaaaaaaaatattattccgacatataatatcggacatagatgttgactaaataattataatatgatattgtaattaacgctctgatttcaagatttatttcatcttgactgttaaatcaaaaggataaaaatacgtctacacaatttttcataaacattttttttatccttatatctaaaatgtaccaatactattgagtaagaaaatttggataaaaacagtgttaatatatagggttaatttcacaaatgcacaaaaaataacaaaaaaataacaaaatacggtttcacggaatttaaacatttttacgattttttaatttatttacataaatacggtcttttatgttgaaattttgttcatttgttgtt

SEQ ID NO: 379329 - DNA, 936 bp, Cannabis indica
aataagtaaaataattattcaactcacagaaaattaacttggttcctttgatatatcatacaagtaggaactagtacaaatgacaaaagaaatcatagagttttctaagtttcagctatggtaaagtaactttctgtcctagttttcatttttgcagacaaagcataatgaaattgtagagaaaaggatttgcataaaattaaatagagagatgatacctgagcatatatacaaggagaagggtaagcttctggatccctggatacagcatgaagtgataaagacaagaaatccactgcataccctttttccctctcaacatcgctcaaccatacaattttcctgcaaaaccccatgcaatgcatttttcttccattaatgtcttactaaacagaaaatgtccgaatcatgtattgataatcaaatcaaagtgcacactggtatttcaatgtttcgaattgagcgaaaatgcattaaaaatatatgtatcgggtggtcgggaagaagataaggaaggaggatatagagtacttggatgaaatatagagagtgccgggggactgtggtgggtgattggcgagaacaatagaaacgccgggctgaacgtggatgagctcctcggcgttgtcggcatccagaactggttgtccagcaccctctcccactctctcactgaacaatctaattcctatcgccattttcaatttctttgctactctcgtatgggtttagggttttgactttggtaaaaaatttggtctacaccatttttgtacacgtgatttccttctcctttaatcattttttgaaaaaattcattatctttattaattgcaatttatagtgattatatgattaaaatctggagtgacattactactcctgataacacgatcagtaactaagtaagatgctcgagctaagaaatgagcaaca

SEQ ID NO: 379330 - DNA, 5155 bp, Cannabis indica
aaacctttactgggacaagtgtcgttgaattgaattacatgagaaaagtccacagacactagaaagaaacaactaactaggtctcactctgagactcagtttcgaacctaagacctccagccttagttaacatgaccttcttcttatgtagtaattgataagttatgcatttctttttgttttattagttgattgaaattgtaaaatcaattctaaattaacaagttgtttcttgtagaattaaataaattacttgtaattataataaaaatagtttttctgggtagatgtgtgatcatctttcttgcctttgtctttaaaactacaattgtttctgcaaaagtaacaattgtttatacattccatgtttctgcaaaagtaatagctcataagatttgatacaagccttgaaaatttcaatttctctttctgttatgaacagatgctctggtttcttctgtactagaaagtagctcctgtatgtattcaattccgaaattagtttgcaagatggtgattaataaataaaagaaaaaatgtaatctatacttattaacaataatatagaaaataataaacaagctggtgttttaatccaaaatagaaatatgattccaaatgatcttatagcaacaaccaagctatactttagtcttgtcattatttccaatttgagcatatttgcaagtttcgtttcttggtgttgtggattttcattatactgtttttcagaaagtatgatagtctttatgtctttactattctgtctttgaacaaataataattgtatttttctttcttgagatcatgtaggtgttttcttttgtaggatttctcatcacatgcttttcttagctttcgcttttagaaaattgactatttctcaatttctattcttttgtaaaaaggaaaaattccctgggagggtcccagtattttgaacttgggaatgattttctattgtaaacactatttttgataacatttgttacttttgtctaaagagtttaagtctacgattatacttattttatctgtattatttcttcaatgaatcttgggcataacaattggagtcaatgccatacttttggcccttgtggctgtttgactctaattacatgtttgactttatttgtgtggagcttgcactagaatagcattgcaattcttcgtaattgtttgtgtttttctcgcaaataaaattggaatctgtttggagttagaagaatgtattttttaagttttgtaggtttagagctaactgatatattgtttaagatcttattcaccatttagtaagatcaataactaccgtatgtttgtctaataagaaagatcttgagcaggtggtagttgaggtcattttcttttctcttcaattagaacaaatccatcaagattcatactatatattgtttcaattatagtttaaggacggcaatattgtgccataaggattataggtttgtgccataatgcacactcaacacaagtggattttttgactgaaatctttcaatcataggattaagggagtattttatcttaaaagtcattggctcgttttgaattgatattgaagcaacttattgctcacattattacccttttaatcgggtcaggtattacaaattagggtgataggccacataatgcttatgggctgaattgtaagggacatgggctgttgttttgaaggcctaggggctgtaagggttcagggaaaaatggacctggttgtaaggggttagataattacagcccatattactgtgagcattgctattacacacaaaaatttatatccaacatcacctagagatagcgctttacgagtcgttagctgtttttcataataattgttaaatttaaatgtgggacttgaaattaaattgcaccaatagtagtataacacctcaagtagtgttggacacctcaagtagtgtgggacaattctctattacattgggttaagagagtttggactagtttgcaacccaatgaaatgtagcatagccaaagagactaatcaaaagaaaaaagagggagatggaggaagactaaactgaaggttaggagagattttcgtaatcaaaagattggcaactggtctgattttcaagagctcgaataaaaaaaatggttttgaaaaaggtccaaacctgagaagtgtagaagaagacattagtgaagataactaaagaaaactgaagcaaaaaaaaaaggagaaagttctttggtaaacgaaacataatgagaggtagaagaggattgggcataattgagggattctcttgggcctcatgatgaggcaaatgaaggtttgtatgctgaaaatcagttcacaacctcgaatagtagctattgagattaagaatggtaagattttgaagtttctaatcggaagatgatttagagaagtattttgatgatctctgcaggcttatgaactcataagatattggtggggaaagctttgaaatggttaccgaaaacgtggaccataaaagaaccacattaagagaataatgaaagggaaaaataaaaaggaggtaaaggaagataaccaatggggagagattgagggacatcggtcttagatgggactacaaattctagaggtttagacaactaagggaactaagaagaatgttagtagggagttggaaaacctcacattcaatgtcaacgacgttgagagtaggtcatagataacgaagcaattggttttgaacatatgagaggaagtggcttgacctttaaaagaagggtagttaaggaggtggtaagatcagttcggatgtgttagccttgcaagaaatgaaaagggagattatatagagaaaacttgttggaaatgtggaaatctagatttaaataatgggcatatctcccattccatccataagaaggtgaggaggtattgtggtgatttgggcttcaaggaaaacaaaggtgattgaataaattacatgggcggtcttacactatgtttggtaggagggagaagtggagggatggagaggagaggagggagagaggtgggaggagataacaaatccctttgtttgggaagagggattgaaggagagaaaggagaggtgagaggatagcaaatccactcaaatctctaatttgtaatccctctaataatggaaggatgagaactctccttcatcaattattgtaaattacattaataccctcaataaatattattaaaaaattataataataaaatagtaattttataatttaataattatctatctttcaattactccatccttcctaccaaacaatataaaaggattattactctcctctccctcctttatattctccatccttcatcaactctccatccatccaactctccctccttcctaccaaacatagccttaatgtcaatcctgttgtaggaagaagatgatgaaaatggtgtttctttttgtggtcttgtcagctgtcgttggtgagatctatttaaggattgttggtgcgtccatagaaatggtgcatgggtggagattttgatgttgtaaggaacacataaaaaatttagtagtggaaaaaacacaaggagtatgagattattccatgatctaatcaaggaacttcctctaaaagactagattaaaccacgaccaatgtacatggtaaaattaatttaggaacttcctctaaaagactagattaaaccatgaccaatgtacatggtaaaatttgagagtttccaacatgtagtaggctggatagattcttgattactcaatagtgagaagggaggtttcatttgttaggtaatctttgcaggttagggctatctccgatcatcttcaagtgatgattgatactattgccaaaggtgtggtatgaatcaggaggaacattggaaagtgttgttaggcattggtttaaggctctgatgcaatcacttaggtagaacttactcctaaaagctagcctaagagaggagggccaagtaattatatactactaaccaatcccatacttggtcaatcaatgtaggaacctaacagtacacctccctttagagttgacatctatgacggcacactctacaatgacctactctgcgttggcccattctaggcttaatccacaggttggcccttccatatgtcctcttttgcaatgtcggtccaatttgagggtcatgactccgataacacttgatacaaccacttgggtagaacttactcccaaaagtctaagagaggagggtacccaagtagttatatactactaaccccatgatcaatatatgggatcctaacaagcttaaattcccatagactcggaaaccttgggccactgggaggtctcctcgtcgagtagtctaggccaaaaattcgcaaaaaaaataataataataatttagaggatcgagctgttagatatagcctgagttactatgagccaaggatggtgatgacaattcaaggctcttagaagggcaacaaattttatttcctaaattgagaaaatgatggaccattttagatttggcaaatgaaatagaaaatgaggcagttagcttttataaattcttatacaaatcgactcaaacgaattttgtgggctttgaagggttagaatgaagcataatatcctaatattgcactagagtggctaaaaagaccttttattgtggaagagactagaagaagccatttttgagtgcactggagataaggcttcagaacctgatggttctacgttggttgtctataaggataactaggaggtgttaaaaagaatttgtttaaagtatttgcctagtcaaaagttgactttgaaaaggcaaatgatatgagcttaagattcaatgggaactcctgctgattgtcagaagttgttgatgttttatgttagaggaagcaaggaatggcaaattctctgggtcactgctgcatcagctcttaaatggggcttatggttggaaaggaaaaagaggatttttgaaaaacaaggcagcgtatgtggacagtacacatcatcccttgttttgttgtcactgtttttttatattgccttttttaagctggtgatacctgtggtttttccacatccttatatttttcttttaaattaatacaaggcagtattgtttaaaaaaagaaaaaaa

SEQ ID NO: 379331 - DNA, 3620 bp, Cannabis indica
gtgcatttaatgcttgacaaaatattaattagactacagaaagatcattggaaacataagtacttatttgtttggagcatatgcagcttacatacactcttcaagtatattgttttatagccattgtcagaatacactcttctcttctattcagatctatcaaaatttaagtttccatcagcaaaaccttcttttaatcccctccaaaaaacaatatgaagaaaataacagatattctttgtacactaccgttgtagttataagtatcataccgatacatcacgaaaagaatgtacaactatatacacacttcaaacacattgtttcttaatagacatataccttttttttcttttcaaataactattaataacaaagtttctatcaacataaacttgttctcatctgttcccgaaaagatatatgaagcaaatagaagagatgacatgtacttatgatataagtatcataaagccacagctataagaatgttaaagctaattgcagaacatgcctgaatttcatcaataactgcacaatcataatctgaggttacatcagccatctcaactgtcacggccttgtgctttgcaccatcaacctcttctttctcctgtcctgtaactagatcgcaagtaactttcgccttgttcaatcgttttgccacctcccaagccagcaatctcaaaggagcacaatatatccctacagacagacaagcaaaatatatgagaattttactagtttatattttacatcattctcttcctctctgttatgatagttctactagtttagttctagtttattttaaatcataccagaagcacttgactcaagtcgctttaaagcatgataagtttttccactatttgtgggacccatgtgcaagataaccttgcgatgcttccttcgagcatttgggtaccaagtatgaggacgactgaaatttagcatggaacataagtgaggacaaagttaaattgatgcctagtagaagtgttatgatatgattacagatatacaacaataacaggcactaagagagagtgtcacatgggagataagggaccagagcacttgccacttgactgatccaaaaatcaagaaaagctaagaatacttctccattgattttcatattcataatttcacattacatggttgacccaaaatagagagagcagatttgcataaattggaaaactgaacgtatctaaaatctgataaacaaactgcatgaattcaccccagaaggtgtctcaaaaagaaaagaaaaaagtcaaagcaccttctcatctaggacattttagttttaatcgaaattccttgattccaagaatgttcccacactatatatttgcatatccattcaacaagtgtaagagcagccaacaacacaatcagttttattttatctacatataaatgataacatatatacttacgttaggtccataaaatcaaactttgaggtactactgctggagcttgtaaattcaaacgtctcctttcgattaaagctactgaattgccttaacacatttgaaacactattaacatctccacttttcaactccaaatgtaaagcaactggttgtgtaatgcctgctaaagcagtaggaaggtaaaaagatataaatataaatggtgaacctatcaaattctgaaaatttgcaaacttggttccaataaaaaagctagtaccaaactcaactattctatactactgcccagtttaaatcctatgcagtcctaacatgtcaagagcaagtgataaatatggagaaacacatatttatttttttagcattattgtttttttcttttttcctttcccattccactagtcaataaattagtgaacagaatcatttgaattctctgaccataaaccatatgaaaaatgaagagcatatacatattccacattacccaatcatatgttattaaggaacttttaaaaactttaaacatctcatatagtattgtgaatattatctagagtttcaatttggcttatcatatattggggaatacatttgaattcacacattgaaagcatatccaactccttaagcctgtataatcatttaagcaataccataatctgaaatgaacataacataagctaaatgctcgttgagtgttcttttctcattgtttaaaacaaaataatgataaaaaagaaaagaaacgggagaagtgggatcaaaccgtgcagaaagcgagaaactcccgtaccagaagctttccgccgtagtaacagcgacgccattggagagaagaagaaatatttgaggaatactaattaaatctactggtaagaaagaaaagaaaaaagagaaaacattagaatttagattggtgtttcgttctaacacaaaccgactattgtcgcacgcacacactgactacacgcaacgccacccagactccgaacaatatgccgtgcctaatatctttttcacccaagggtattgtcaaagaattatttatttttttattttttattattattttaatttttttcttttttgacattatgaaaagggatgtggagaaattctttatttatataccaggttttaatatggagaattaagtttacgagctattaagaaaacagtcattaacatgttaaaattttagttattttagttagtacggttcactaatgtctgttactcagtgcgagcaatcttggtttggattgctaatgtaaattgacatcttagtataggtattgtatataatagagattatgcatgacaggatcgatatgtaattaagatatctatatcaaactagtcgtttactataaagtcctaattcatatcataaagatgatcaattagtagatcgatctaaatctagagtattgacgctgaaaatgaccaacaccaactcactagatcgacaagatgactaatgagttaataaataaagagagacacacataatttatagtaattcactctctatgtcgcgatagtaatgaatctaagtctacttcgagtttttatttctcatgagaattacaagagaattgactaaggaaatagctgagatttttatagagataagctctgaccttacgggacttagtagaatgtgaaaaatgagctagtggagcccttattttattgggaaggaggtctattaaaataataataaaatatgaaaaaatatttttggggtgatcttggccattgatgatgatctaatgctgaaaatgacttcagatgatgatcgtcaattttcagagctcaattctcatccgttgaattattttcaagtagtttgtggaaaaaaaatacacttgtcttcgggatgaattttggactagaaatcttcagaattgcgatattgacttgaaagagcttggaaagagctataaaagacaagttaaatcttatcaattggatcaatattaagggagttatagctgttttactgaaggttgttcagcatccaacgccaggttaacacctagcatccaagttgacatacttgttggaatatattttactaggacctcgatttactaacaagtaagtttttaacatcataaatatgaacttctaaaatgatgaaaattaaacacataaaaggtatga

SEQ ID NO: 379332 - DNA, 1899 bp, Cannabis indica
gctactatccaacattgtgaagggaggggacaagtacttgctctttttcttccctaggtgaaaaaccaatctccaattgttccttgaccgcactatcatcactttttacagtaccaatgtccaagttcaaatttcgggaacccgaaccaatcccagatctagttttggcatcactatcatcgtgcttgatgttggtgccttctttcttcgcccttcccttcgaaacagggcctcctttagttttttctttatccaaatctctatctttgttaacactgctatcaatgttgctactagcgcttacaagagatcccaacaacccggcatttcttctcttcccttttagggaaatcaaactgtcatcttgactgtcagattcctctttatctttcctcttctttgcccctgaacgagggactggtaatggtttctccgagttagatccgcctgtcgccattttatcctcgtccttagtgtctttcccattcttcatcccaaagtgagttgctggtttctctgagctgttttcctctgtatccaacctccctcccgtagttttagtccgagcttctttgctaccgccaattagatcagccatacttctctgcttccttctatgagttttcttgccttctgaaacaacaagagagatttgcaacatagcttcattagcttggatggtatcaacaatcattggcgtgggaagccactcctcaaatggcccttgggttggggcttcgacagatttcacgccatcgtcaagacccaaaactggcttgggatcatggtattcaggcaaatcataaccccctttagtccgataaagagcaaacagtcgactccttaacactctaagctcaagagcatttgtcaaataaacatcatgagcaacacgtttaagttcagcaagaagctcaggcggctcagcaaagacatctgaaagcttcctagtttcactgtgaggaacaagaactccctctttaacaccagcattctctgccaacattggacgaagcccagttctattctctttcggtacacaagagcaaatcatcttcaactccaaaagtctaccaatctcatcgatagcctgttgtacagcactgacgaaagtcttcatattactttgcttcgacatctcatcaaagttctcctcaaaaggcttcaattgagatggagggcaccaagcgaatgttccatcaccaaagtaagccacgagatatcgatccttgactttcttcttcgcagcaaactccgacgcataagacggatcataaatctgcccaggccaccatggatggctcctaactttaccccaaacaaaatcacccaccaaaaacttgtgcccttctacttccccatcgttgccttcactaacgatcctcaatgggtacctccatcgacctcagctcaccattttcacatccattttcatccaaagaaacgtaattacttgctttatccccatcttcaaacttttcaacagacccacaccgaacaccgtgcgtagaatcagcaagaccacctttctcaacatccgaagaacccatttgacccgaaatatcggtatccacagcccctcgacccaaatcaacactcaaatcttcattactgacctcaacgcaaccttctaccatggacttcggacccgcgagattatgcgttgaacaactctcaagagcatctttgagggatttctcttttggggcttgaggtttagctggttcaggcgtaacagtagcagacgaaggaactagggtatttgatcttgtctccacagttcccatttcaattccacaagaaacaatttctcaaagaccctatttcacacctgaaatggataaaaaaaaaatcacaacactaaattaacaaaacaaaatttgatcttgaattagctcg

SEQ ID NO: 379333 - DNA, 1330 bp, Cannabis indica
tactatttgaggtgacatgttcgagtttcttttttgtacactagataggggtatttccagaagatgcttatacctggacgacagggtaccgtaaaacctccctcaggattaggtccactcttgagctcctggtatgcatttactagtactatcactttgccggctgaagatgggactgtggtgcatgctcttagacccgaagccttacactgcttgtaggtggctaggtggccacaactttagaaaggccacacacaactgagagggatccaaagttttccaaaaagcaataatgtaaaaaaaaaaagtcgcatgagaaaaaaaatgtccacccccttagcacccataggcaagagctttgctagttatctccgcgaaaaaacgaccttcgtaggtgttacataagacatacacctggtcccccaggacaaagatccagtcacgtaaatgttagccaagctgattccactcagcatgaagtaccattcaaagatcgctaggaaattccgaaaattggtacacagggggtaaagttcatcgcggacttgcctataagtccccagataaggaggagttttcggttaacaggttggtagaaatcatagagccaactcccgcacgaaattacaaaaagcccctcggttgaggactctagcagagcacccattttatggctaatgaacctgaagcggttaacccagtcaggaccactttgccctcgcatagtgagacgtttgtggctcgcatggaatcactcttcactccaagaatcgttagattaggctaaagagttatggaggcaatcacaaatctaactcggggtgtgcctagataggattgccaagcactttggtaccaggccgaatgccgtatatttagagtcaaaagtggcgtctagaaaatggtgttccccgttttgtaagagccaggagtgggggttctcagacctacacgaaaaggatccaacgaaatacaacacaaagtagaaaatagagtatctcagctcaagggaatgaatggatcagggatcccttgagcatgggatacagacctttcccagttctatcaacaacccgagggtatccaaaccgtagcattccttatgggtaattctcgataaccctctctcttaatgcaagccttcgggtaaaaagaaatgaaaacagaaaagattacacaaatagtgcgcacctataatatcccgataaacctaatggtaaataatcagggttacacttatattatgggttaatcaggtaataagtagaattatggtcctactaatctaattcaacataaaatttaaatttattataagtgagtaaataag

SEQ ID NO: 379334 - DNA, 2189 bp, Cannabis indica
cctgaactattaagattgttggaattaagaactagtttaggagcatgattcggtacatgtcaaaatttaaagacacgatttagttcgggaaaatttttaacaacctaaaaaattggagagcaaatcttattgggtatatgttaggggcaaaaatctttagttagtgtttgtttaattagtttatgatgaatctttttttcttttataataattattgtttatttttgtatatgtatacagctttcggtaatggggttgattcatgggactcttttcctaagaacaaagatgcatcacaggacattagaagatggtacaatctatcttggtagtttgttcttcgcagcattgatgataatgtttaatggaatgtcagagatacctatgaccattgccaagcttccagtgttttacaaacaaagagatcttcagttcttccctgcgtgggcctatgcagttccatcaatgttgtttaaggtcccaattgcttttctagaagtagcagtgtggatcattttgacatactatacaactggattggaaccaagtgttgtaaggtacatacatatatacacatcattgatttgattgtttatatatcatgcatttttaattagtttcttattattatttgttaatttgcaggatgtttaggctttattttatcttagtcattgttaatcagatggcctccggactctttcgatctattgcagccctttctaggaatatgatatttgccaacacttttgggtcatttgtgttgctcttacttattgtactaggcggtttcatcttgtctaaaggtaaaataaacgttttaaataaattcgtaactgatagattctttcttttgtttttaattttttttttttatattatgcaaacagatgatatcaacagtggatggatttgggcttactgggtaacccctttgatgtacggtcagactggaattcttgttaatgagtttcgtggaagcaaatggaataaggtaataaataaaatgtttctacaaactttttgttgtctttttgtgaaacaaactaataattaagggttaatttgatttgtttgaggtttctacttttattaatgttgtttcccataataggttacaccaaactcaacagaaactcttggaattcaagtgttaaaatctagaggattctttactgattcttattggtattggcttggctttggggtgttggttgcatatactgttattttcaacattttgtacactttggctctcaattaccttaattgtaacttccttttactttcatcttttgtttggatatactaaacaaaatcattaagtaaactaatttcatataacatattttgtgcagcaattgaaaaatcacaagctctttctaatgaagatcctgagaataatgatcatgaaatccaagttggcagagaaacaagaaccaatgaaatacaacaaacatcatcaataaataacactggtgaaaatcagagtaaaaagaaaggaatgattcttccatttgagccacattccattacttttaatgatgttatttactcagtggacatgccacaagtgagttattaataataataactaacatgttagctagagagagctgtagagtttgatcattcacacagattaaagatttaaatttttttgaacttgaacatgcaggcaatgaagaatcaaggtgtagttgaggataaacttgttctactaaaaggggttagtggtagttttaggcctggtgtattgacagctttgatgggaatcagtggagctggtaagaccactttgatggatgtgcttgctggtagaaaaaccggtggatatatcgaaggcgatattcgaatttctggttaccctaagaaacaagaaacatttgctcgaatttcgggatactgtgagcaaaacgacattcattcacctcatgttactgtttatgagtcattgctttactcagcatggcttcgtttaccaactgaagttgattcagaaaagagaaaggttagttccttaaatatagcaagccaagtaataaaaaatagaagaagttgctaacagattttattatgtattggaaagatgttcattgaggaagtaatggagctagtggagctcactccacttagacaagcactagttggattgcctggggtcagtggtctctcaactgagcaaagaa

SEQ ID NO: 379335 - DNA, 4844 bp, Cannabis indica
gtcactcttattgtccttttcttcaaccacattttctaactttatctctcattcccaaattaatgactcccactcactcacgttataggacctagtctactttgtctaattcttctttacacatttgtgtttaaaaaatttaagatataatttgtattactttccctaatttttgtttttgtgacaaatattactttccgtaattagtattataaatatttcaatttttttcttttcactttttttttctaaaaagagataaaattaaaacatttataaatagtatttactgaaatttttaaaaattaattataaaataaataagcttcaaaaaaaaaaaaaattaaaagaaataagagaacaagatttataagtagtttaagcgttaagtagccttgttccatgagtcagtgttattgagcttgaaaagtttctaacatatttcttacaagtagtttttgtcccgagaagatgaaccctaattcttaagacttgatcctagaaatggtttttctaactcttttctatgaaggggtgatgtactatttataggtgagatacgagtataggcaaacccggactcgattaaaattaaaggtgttaactaggcccactgatagggtaaaatacaatatatgctaattttaggccaattgagtgaggcccaattcacgagataaagatcgttcgtacgagtgaggaccatttgaggatgacatgtgtcgtgtgtagccacatccattatgagaatattagaattagttaaatactactaggttagttagcttttctgttacacagtttgttacacaactgtttagccattatacattataaataacgattccctctctttctaataaactgattcggatacaaatcaataagacaaattcttccttctctgttttctctttgtttcactaatatggtacaaaagtaaacctgtaatttaatcttcaagaaactcaagctttcaatcttgcatcaatggtgagaacttgagcaacctcctctgctaccatcacttttacagattcagtggttgatgctccgaatccgtctgctccaccaccacaaacaaaatagaatgttggccccgcacaaattccttcacctcgacaagtccattgtcctcctccaaatgattgctctgcttgcaaagatatgagaagcccctactacttgagcaccactgatcatcaaggacttgcccttgctatacatgttctcattgatagaaatttttagccatggaggcgagacttcatgcattccataggtgtcagaaacaaaactccctttcttgattgatctcttcctcaacctctactgaatgatcctcttataggttcttggatctgatgcaaccaaatagttgtcttggatccttcattcggtatcactagaaatcaaaaccagcatcatgtaccttaatactgcaactcaaatgtagactgaactcaataaccaatcaatcaagaaaatgcatcgcgtatctttgaattgaatgaatcgaccatcttttaatcaaggtgatgattcagtcaatactcacttcacacaacttacaaccatgtgggatgagattaatcagcttcaaccatgcattccttgcacctatgctgcttcagctcaacatcaacaacaacttaaccatgaccagatcttgcagttcttaacatgcttaaatgaattctaccatgctgttcaagctcaaattctacttaatgatccttggccaccattgaacaaagtattcgcaatgatggtgcacggccaagaacgacaaagaacattaggtactcgatttaatgtaccagtggctgctactaccccaattcccacaccagcacagagttcagatccttccccatatgtaaatcttgcatcaagaaacaaaaaaatgagacatacatgttctcattgtcaaaaaccaggccacttaaaggataaatgctactttctccacggcttccctcctggttatggaaattacagatccaatgatcaatctgcatcggacaatcgcaaacaaaacaacactcgcacaactcctcgtgcttcccaaattttaggagcctccattaatatgaacccctctcaacttacacctgattaatgtcagcatctgatatcactcttaacttagtaactacaactagctaattccacatccaatgacgttgttgccgctactaatttttcaagtagcatcttttcaattccctacaattattggattatagatagtggtgctacataccatgtttgctacgacattagatgtttctcagaattttcatacaaacatcatgctagatatgttacattgttacattacctaatggaaccgctgtcaaaataggcaaagtaggcactgttaaaatcaataacaaaatcaccctaacagatgttcttttgttcctcaatttcatttcaatctcctctctgttagtgcaattttacaaacttgttctagtagcatgttgtttacttcaactaaatattttattcagggtctttcatagtaaggattgggatagcttaaaagctaggcaatctctactatatctgacaagaaatcttagctccaagctccaccaatgccaatatttcaataaatgttcatattaataataactaatggcatacacgcattggacaccactctgtaatggtcacaaataaactcaataaaaagtttacattaccttctacttctttacacaattttcattgctccacatgccaattagcaaagtaaaataagcaactatttctttcccataatagctttccttctgctagtttttgacttgatccatattgacatatggggtctttatcccatccaatccatagaaggatacaaatatttttttaacaatagttgaaattgtaatgccttgatttttagggacgctacgtgtgtaattttataaactagtttaatacaaatagaataattaattattaaaaatcgtgactatattaaaaacttgactaaaataaaatactaaaaataggcattataatagcataaaaagtgtgttctcgggatccctattataaaaagtttacaaaaggactaaatacgacgacacctcaataacacaaaaccaaaatgcacggtagatacagccagcccaaaacaactccttgcaactcggcacgtaggccagtgaggtcaatatgtacatttctagagaagacagtcacctcatggcaactctaacttttccttccccttacctgcaccacatagcacccgtaagtcaccaagactcatcaagaaaagtaataataacaattatatagtttattattcgaatattttcatttatacacaatcagaatcaaaccattacgcattgttcataagatgaaatctaaatcactactaacatctaccacgaataaatatcaatatacatatatttgataatacaaaactattatattaataataaaatttatattcatttaataatataaattacatatatatgttacctcataaagtgaccatctttattacatcacattatctaatcacacaagttgatgctttaatatgataatcctgtattgcattgcctaatcaggcaagcccgtgctatcgcctgacacccatgtatcatataattgcatcacctaatcaggtgagcccgtacctacgcttagtactcatatgttgctaacgcccgtaactacgctcggtacgtcaccaggaatattatatcacctaatcaggtgagctcgtacctacgctcggtactcatatgtcactgtacctacgctcgatactcatatatcactaacgtccgtacctacactttgtacgtcaccaggaagaaacccaacaatagttccattctatgccataacctggcattctacatgttgttgtacctacgctcagtactcacatgtcactgtacctacgctcgatactcatatgtcactgatgcatgtacctacttttaatatgttgccaagaatattgcatcacctaatcaggtgagctcgtatatcacattcataatatcatcacattatcattgcttaaccaatcaatctttttattatataacaatattaagcatatttcaatctcaatattaatcaattcacaataatattaattgtattacaataaaacgtactgtgcagtacaatatacttttcttaactttaattcagattcatacatatcggccaatctaagtagaaaactatccccgatgatctcgtccctatgtcacaataatagtaaaccaataagtgtttattctaaaacactacttaacagctgtgaaagacaacctaaggtttcctaccaaatccaatagcacaaatacactaaaacaaaacttatattttgactctaaaacaaacaccatatgatagagctcattgcaagcttcaaaacgatatatagaacgtccaaaacggatacccgaataaaaagttacgacaaaaatacgattcgcgaatacgcgaggctgcctagaaacggtaaacaggttgagaaccggttaaccgcttccaccagaactggttgaccggttcacaatcgattgaccggttgggcagggtggtaaaactcccaattctcaatttatgcactcaccaaaatactactgaaacctgtccaaattacttcaaacttcacaggacacatatatatatatcatacatacaactatacttacgtaatagaaatcaaaatcgaacccttaaatgaaaaacaccgctaatgtttgaacttaagctataaaaagttccaaactcaatttttaactcaaaatatcctcaaattcaacaagaaaatatcggaa

SEQ ID NO: 379336 - DNA, 4183 bp, Cannabis indica
gattgttttatttatttttttttggcggggaaattaattgttttacttggatgggctaatccaagtcattcttatgttttcgtgaatctatttattttgcttctgtttgccttctagcttacattgacttagctcctttaatgtgttgaactgttgtagctggcggaaatccagcatggtagagaatttatgtcagggaacactcttctgcaacttcttagttctctaatcaggtatagaaaataattcttttcaataatttgattttttaacacatgagaaaacaattctcacacttttgatttatttatttgctgctatatagcaataaatcaatgggatcaattataaggtcaagagcgatgatgatcagtggaagactcctgcacaacaactacatgtttgttgataaatcgagtaagactctattcaattgccggagttttaaactctatatgtgtatatacagcatatttctacacacgtgcagtagtgtaaaagacaaatggtctctctgtcttaagccaattcggtcctcgaagacattcctctaaacctttctggatagcttgcattctatatttcctattggactgtaaaataccgcggcttgcagaactgtgccaacaatgcttattaattcttatggaaatcctccttttgaattttgttgtaccttaactttaaataaatttgtttttcaaattttgtttattaagtaaaatgtttcatgtaatatccgaggttaaagttcgggtttttgtttttaaattttgtttttggaagtgattgctgttcttgaataaatttgtgatatctatctatctataaattcaggtttccaaactgtaatatcagcaatagaaagaatacttgactcagaagaaactgaagatacagatgaaattgaagcagctctcgaggcactaggtcaaataggatcttgtaagtttgccacatacttagcctggggaatgactttatcgaataaaacttcttcattgccatcaaccattatatatatatatattggttgatttatcactgtcatataacaagtgtgcactgtgtgtggagattaatatcagttacttctcaatcaaattcatcaaatgttgatcaaactattaataactttataaactgttgtatgctttcaagtggaaggttgtttggcagaaattataagtagttattaatgtaaaactaataatttgtcattacatttaaaaagttataaagctgctttgtgttttttattctttagcaatccaaggggcagagctgctactatcaagttcgccacgtgctgctaaacatgtcattgatgctgcctttgatcggcgagggcatggtaaacagcttgtaagtgcttgaaagctcgcctgttttgttttgtttatttcctgcaactctaaaagaggccgcgtatatatatgttggttgatttatcactttcaaatataggctgctttgcatgcccttggaaacatctctggagaaactcgctcggagaacactatgttgctgaataacaatgcagaagaaagcctaaggaggttaatttatgaatcagcatccaagactacaaaagtgacattatcagtgagtaattatctcttttgttttttatctgaatattaaattagaataaatgctaatattctataattaagttttattttgaaccaaaaccagaacatagtgtttatatgaaattgtaatacaataaaaaaggggttagagaaaacccattgcaatccattaggcctgattttatctcaaagaccgtcttcatttgcttttaaatcctgaaaaattatctttattcctttctagccataacgcccaccaatttaaatggatacagctcttacaatgtgattgtttagttacattttatgctatttttattcagatggctccaggccatataccttgacatttggttttatctttttcttttaacacacattcgtttcttgtttatatacttgtgtatattatgtgagtgtgcttcttctcatattcatcacttcgtaaaaatctattaaatatatgtgacttcaactactttcttggcagggagttcttctatctcttcttcgtcaagattcagacattcgtctgggggtaagtatttcaaatcaagatctatgaatctctaattattaagcagcacacatgggattgtgggggggacactttcccagccacaattgattcatccaacctcagttttactaatcctagtcaaagatcagtactttgttgaaatatttctacatttgacacgattaacttttcgtgtgctcttgacgtttcttcatttttctctacttgagtggtattggaagaacccctcaattcttcacactactatttgataatttggctgtattgctaaaaacaagtgagtacgttaaaaaattcggtcttctagctcttcaaacacccttcatcattcatgtctccttacggaaatgtaccaagtgaaaacatagttaaagcgcagaaacattatataggtgtatccgtggcttttggcaatgttttcattgcttacattgcatatggaaattctttaaataatatgttttttctcacttaaacttcctttttacaggtgctagtactgtaacaatctaatgcgggtaaataaacttttacaggtttataggttgattactgggtttgtggttcggccatggttcctgatggagatttgctcaaaacaagatataattgatacagtaacagatgcaaatactgagaccataaaaataggtgtattttctttctttccgtaaggggtcattttctttcgccttgtgttgtcttgaaatgctagtgttatgattttcaattggcgcattgtttcaaattgaaccaggtatggaagctaggtataaatgttgcaaggcaattcagaaggctctttcattgtcgggtcaaaatatcagcgaggctgctcgtgacaccatagctaaaaaggttagctttaacccaaagttgttcattatatccttgaaatgtgtttagtttgatttcattatctggaatcttagattgtgtttggtgtgcagctacatgaatctgttaaaatgggtccctatcttatcaaaaagaatgaagctcagcctatggtggtgaccgccgatagattctgacttttactatacgacgaattgtgaagcagatattaggtaaaactaacattaacttttattattttagatttgagtaatttgcggtataaatatctaagtttaacttttgcgtacattaaaatacttaagtttaatttttgacggtagtaatacttaagttatattcttgaaactttcgtaagtatctgaccattaagtgtcaagtcattatttacgtgttattttcttatttgtatatttaaattaatttttaaattaaaaatataaatttaatgacctggactaattaggaactgccgcgtggctattgacttcacacttaaagacaaggtacatacagaaatttcaaaaatataatttcggtattattaccattaaaaattaaatctaggttcttataccgtaaattactttttggatttatttgtgaattaattataacttgacattgattaagttctcctgcttttattttatttgtaaggccatatacagtcatctaaggagaaacaatggttgagattgatatatgaaaatttgggactgcagaagcttcatactgaagatcaatcttcttttcaccactttaaccttatataatacaagtacaactctcatggaatggaatgccactaactttacatgaatttgtgttcttttgtttttggtgagaatttgtgttgagccttgtttaagttgtatcattatgtaaaagtaaattataataacatggtcacttggttttgagttttgagtcccttaactttattgggttataaattatgagcaactatagaaacattacataaactcgaaagcatggatttacaatcataattcatatctaggactgttcatccgatccaattcgtatttttttggtcaaataacatccaatctgcactaaatgcggattttattttttgaatccaattcaattcgcacaatagtttaaatacaatccaatccgcaaaagtgcggattggatcggttactttcgattggttactttt

SEQ ID NO: 379337 - DNA, 4794 bp, Cannabis indica
agactttgagatcatttgaaataattgttggatggtgatgaggcttgttttcagctctctttcttagtccagtttagcttttttatcttaaaaaaagttgttaaatttttttagtattttatataaaacctgtaattaaggttttttttatttgtcaatattttaatacagtccaaaaaattttattggctacacttaagtatatattaattaatgtgtacattcaaaaatcatggttaaaaaaaatatttttatactataaaaataaattaagtgttcctaccataaaaatattttataatatagctgcatacaactattatatctcatcattagcaatgcttttataacttttgttgccatctatacagtaaattttaaggaaaacaaaaacatcactagttatacatgagcatattgttattaagtattagtagtgcttagtattttttagatgtgttgtcttggcattagataacgatactagcctacaatttattatattaaattatataaaattcgatatttaattatactaaaaagaatattgacacataaaaaagtgatagacactactatttttgaacgtttctcgtaaaatatccacgagacgtggaaaacaagtaacaatttgttggtagggacgtaattaaacacagtacattattagtacattaactcaatatctccataaatccatgtagtggttccaatacaattaaaaatcaaagcgtgtctatacttattttgtgtttttagttttggactaaacaaataaagctaaatcaatcattaattcattatgttacagtttggtaaagtatctcttacttaccaaaaaagaaaaaagtgaggaaataagagaaaatcagttaggccatattctgaaatatattaggatgaggatgaggatgaactttgttgtttttttttaagtgttgaagtaattaattaataaagtacagattacctgccataacataacgtttgtttacgaaaggcatgctaaggccatttacattacacgtagaaccaataaacaccgtgtgagagacgttaacgtgtgccaaaagtcataacatttatagttgttaatatacatatattattctaaatattatttttatttttttctctcatttacataaaatttattattttttttaaaaaaaattactttaataattctccactataatttcacatcacattaaattaataattttttatctaaaaaataactttcttctaataaaaaattttaaaataaaattcatgtggttgttgtttatattgagcaatattttacataaaattggtcttgaaaattaaaccacattatatatgtggcaagatactctaatagataatttctattggagatgctctaatgtggcgacacaagttaatattttcttatttgtcaatattattgttaatataattaagtattgcgtctcacaattaatgtaataactttaggaaatcactaactaaatacaaggtgacacgtctaaaatatgctagacaccaaataacgccaaatgggcttaaatggacttcttctgacttttctgttataactcctctatcaactaccaaactaaaattactctctctctctctctctctctctatatatatatatatatagcttgcttcttgatttgcatgagttgtttttgtgtgtgctgtatataatttcgactaattaatagatatatacgtactacttctccatgatgatcaaaagggctctgtggaacaaattcaaatctccgtttatagatacaggtatatatatacttatataatttgtaatacacgtacatatgggtcttaattatttacttgttataatatattgattaattagaatttttgctgggtttcatttcttatgtgagaaaaaaagtatatattatatatataaagaatataacttttttttctgtctaagtacaaatggtatatatgaccatgttcataatgtgtgtgtgtgtgtgtgtgtttttttttgatataatgaattaatgaatgtgtttgcaaaggtggcaggtcatcacgcatagagggtggcaatgataggttgtccaataacaagttgagtgttaatgaagagtacgcgaaggccttccgaacaagctcttatgaagaaatgtggggaagagttgatgggcaattaggattaacaacaactactaccagttcattagaaccaaggccagaaacactgaagaacatgatggagagattaaaactccaccaccttttgatcgaatacttcgacgcaagcacacaagcatgtcacacgtgcgaattgcttctacaaagcatccatcaaactcgttccgaatataggaaaatagaaaaggtcattaagatgagcaaaagggtattaatactccatgattgtactactaatagtagtaataattatggtgaagatcatcatagtcatgagcatgaccaacaagaatattattgccgagccatattcagagagctgacttcggttagattaataaaccctttgacaattataagccctcttgaatatcgagatattcggaaaagttacatggttttgctccataaactaacatccaaagagaagaagattaaaaggagagaaaaggtgaagaaaatatgtaagaaagttggaggagttgggctcgtggtatcgcatagtttggtcttggttgccttgttcgtctttgcaatattacatggcatgtttggtcttgtggcggttcctgctgtaatgggctgttcttcaatttacttgggtaaaaagagaaaactggatttggtggctccaaatcgggttgggaaggtaataaatagtagaggaggtggtggggttgttgagcagcttgatgtagctgcaaaaggggtttttatattgatgaatgattttgatacgatgagtcaaatggtgagaaggttgcaaaatgaggtggagcacaagaaatctgcggctgatatatgtgtgaggagtaacaagtttgagctattgaaggaggttgtgaaggagtttcatgctcaggattctagctttttggagcaactacaagaacttgaagaccatatttacctttgtttactcaccataaaccgatccaacaagctactaattaatccaacagattatagctaggatcgatcaactcgatgtgcaccataaataggatatatagtactatatatagttctctgatgatctataaatgtatatttatatataatatgtatacatgtcattgggtaacatatatttatatagtatcatgtttacttgcaatagaaatttaatattcttcacacattgttttaatgcagttaacggcttatatttagttaaagatgctgttgtagaatttttgtctttttttaatttatactgcttggttagtttatttttattcattatgctccataggtgcatgtaatatactattatgtacaatttatctattaatataatgaaaattctatttcttccaaaaaaaaaacaagtgtttgagatgcacataaagatacaatgccatttttatcagttttattttattttatgaagggtatgtgtgtctcaatatgagcaccactccaatcacttcaaccgtttttattttatatattttagcgtctgtttgtaatcttcaatatttttatgttgtttgaatacatttttgggaattttaaatttaatagcattgttattagatactagtaatatttagcatctctagatatatttttatatgattggctagcgatactctttaaaaattattatattaattagactatgtgagattcgatatatacttaattgaaccaatctcgatattgacatgtaggagaatactagataccactaatatcttttaacatttctccaaacttaaatatcacaatacgaacatgcacatggtttgaccaacaaatatcatatagattatttaatcaatagtagactttagctattaaaatgatttcattcataataagcacagtaggccaataaatcaaatctacagacaaaaaaaaaagaacattactaatatttttaaagctcattcttttgtgttacaacaagtagcatgaagttgtttatttttttttttatgaatcaagtatgtgtattactcaaaacagtttatacaacctagtagcattctcaaagtaaggagaatctaaatatctataaaactttacaaggcaggcatcaaaccattctttctcacttctagttgctttttttggccatatacatgtaattcttttttttactatgtttttcactttagcaattacaatttctacacttgtattagaattctgccataaaacattatttcttgtgtgccatattgttgggaaaacctattgcaattaaccacaatattttccctctttgtatgtcaaaagtgggatacttatcaaacaccacaacaagcaattattaaatataaaccaaagcaccacaagcaatataaaatacacaaatcaagagtaaaagtgagacaccaagattttacgtggaaacccaatgcgggaaaaaccacgggaccgtagtccgctcaaatcatccactatcaccaaagtttaataatggggctacaaagttcttctctagtaaactagagactcacaacaacatcaagattaaacaatcttggatcaatacaactttactcatcatctcaaaagatggatacacaagtagaaaaagtttgggtctcaccaagtgggtattgtaggagagcaccttagagaggacaatcgcca

SEQ ID NO: 379338 - DNA, 794 bp, Cannabis indica
gaacaaaaatcataatattgtagatgagatatgagaataaaaaaaaatattaaccaatatagatatgaacaccaatagcaataaaaaagataacaatgagtccaaaaaatacaatggagtgaacaaacatggaaaggccactagtctgcctgttgcagaaatcgactgctctactgttcccaggcacctgacacagcagtcccggcatgagcaacacgaacagcaccaccgcaattagaacaggcccccaatccgccatttcctttctttcttactaaattctcttgaatgttaatgctattatttattggtggataatgatgatgatgatgatgatgattatgagcacttgttcctaggtagcagagtccaacttaaaaggggtgttatttgttgataatgacattgacaaaacaaattaaagggccatgtgattgtgacttttaactctttctttgggaaactacggcatccacttcggacggcttcgtctcgcttctctcgtccttttctttaaactacacggagtccacggacggcttccatttgggccttggccggtttcagcattgccgactgggccttctgttggacttcttgctaagctcgtttggaaactggactcctaacatataggggtatattgaaaaaggaaaatttacaaaaatactggaatttgggttaacttttacaacaatactgtcacacggaaatctttacaaaaatactgtgtttttgtaaaacaccagtaaaacacaaagcagaacaactcaaaacaccagtagaacaccagt

SEQ ID NO: 379339 - DNA, 2838 bp, Cannabis indica
gaaaaaatataatcatgcctttgcagcagttggttgtggaacatcaactaatcgctcaattgtctgtagttgatcatatggtgctatctgcattacaacatagaaaagtttaaagcttaaatatgaccaaatatgggtattactatagctaattacacgacttttccccacttttgtctttgaaccttattttctactgaaagttgatgtcctaatttgactttgtttttatttatttatttatcattatcattaagaaaaaatagtaaagcatatgctggaaacaaaaattgacaaaattttgtttaaaagcatgtcacttgggtcagagctgatcattatccctagtgtattggttgataagttcaaactgtccagtcaaaagtgaatctccactattataggccttaattgttaaactccgaagtttaatttaactactttttatactgactattcttttgtcttatttttatatcagtgataaaaatttaacactggcatagaatatataaaattccttgaaataatataagataaaacaaaatcacaatattgattaagaaaaatgcacaataatcaactttcttatttaagggcctcattaaagggaagaaatggcaagtatatgtccaattcacacacacaactcacctggctaaagccatcgggccatgttattgacactgcataatttcccattggtcgaatttcttcgggttcaatatcttctggaacatcagtatactgcagtttttgctctcctgtccattcatcctgtttgaagaaaagtagccaatcatcataagttgattcacaaaatattagtttgaaagtcaaggccctattatgcatgaaaagtaacattttgtctgctctgcacctttcacattcaaaaagtctggggtaaaactcccatcaactagtttctcttcaaagtcatgcctcgtgtttcttaattcctactctagattttaacattgacttcactaaagctatagtaagaatgcaagcctctaagttagtttttttatgttgggacaaagtggctgaaaaccagtttgccatattgcaaccagctcacacagcacagcatgacttaagcagcacatgtcatatacagtaaggttgttcatgaacaaccaagtgcccattgtttagtggatagctactttccaccattttcatgtatgctgaagttttatgtatcaaggatttttgtgccttggaatttcttaattcatctcaaaaatctcgtaaaatggataattcaacataccacactttgtgctgagcggtcattccgtcttacagttgcaggatggagaagaaactcttcatctgagtctggtactttcaccctgattaccttgatagatttgtcataggtgacagctgttgacactaattaacacaaagatgaacttatatcagaaaaaacttgcctgacttagaaacaactgatgagattaaggagcaaacttttcattacaacattgtctcaaaaataagtagagaaaacactgcacagttttataatagtttataagctttgggcttctgaatttttccaattttacatacttttaaaagctccaatttagtttttagaagatatatcagtatttctatcatctgaatttaaacagcaggccaaaaatagattcgaatttgggagaggatatatttgtaaagaggtagctatcccaatcagctcttaaaggaacaaatttcccaagaatacagaaatgagatcaggtaccttgttggcgaatcttggcacattgttgcacaatacatactccaagctcttggaatgtcctggcaacttcaccttgaggatcagctaccacttctggcactccactatctcctgaagcagatagctagggggaaatatcaaagttagattgacttgaccaatctagtaaatgacataatatgcaatgctgtaaaaaatttaagctccaagatcaaaacaattaaaaggaactatagctaaaaaagagattagacatgacaagaatctgagtaaaataattgcaggggacatacagctggtctaatgggaagatcaaacagatgaggtattccaaactgctgtacaacctggagaggtagtgaacaattcatttcaagataattttttgttagaatttagttataagagttctctagtcttctgcatctagattagttattgggtttttctacagtgagataggaaaataggcatacctgagatccgaacctcgaccgaatgggtagtagcgtttccccatcagcatcaaaagtggcacatgttctcaactacagcaacacacggcacctaaagacacacagcatgagatggttaaagaaaaaaaggagtttgaagaatttagcaagcttatgaaattataatgaataaaattgcctaggaagaaataatatccaaatatcagttgtcataagttattcttcagaaaacaccttattttgcattggcaagatagacatgatatcaatagcttgaaaaaactgttcaggagaatgattaccttaagctttgaaaacattctgactcctttggcaacgtcaataaatgcaagcttctgaggggtagtaacaatcacagcagcggttaacgggactacctgaaaaaaatgattcaaacttggtgtaagatgaaaaaaatgttttatgccaaaaaggttatatgcagactagattctaattttcatagttaccctccaaatgggacatcatataatttcaatgcatagcactataagaacagcaccaaactaatcacatactaatgataaatcatgaagttgagtttatagactattacta

SEQ ID NO: 379340 - DNA, 1232 bp, Cannabis indica
tcgtcttcttttatgttttctttaacttaacccagaacacgcttttagccttttgaagttttactatctcaaatcttaaatgttagtggccatgaagtcagtgagtgaacacatgaatatttgcctagaaacctttaggtcgggtaatgttatgggccagtcactagtcctgcatttccttggagataccaaaacaggtgttggatatcttcccactacttccacggactgagcttttttacacgacataaaataggaggcaaacatattcggacacgaaaaaataaaaagctgtaatactatgaaactatatattaatttagatttataattgtgagtaaaaatttgattatttattaaataataattaaaatttctttttatgattctgtattgaaaagttacatagaaattattgaaaccatataaaaaaaaaacacatattttaatgattataaatgtaaaaattatgttgaacagtggagtacttaaatttttgggagcacttcctagctggtatcacaattgtacttttaatgaccatggcgctataaggagggagtaccgcaaagaactagttgtcgtgacaattgaggatcaacgaagctactgttagacatgacacactttgatttagagactattattagacatcttaaggtgctcagtattatactaatgtgggtcttacaattagttaacgattttttatataacttattaaattaaaatgtgtgagatctgatattagaatgtgtcaataatgatttgtcacttcttatggtacttataccttaaggtgtcccttagtatttctcttaaattgagagtataatctcttgatgcattgaaggcgattgagaggtattatgttgtcccttgcaactttgtgaaccaactcaccgatatgatagagcgagactttaacttgtatagtgagtttgaaacttggagacaatctcatgtggaagtagaagccatgtttcctttgcagtttgcaccaatattttattaacttcttagtttggataaggtagtaatctgtcagtctaaaattactttaaatacttttatttattctctttttaaatttttagtttgtttaattcgactttgaattcttaacttaattctttcatttttctatttttatattctgttagaatttattggggtcacaattgtatatataaaatgtgtgtttggtcatcaaataaataagtcaaatttat

SEQ ID NO: 379341 - DNA, 2449 bp, Cannabis indica
gagttttcctaatactatcataaaatattatagctaatataatattacgatatattttaatttaataattattataaactagtgttaagcattcccaattctcaaattgcacatgagtgcctaataataagttttgaggtaatgtattgttattgttgaaataaaaagaaaagggtattgttagttagggcaaggaaatgggccccatacctttttagcctaataaaacgtgtgaaaacagctcaatccagaaagaccttgatgtaatcactcaagcccataatatagcctccatacttcttcatcatcatcataaattaattagtcaaaaaaagcttgaaagctcaactcctttactttcatttcaagtttcaatagtgacccaatcatgtttatgtatcattctttgaacctttcttgtacatacatattaatgggctcatgaggcctatagttaagttagctagttttatttggtattattcacttcacttaattaaattcatagcacaaatatataggagagtttctttcttgcactgcatttgcaccttttttaaattaaaacatatatcaaacttataaaataatgtctatttcttatgtattgacatgattaaatttggtctaatttggcagccaattaatttcaattgtaaatatatatcaaatctctcaagcatggagccaaacatgatcaatagcgtgtgggaaatgtaaatcaataataataataataattaataaaaaagttggctcacaaaccctttttgccttatatatatatgtgtaaatccataaatattggagtataacatttcaagtatatatattatcatattagcatagagagaatttagttgatttggattattgattgctactactaattaattaaatattattgaaatgggtttttcagtgttggtgttgtttgtgttgttgggtttaagttgtaagggattattattggttaaaagccaaaaaagtgatagtaattttgatgaaaattataaagttacgtggggttttgatcatgttttgtctttgaatcaaggaacacaaattcagctctcaatggataaatcttccggttattatctaatctttcttcttcttattaatttatatatttaattatcataaatacatctttatatttattatattatcatatcccaatattatattgtctcatttctactaaacttagtgtcaattaaataattaaaccttttatttgatagactttttatacagtgagagaaagttaattattagaaattatatactcttaaacatgattaagaaatataaagtcaataattggatattaaaatagtacactaaattatgggcacctaatatatggaatactacaaatcaaattaatccatgcttttggcattgtttatatcttactcattttaaaattttttaaaaaaataatgataattaactaattcatatatgtgttaaaataaaagatcatgcattttaaatgaattatattatgtagccgtgtagttgatacataaaaaattaataatgggaacacaagttttgcatatcctaattttcagtttgcttttctaataatatgaataatgtgtaaaacagaattatatataaaggttacgtacacctgtataattgtatatatgtacagtgtttgtttcaatgatgatttataatatatattataaaaatttaagtgactgcatggtggaagagaattttggttttcagactttaaagcatgcaatagcacaaaaaacatattatatagatcatttattttatttatttatatatattgaacttttatataacaagctaggtcaacgcacgtacgtaattatttgattgacttaaaaagctcttatattattaaaacattattttatgaaagctttcttataattataaattaatattattgtaggggctggatttgcatcgaaacaaagctactcttctggcttcattaatttgaggatcaaattgcctgacagagattcagctggggttgtcacagctttctatgtacgttcctacttaattataattatatatatgatctttttaattaattattaattattattgtttaatttgtttttgatgatcagttaagttcagatggtgataaacatgatgaattggactttgagtttttggggaacagagaaggaaaggcagtgactttacaaaccaatgtatttgcaaatggacaaggcaatcgtgaacaaagaactctcttgtggtttgatccctctaatgatttccacacttattccattctttggaacccttaccaaattgtgtaagtttactatatatatcatctctctcacctcttcttccatacaaaatagaataaaggctaaatactattttggaccctgtgttttgaaaaagttatagattggaccctatgttttgttaa

SEQ ID NO: 379342 - DNA, 4877 bp, Cannabis indica
ttttttttttaagaaatagcctaaaccttgagagcaatacactcaaaaagaagacattgtggtcatatgcatagtttagtagtttcacacttttcctcacacgaagtcccaagttcgaatctctctctcttaatataaaaataataataaaaaaatacactcaaagaagggattgaggattagtaataccaaacactaacactatcatattatgtgtcatgaaaattattacaagattcggcaatgtccttaaaaacaagcctcaataatgaaccgtgactaatatgattattaattttacgttcgatatgttgataatcaaattcaaattgaaccttattgaatccaaacaagatgcactgagcggcaattgattgtcgtaatttgtcgtagttcactaatttgatcgttcaataatcactttaataacctctataattgaacaccccttgttgacgcaaaaatctagccaactcgctcgtatgtgtagacgagatgaaagttgtaagtactaagtaaagaccacagataagaatttatagtacttcactttctatgtcgcaacagtaatagagctatgtctacttcaactttttattctcacgagattaattacagaaaaaaataattaagttgcaaactctaatttctagacagaaactagagagagatactctaaacttataatacttttctaaatgtagaaaaacttttctataactgtaaggatgatagtaagaaactaaaaataaattaattcaaacatttattatatttagcgtggaagaaattggtgggattaatataaataaacacaacaaattatgttacacactgtttttttagaaagctgttcagatcagatgaggccaccagcatataaactactctctaagactcattttgggacatataaataaagacaaaattgcaccacatggtacttatggcgcattaggaacaaatgttgttctaagaagctcagtttcctaaacatagaatcatattatctaaataattcttcagtggaaagaattgagtccaaattataaatggcaatgacttaaattacctatttcactcttcaccaaaaacgaattactacaaggttgagaaaatttcaacctgccttaaatgtcatgcggatacttggagtttgcagcagccaagagagcagcacctataccagatccatctttcgaatgctctatcactacattcctagaaatttctgtccctagaagctctgtcactgcttcttgtaagtattttctgtattgtgggtagttttcatataaccctccatccatagccaccactgtcctctttccaaagataagtccctttgagtcctcctccattttctgcagaatacctacaattcctgcaccagctaatcggcctcctcgcttcacgattgtgtcgcaaacttccacaacaatcttccttgcgcttaaattggtttcaagctggtgaatattataagcaacaaaggggtaaatcatgagacaacacacaagaaatcattaaagtttctttctttctcagaaataacgcaagaatatgtaaggaatttcgttctgaattacatgttccattattactttgttttattttgttccatcttgaccccagtagagtttaagttactattccctcagttaaaagctcagatgtttatttcaagcctaaaatataggaaactcaccccagctacattgtatagaattgatccaacagattgaagatcatcagagttatcctgctgcatagcacaaagatcaggagtcctacaatatttaaaagaagatcatgaatgaacaacagtagagagataatatggaacaaagggtcataaataattattggcaatcgttttaacattgtaaaatttataaagacttgaatgaaacgattatagtgatcaatgaagttgggctaaatcacaacttgttttccaagatctatgtactgtttgcctgaccatgaatcaccatcttaattagtagttctaattacctaagtatgaaaggagagaacagtttctccggcacagatttaccaaacaagtcacccgcttgtgccatttttagcagcacccttctcacaatttcgccaagatacataccagatattgttttctcaaatatctgcacaccaaatttcaacaacttatagatgtgaataatctgtataaattaacagcataaacttaaaactgagtgatggaagaaaccaaacatctacctgctctccaggattgatactagcagcatccatctcattgtcatacacggtcaaaggaagaccacttgagaatgctccccactccgtattaataatctacaagcagcttttggtcaaaaacaaaggcaaacatcttaactatgatcactgaattgaaaacacatgaatagaaaaagctaaaagatgcagagcttttccacacaccgttctgccagatgaagagacctgccccttttgtttaggaatagcatccgttcgctctacataacaagcattagttccagtacctaaaatgactgcaaccattacatcatcatcccagtaccttgctccagctagtgttcccactgcatcattaacctgaagagtatatcaggttgatcatcacttctgaaccacacatttcttgaagttgaacataccaccacagatatttcacataagaagagaagcataccagggcagacacacgcatctctaatccaagccttcccatggcttcattcaaacaagcaactatatctttgcctggctgttgaaagagtttaaaagtttgcactttccaatcaagtttgagacataaactgtttaatataaagagtatgcaagcaaagaaaaatgcagcaaattactaaccgttccagaaacagcaaacccttttgtccacttcattagtataccagagtcaatagacaactgcctcactgggaatgagaatgtgaaaccaatctccctcgtcctaccacttggcaggtgaaatttcccaccttccttttgtgaaaatttcgctaacccagatgccataaaatcaaaaagttgctgcagtttgaaaatttacgacaacaaaatacacaaaacaatgaaatcataagctagtaaaacaataagaaagttgtaactaactaacattgttgaaacaaactaggaaattatatataatattaaatatacagacctcagaggtaccaaacataaggtcctgaggaatagagacctgttcaaactcagtgtctatcactcgctcttccttaccacctaattgaactctaagcacccgaaagtttgtacctccaagatccaatgcataaaacagacccttctcgttcctttttcaaataatatcaattgaatcaacatgaatattaaataattacaatgataataaatcctctgtgttctaggttgatccttccaacaattattattattattattattattgtataaaaagatgaatagatcagatccattaaataaataaattttatgaaaaaaaactttaaagtgaagttactttatgtaaaagataaaccgttaatctggaacttctgaactaagtactaaactaacaaaactgtctgtacacacattaattgatataattcattaaactaaacttcactaagtcaaatcgtcaacaaggagagcaaaaaacggcgtcgtaaataggagttggacatacccagttgggagagtatcaacatagctgaggatcatcttcaggtcactcccaccgtcgatggcaagtccgttccgcatatcagttgccatcgcatctgccacgtggcggagtacgggcaaaggagtggcagtgtcttttcgtaagttggtcaagatcggagccaccgaaacggcgccggatcggattgccataagggatcgtcgaggcaaacccctgctgctgctccgacactgggatcgtgaaaggtagaacgatccaacggacgtggatatcgctggaacagacattttctatggacggtccgatgattcgatcgatctaaacaaaactgaaaccaacagaaaaaataaaataaaaaataaatattttagttcaaagaaaaataacaagtgaggcgagttcagaagagttttgtgttactgttttttttttttaataaataagttccaattaaattttaaatgcgacaaataaatatacgagtgatctatggcctatgggcgaagactacaataatgatgccaacagtgaacaatgatgacaacaagtattgtttgttaattaattctaattcatattcttaaaataatgttactaatttcttatattaatatatgctgggaaaatagtgattaaaaagttgagaaaatacacagcaatgttttatggataattggatatgtcaaattgtgtttggttgttgttgcactgaaattacgaaacaactcttgaatttatgttttaattaataattggttgctttgctttattttgcaaaatattaataacttaaattcaaaaaaactcactaaatctcttataaaattttgaaaacaatatatcttttctctctatatgatagaaatatttgaaaatatataacattagttttcaattatattttaaaaatatatattattcaagttgaaaatcaattagccaaactaatatttcgctaaaatttaattcgattattttaaataaaatgatatttacttgtattttttaaacacttaagaaaatattgaaattatgtatatatatttttataggctatataatcaaaaacattatttattattattcaaaaaaacaatacaatatgatctcgtttggtattattcggtcgatttgattcggacgttttccttggctcttccttcggata

SEQ ID NO: 379343 - DNA, 2439 bp, Cannabis indica
acttttaatatataaagataaaccaattgaaactcaaaatcgtattttttttttccaaatttttacactttttaaaaccatttaaaagtctctataatagatcacacctatagtagctttggatttaagagagttggctactaaagataattagcttttgatagatgattttaatgatattctaaccaaggaagagagagttggtcacaaggtcaaatttcatcctgactcagactttgctaattgtgtaaatagctaccaactggaggatgtgaaagctactgagaattttttcacttggtcaaacaagcagcagggtaaagacataatcttttcaaaaattgatagggtcatggctaatcaagcctggcttgatcatatcaaaatgccgaagactttctgaatgaaggcttatttaatcattcccctggcatactttctttgtatccaagatggacaagtggaaagaagcctttcaagtattttagaatgtgggaaagtcattctgactatgagaagaaggttaatgaagtttggaagaagcatataaatggttctaagatgtatcaggtagtgtgcaagctgaaggcactcaaacctatactcaaagagataaacagagctggtttttgtaacatgcactctacagtagtaaaggcccaggaggaataagaagcaactcaaatttgtttgcagcagatgcccctaaatgccacagtgatagatgaggaattgaatgctagagctaagctgatacaagtgcagaaagattacacttccttcttgcaacaaaaggctaaagctagctgaattcagaatggtaattctaatacaactctttttcatgcaagcattaagcaaagattaaggcaaaatcaagtgttctccatagaacaacaagatggcataagagttacagaacccaatcttgtttcctctgcatttgtggagtattacaaagaacttttgggctttcagatgaatgataggaagacaatactagataagattgtgaaaagatgtcctttcctatcccctcaacaagttgatatgttgatgaataagttcaccaaagaggaggtaaaacatgccttatttgatatacctggaaacaaagcacctagtcctgatggcttctcaagtttttttttccaggacaactgggagttagtaggagaggatttttttgaggctgtgacatcctttttggaaacaggtaaactcttaaaagagataaatgctactgttttgacattagtgcctaaaatgaaatgccctaacactatcaaagattttaggccaattgcttgttacaatgttatttataaaattgcaaccaagcttttgtgctctagaatcaaaaacattctccctaatttagtctctatgaaccaaggaggctttattaggggaaggtttatagggcataatattatgacttgtcaagacataattaggcactatgggaggaaaaataataagccttgttgcattatcaaaacttaacttgcaaaaggcttacgataccatagaatgggatttcctagaggaaatgatgcatgtttaatgtttccctctgctttcattaaacttgtgatgacttgtgtcagaactcctagattttcactaatgtttaatggaactatgcatggatattttgagtctaagagaggccttagacagggggatccaatgtctcctttattatttgttttaggtatggaatacctatcttaaataatgaggaggattggcgataaaccagatttttatttccatgatagatgtgcagcaactaagctcaatcatcttgcttttgctgatgatgtgttgcttttctacaatggagactttaaaagtgtgtattacttattgcaggggcttacaatgttctcattaacatctggtttacaaccaaatgctgcaaagtcagccatttattccagcaacatgcctgaagaacatctagaaaaaatactggcaatctttgatttcaaaacccagtctcttcctcttacttattggggggttccaataggtgcaaaaagaatctcaggtaaagattgtgaagtattgactgagaaaatgacaactagaatcaaaatgtggagttcaaggaatctttcttttgctggtagagttgtacttatcaagtcagttttgatggctattcatgcctattggtgccaagtattaattttgccaaaaaaaagtagtgaatgccattgaagccatatgtagaaattttttatggaatggtaaagctgagtatcaagggcctggagctatgtcttgggagttcatttgccaaccaaagttagctggtggcatttgtgacagtcaatagtcccgtgatccgtaaggggaaataccaagtaagctgtacaatcccacaccacctggggaaggtcaagtgggatgattctgagactgtgtagg

SEQ ID NO: 379344 - DNA, 3200 bp, Cannabis indica
tttttttttttttgaatgaaatgtgaatgtattgtgtgtaatgttttgtatatatatttatgtatagatatagatattattcttttgaagggaattttagagtgtgctatgaataagttttcacgaccacgaatttctcatctggaattttcagataatggcattttcttctcatttatttgttttgttctttctctttgatcggtttctttagctagtaattgctattttttatcggaatataaagttccggagtttaaagaaccaaattaatctgatatagttgtatgaacgagttgggtattgttctctcttctaatttccattacatatttgggtatatatgttgcgtgtatgcatttatatacatcagtgttttctcctctctgtgttaaagatcgtatacatttaaaggaaaaaaagacatatttttatttgatatggttaaaccagattgtttattttgtcatggcttgtatttattacctaattattgaatatataaagtgttactttcctgaattgttttctaaatcagtttacggtttatctttatgcaggagcatcttataaaaacttgtcatggtgttgtgtcggttactgtgattggagaccaggataaacctgctcttgttacttatccagatttagctttaaattgtaagtttcttcttttgggcaatatatttagtttgtcatacttgccaatgctttacagctataaaatgatgtaattggatgatgtgggtagcgacaattgattcattttacttatcattatccacaaaatttcaattttgacacaatttccggattttgcgaaaccagtcattagttttttaagcttgtaaatttgaccaaaattcatagtcatagtacggaaattactgatgaaaagctgatttatttaagagttgagatctttaaagtttgtttatggtaaatcatatattcaatttgaagaagctgtaccagtcagtaccatcatattcatatataatggggttcttaaactttctcccatatatattatcagcgtgtcatattcatatataatggggttcttaaactttctcccatatatattatcagcgtgtttagggaaaatattttgctcgtttcttagtgactttactagctctaattcaactgtttttcttattcactttgatcagatgtttcctgcttccaaggattattcttttgtccagaagcatgttctttgctgctccataatttttgcatatatcatattagtcctcccggccatgaggtttgtcactcaataacttgactgagttcttttcttttttgtttacatatatgctctgctcttatattattatgtcttcttcttaagttgtaattcacatcgtttcttatctcgtactttcttcaagaattatttcagttgggagctgaaacaattagttctgatgatcctctgctttctgctgatgacttggtagatcagatagccgatgttcttaattattttgggtaagggattctttctattcttcaatgtatgtttttatacaacaagagccagaaggagaccctcatagtgatttaagacttaaaaatttaagttttgaaaatattgtttctctaatgatttgttaacataattatcttttgaaatattacaattattaaattaagaaaatgaatctcattctctttatagacttggagctgtgatgtgtatgggtgttacagctggagcttacatcatcaccctatttgctgtgagtgattttccttttcatacaaagcaataagctttttcaagtagccatcaaatcattatttttgacttttaggaaagttttttttaatcttattttaataaaattcctggctacagttgaaatacagacatagagtccttggcttgattctcatatctccattatgcaaagcaccctcttggacagaatggttactaaataaggtttgttcttttggtggacttgttcaatttttgtggatattaaaagctgtctcgactttacataagtttatatttttcaggtaatgtcaaatttactttacttctatggcatgtgtggaatggtaaaggagttattgctcaagcggtattttagcaaggttggtcttctattatcaatatatgtacctttatatatatccgaaattgaattagattaagaaatgtttggattttaaatttctgatggcaggacattcgtggttgtgctcaagtgccagggtcggatgttgttcaggcttgcagaagagtaagccttctagctttgttagttgcactaatggtatgtttggttggaagaaatggaaatacaagaataggaatggaatagccttttcattcattatgaaattagattctattctattacctctaaccaaacacggcctaaaggtgtcaaattatctgatgtgaacaaattttctaatctttttttggttcctaacagtcgctcgaggagaggcaaagtttaaacgtttggcgtttacttgaagcaattaacgggtaaaacttgtttccatttttctccaaatctctttaacaatcaaaattcttgatagtattggccagtcactattagttttgagcttatttttctctacaaatttgcaggagacccgacattacagatggcctgcgaaaactacaatgtcgttcgctaatcttcgttggtgacaactctccattccatgctgaggcgctttacatgacatcgaagctagacagacggtatagcgcgttggttgaggtacgtaaagtaaacctcagctttctctgctgtaaccgaagctatgatcatgtcataatttaactgtttttccaacaggttcagtcttgcgggtcgatggtgacagaggagcagcctcatgccatgatgataccgttggagtatttcttgatggggtatggcttgtataaagtttcttctcagttgaatgtcagcccgagaagcccgttgagcccgttgtgtatttctccagagcttctttccccagaaagcatgggattgaagctgaaaccgatcaaaactcggatttcgcttcatgtttgatgatgatgatggaagttggcgagctcggttttttttgtaatctgtaagttgttaagagctttgtatatgctgatttgttaagaatgattatttagggagtttgtagatatgaaagagagtgagagagagagagag

SEQ ID NO: 379345 - DNA, 4759 bp, Cannabis indica
tttacattgagttagaaaatatataatatactccgaccaaaaactattaattaattgattataaatactattaggctattaaaaaaaatcctatcaaatacaaccctaattactattatacaaaatttacaaaacaacaaaaaaaggaaaaagacaactctctcattatgcgtttactaaaagtacataccatacatgaataatgaatataatacataaatataacgtatcattattcaaaaagagaatccaattttaaaatctctctgatatgttcattagtttgaatttttatattatttattataattatttcatgacaaagatgaacatgagagagagaaaaagagttgttcttccaagtcattattttggtttttgttaagtgaaatagaagaagagaatctcaaatagtggtgtccaactctcattaaagtggcccccaaaaccctaacatcatcatcatcatcatcatcttagagaaagaaagaaagaaattgtggttctaacatgtaagtaatcactaccctcatttatgcataatttcttcactactacccatctgtggaaaaatataaagaaaaataaaatgaaaaagacccatgtaattactttaatcaaaatgggaatttctattgacttttcaatttttttttttttttgggttaaaagtataaaaagagtctcttttgtaagaggatatttatatgattgagacaaccaaactaaaatatgaccaagtctagttgagttgcatttgtttgtccaagtcaataaatcaaagtcttaactctgtttttttttttttttgcttttaaaaatcaaacttttgagtcaccacaaaaaagctttcatagtgtttatattattgttttatacataaaaagaccagttttaaatctttggtttgttttctttctacttccaccaaaatttacaattttgaagaaaacccaattcaaagaagaagaattaaaatgattacagaggaaaaagttgagatttttactgatttttgtgatgaaaaatttgaatctgatcagctgttgtcagaggaacaggacagcaacaagaccagatcacatgtgaagaaattgagatcaatcaagttctcaaaatcaccaagcttgaaattttcaacaagaagatcaaaaccccatttcagaaatattgggattgagctattttgtgaagaggaaaactctccaagttcaactacttcttcaagattttcccaggttggtttttttggtgtaaattagtttgtttgagattatcttagttttgaggatttacttagtttttttttttttatgtttttttgatagaaatctgcaccaccattaattagaagatctagttttaagagtgggaaaaggattttagcaagaatgtctagcaagaaattaaagaagaaaagtactgatttgaaccaaatgaagtcatctaatgaagttgaagatgagaagagaagaacatcattagcttactcaaagtcaaagtcaatatctcctggtcagaaatcatcacctaggactttaacaaggaaacttagtttgaaaccgttaaggttttccccaacaaaatccaagaaaagtcctttgaaaaatcattctggggtatctcggtttcctgatttgagtgtcgaaagagctacatgttcttcaattcttaaggattctaagtttcatgacaccctgcaagggtttgaatccattgaaaattcagctatgaaagtttgtacattttcgtattgctcgcttcatggtcatcgtcatgccaatgtaccacctttgaagcgtttcatatcgatgaggaggcgttcgatgaagaatcagaggagtacaagaggcgaaactcgagctgcttgtaaagaaaggagttcgggtaagggaaagaaagaatcactagctcttttagtagaagaagttgatagggaaaacgagttaggtggctatggcgaagaagaggcgaaaatcaatgattttgttgagaagttagttggtgaaacatcaaatccactttcacatattgatgagaatcgaaatcaagtatgcgagtttcccattgttgagcctaattcagcaccggtggagactagtacagtttctccaagcagtgatgagttggaaatggattcgagatcagttggtgaaagtaaggagcgaaatgagtgtttgtatgcatccccgagaaagctagaagcgaaagatgagaaggaaaatttggagcctgctgatggcttctttcggtttcctcctactaaggattctgaacttaatggtaataaagatatggggacatcgagaatgcaggtgcagctaaaggatcagaaatatgtaaggatgtggcgtttgatgtataagcatactgtgaaaggagtatctgggacagttgaaaatcaagtccctttcgataatgtggacaaggcagaacaagtaaaagaggctgaagttgtacttgaaccgaacgattctcaagttcttcaagatgcaatggtggaaagtggtaatgctgatgcaggcaagcaacagatggagctttaccagaatgatgctgttaagctggtgcaggaggcttttgatgaaatccttctccccgaaattcaggatgatcggtcagttacaagtggtgttagttcagaccaggaaatcttggaacaaggtaatgatggtggtataagcaaagacgagaagacaccatcgaaatggggaggcaaatctggttctaagagctggagtaatctgaagaagatacttgtcctcaagagatttgttaaggcattggaaaaggtaaagaaaatcaatccaagggaaccgagttatctgcctttgcagcctgatcctgaagcagagaaagttaatcttaggcgtcaaacatcagaagagcgaaaaaatgcagaggaatggatgcttgattatgcacttcaaaaggttatttcaaaactcgatccacctcaacaaagacgagtagcgatgcttgttaaggcttttgaaacagttctaccaccgtcggatcttaaaactagcccgaggctgagtttggcagaacacagtcaagtagataaagtccaatcctgtatcagttcttttgttcaaatttgtgagaagtctggtaaagaaagtgatgaaaatgagtatgcagaggagtttccaaagctcgaagatatcgaacgagaagaggatgtttccattgatcaacaagattctcccaactcgagtgatgagctgatttcggttgacattgtgagcacctttcatgaagctctacaagatgaacatgttcaagtggcaccagaacaaatcgatgcaaacttgaggaccgaggaaacaaaattggatgacactaatacaagtgttactaatgccattgcagccagtaaagaagagaatggagtaaccgaggaatcggagtctgattgccaaaatgatgcagcacaagatgctcagtcagaacagcagtcatacacgaaactttggtctttggtttataagcatatgtcatcagcaaacgatggaaccgagctaagcgatgaagttgatgagaaaagattggacaatgccaaaacaatggaaagaaatgtggatatgaacatgaaagatgacactgcagatgatcagaaggcagctcttcggcgaattgaagcaattaagctaattgaaaaggcgatcgatgacattcttcttccagagaatcaggataactcaggctcaaccaattgtgtctctactaatgagaattctagagaagaagacaggaaagaagcagaggaattcaaagttccagactttgaaaaccgagcaggcgatgatttcaccccaaaagaagaagaagaaaaggcctcaacagaaccgaaaatgtcaagaagctggagcaacctgaagaaaatgattctgctcaaaagattcatcaaagcattagaaaatgtgaagaaattcaccccgagaggaccccggtttctacccttggaggccggtcaagaatcagaaaaagtcaacctaaagcatcaagacacagatgagaggaagaatgcagaggaatggatgctcgattacgcgattcaacaagctgttacgaaactaactcctgctcggaaaaggaaagtgaagcttcttgtagaggctttcgagactgtcaccccgggtattagaagatgatcacttgatcagcttggcaaaatcacaaaaagggtaaaagattttgatcacttttgagctcagaaactaaacaattctcataaagttcaaatttttagactaaatttgtgttctttgatgaacattggcaggtaataataaggcaacaagatcaagaagcagttatgtattgagatcatgatgatgatgagtgtataaagttttgttttttattcttttctttgtttaaatttatgtgacataatgtagcatagattaagaatcttgttgagttgcatatacagtaataggatggtgtttttgaagaaggaatacccaaatacagcatgtatttttttcagttgcagaaatttggtgtagattttttatattattattattattattttcaaagtaatgatctttgttgaataaggtttatttatgtttgtgttttgttgagaatttagttataataataaatgtacattagattttgttacatttcactttgttggaataaagatcttcattcctcatgatacttttaaaagcatgttaaataaatcaaataatatatatatataattaaaaaattaaaatattattaaaaaagaaaaaaa

SEQ ID NO: 379346 - DNA, 4918 bp, Cannabis indica
agagaattgtattttgataacctgttaaagaatagtttatgcccagatattagtgttttttatttttatttattttctaaaataattttttaatgaccttttcaaataaaaatgagatggattaataagagcacgacatgtggcataggaattagtccagtcaacatttaatagattagtagtaacggaagtagaaaaaatgtaacgtttagtatttaatctgtaaaaaaaaaaaaggtgtggtatttaagtgtatgaaatcggaaacataaggtaattatgccacaaatattcctattaatattcacttaataatataataaaacataaaatgtaaaattaatacatatattttatataaggactgtcttgtctcttgacatggttttgtagcttcactggtttggtttcatagtattcttgttgtttgtcattttgctattatttcaacggttatctgatttttttgttgttcttgctgctgttatctggtttttgttgttcttgttgatcttgtctcgatggcctcaagcagctatcacgtatcagaaggggatgaggatggggccaacattagtatcgaaagagaagaggatgccattttatcctatgatgcaagtatcacaagtggaaatgactatgatgattgatggtgtgtcgtgggcagatttttgacagatagatccattgactttgatgcaatgcaacacttgatgacgtcgctttggcagccgggaaaggagatattcgttaaggaattggataccaatcgctacctactccagttttatcacgagttggatatccagagcgtgattgatcgaagtccatggacttttaacaagtttctgttggtatttaaaagattgtaaaagggagaggttccgagattaatacaactaaaggaggctgatttttgggtacaattgcatgatcttcgctcaggttttaagacagtaattgtggctagagatgttgctaattatattggcaaatttgaggttttgtcctagatgctttgatgttcaagatggaaagatcttgaaaccgtacgggtaatggttgagagttaaacctcaacgtaaaaaccattcgattggagccaaatggttgaaacaattcatggcgacaatggatgagaaccatgctgacggagaacaatcagctagtgccccggttcaacgactccaactagctccagtagttgctggttcattaccagttggcaccatcaatgctcctatgattgtggaggatttcatgggtcaacaacctggatagattgtatcttttaatgtcaacactggtttcccaagattaaaggatgatgagaaattgaccaatctaaattaggaaactacagctgatgttattattgaggagcagtgtctcatggtgttagattctaaaagaaggaggactgaattgggcctcactgatggattaatgagaagaatgatgagcttagtccagcccaattgggtaaggattcaaaaaatgccaatatggtgggtgctggtttccaggcccacctctcattatgagtcttttatcttgaaattgccatgggcttggaaacccgtgggccttacaattcctaaaggatgttgtaatccaaaagaagcctaatttaatttttctttgtgaaactcttagtaaccgaacccaatggaaagagtacgggtttctctggggttcgaaggcatgatggtggttgatgtgcaaggtagtagcggtggtttggctctattgtggaggtttgaggaagaggtttctttacttgggttctctaaatcttacattgatgccaaagtttctgttgtaggcatggtggattggaggtttactggcaggggtagacccacgtataagcgaggcggggcagtcggccccctaaaaaaaattgagaaaaaatatacatgcattttagctggttacaacatatatttgtaaacataatattaactttagtgtaatggttaagctacttagcatataggttagaggacatgggttttaatcccaacaaaagttattttttttctttttaagattacttttgccccctcactttaaattttaggtccgccactatttactggcatttatggggaaccaaatagaggtcgtaggagagccacttggaatcttttgcgtactcttgttgttagttcgaacttactgtggtgtgttatgggtgacttaaataatgttttgtcccatgatgacaagaagggtggtcgacggtattcggagttcttaatttaaggctttcaacaagcgttgaatgatagtggtttacaagatatggagctatgtggctatccatacacttgggaaaggggtcgaggtacctcaaattggtcggaggtttgcttggataggggtcttgtcaatcaagaatggcttgttatttttgcttcagccaaactctataatctggagttgtccacatctgatcactctcccattttaatggtactcacttctacctttgtggagcaaagagtgcgaagattctgttttgagaatgcgtggctgtgggaacctttatgtctccaagctgtcaaaggatagttgggggttatgtattgataatgacattcaatcaaaaattagtcattgtgggcagcaactgcttctttggggcaaggagtacacaggggactttaagaaatgtattgcaagcaggaggttcgtatgtggaaaattagataatgatgagatttctactactaattataaattggctaacaaaacttatctgaagtgtccattcagcgagaagttttttggcgccaaaggtcaaagcaactatggttgcaagagggggtaataacaacaaattcttccatgcttcgactactgctagaagacgaaataatttgatttctaagctgaaagactctatgggtagatgggtagattggaactctggtttatctcagcttatgttggattattatacatatcttttctcgacgacctgcaccaattggagaggggttagcagctgtgtacagaccagtgtaactgaggagcaaaatgttgatctaatgcaatctgtcttggaagaagaggtttgaaaagcattttttcaaatgcatccgcataaggctccgggtccggatggaatgaccctgggttttttttcaacgatgcttgcaaactgtaggccgtgatgttgtccaactagtgcaaaatttcttcattttaggtcagttacctactggtttgaacagtacaaacctggttttaatacaaaaaaaaagcaaccggttgacatgggagatttaagatcgattgccttttttaatgtggtgtataagattgtgtcaaaagttatcgcaaataggctaaagacagtcctaccgtgggtgattgctgatacgcgaaatgctttttaacaaggttgacttatctctgacaatataatgatctcctatgagattatgctatttgaaacggatagcaaggggtcgtgatggttacatggcccttaagctagacatgggcaaagcctatgataggctcaaatggggttatccccgagccatgcttgaaaggatggggtttgatggtagataaatcaatttagtcatgcattatgtgagcacattgtcatacacgataactcacggagggaaggagatgggttcgattgttgcccagcgaggattacgtcaacgcgatccattgtccctttacttgttcattctctttggggagggtttctcaagtttgcttagaagctatgaacaaagtggcttgatcacgggctgtaagattgcaagatcaagagctcctgtcatttcacacatgttgtttgctgatgacagttacatctattgcaaatccactgaagaggaagcttatagtatcaaaggattgcttcatacttttgaggctgcttctagacagaaaatcaattgttccaaatccttaattttatacaatgctaactctagtactgaaataagggatcgagtttgcgacttcctgggaatttttgaggttgatgagaatgggcattatttaggcttgccttatagtgttggcaagaataaaaatgtgattctcgggttccttaaagataagttgaggaaacgagtacaaggttgggaaggtcgtctgctttctcgggcacgcaaggaaattttgctgaaaaatcgttgcacaagtgctgcctaattatgttatgaatgtcttccttttacctgttgatacttgtaaggagctggagcgactattggcacaggtgtgaatgtgtctatcccccgtgatccttagctccctgacaaggacaatagctttgttatctcagattaccctgttttggccaataaagttgtgaacaatttgttgagattaaaggctagagcttgggatgaggaaattataaaagatttatttgaagaaagggattagcagttaatcctctcaatttagctcagtgactctgcttcaaatgattgttggacctggaagtttaataaacatggacattatactgtccgaagtgcttacaagcatttgtaagtggtcaaagatgcttggtctctagataactctactggttttggaggaagctttggaacttaaaaatccctccaaaggtttgaaatttcctttggagagccatatcaagtactttaccaacttgctatcaattattaaagcaacatgtttcaattagtgcgctctgtccgttgtgtctctcacatgatgaaactatataccatgccttggttggttgtccttttgctcgagccacctagagcaggacaatggtggatgttgacaccagcagtgatgataccagcagtagtactggcagtttctgcaattggttgctgttgctgcaaaataggaaccgagatggcgagttagaggaagtggtgttgggaatattttacca

SEQ ID NO: 379347 - DNA, 4261 bp, Cannabis indica
tttgactaaccctaatttgtttcattcaccattagaataggagtagaacatttagattttgaacttggaaataaccctaatcaaatgaaacaatctacattcaggcctcgtagtgaaactcagaagggtgaattggagtaaatggtggtatgtaatgtagtccaaccatgtgcccaataagatcatagaaacaaagagcatatgggcgagtaagctagacattctacagcttctagaatattatttcactttcgcaaacgaagaaattgcctcaaaacattcgattacacggttttgggacagagtgcgtttgctttctattcttttttataaccattaattcaaacaaaccaaaaaaaaaaaattagaaaaactattgaattattgagatttgccagtagtacaagggcctgaagaatcagtaagaaatcaaattcaggcgagtgatactggcgatttcgattacgcaagatttcgaatgaaaatgttggctggatcgttgaactcaaaatccagacaagaagctgttcttgcttttcaactcaaaacaaaacaaatctttgatttagaaaaaaaaaaaaactaattctagcggagaaaattgaacataaaattagcttacagtggagaacgatggtcgaaatctccgtggaagagtagtaggtccgttgaactaacttactttttatatatttcttcatagaaaagcgatgaactaactgagatttggattttgtatggattttggagaggagaagaggctgcgactgcgacatatgaatgggcctggactactagtccgagctctgttgggccatactgttgatagatagcccaataagcagtgtagtgcagtgttctgaattttcactctagacgacatgtggtttgacttatgtgaaacctgttttgtggcaagtgattcatcctgattctttgaagttgaatataggtattactatcaatatagaggacggtgtgctactgttcatgatttttaaggcaccatcttcaattttgacactaaattttgtattgcaccaatattaaatatggtgttactctttcagtttcaactttcaatcacaacaccaaaatgaatattttttttattgtaatttattcgcaatttaacaaacaaatacaaagagagatactgtaattacagtgcacactatattgttgcacaccataatggttagagttagatgcctatgttgttttacaaaggaggtggaggcttaaaccttttttgtatgtaatccattttgagctcgatcatactatttccttgcaaaatagatagctaactatattttctccaatgtataataggattgtattcttaggaacactatatcatagttgtctattttttgttaggtgtattgtaatattgttattcatagtttatccaaatatatgctacaaataaactataaaattacttgatgatgattttaattgtagccgagtgattttaatctatgggtatttggaaatttattaaagaaagattgatttgataattgatagttcttttcaaattctcaagaaacaaacgaataatctccttcaaaaaattgaaaaaacctaaagaaaaatctatgtgaacagtccataactgaacatgttgtagttgacacaaacaaaattaagatttcttattttgccattttagcttggagaactgcaaatgcatgcatgactcttttatttttaaataataaaaatctaaaaaaaaactgcaaaaagcgataggctgccgaccaaccaaccaaagatagccacgtgactcgtgatacaaattgtctccgaacaagcatcataattcgattgatatctccaaagtaccttggtgctaaaaacatacatactcctatcttctttataggaattgggtcaagagtataagctatttttagttagttatttttgatcaaattatataaaaaaattctaaagaaagagcattcaatggattgcattaggataaccatagctccaaaggaaagaaaggaaatcatcctcataatgaaaagattccaagcttcctattgtttataaggtcccttacagaaaaaaataagctgaagagaactttctagcttagaatttcttctatgcagaaaatcaaaatgttctgtttcaactgtcagcaattttctcgcaccaacatacactttaataacagtcataacaatgtcactatatcacctcgacaaagcagtatttcgaccacaagaaaaatacttatactgttgtcgatatgtatctctagcaggttcatgaaattactagcagcaatatacaatgccattaaagtcatctccttcatggcgaaagtgctagtgtttcataccataccatgagaccaattacacaagttcaactttcactctaagccctttaatggaaaaacaacatattacagtttcacaatccaattgtaagtcacacacttcaactgtagacatttcttcctcaatctcatgacattagtaaggtaagcactaagctatgttccaaaaccgaattctaaggaacaaacaagcatatttcaaaacaaatttattcacttgcatcagataatggcacatgtagaaacttcctacacaacaaagctaggaaacaactatcttgaataaacaacaagaagattaaaatcagcaaaactaaatgtttagcatagtttcatttcacaagataagaaaaactgtacttattgggtgtttgtggtaagagtttcacatggtaagtttaagttgagaagagttgagattaaaggaatttcaaactcaagtattcaaagagtttgagattaccctataaacaaattgaaaaatgagacccacttccactaaaatgatactaagaacaagtttagttttacatccctattccaaataacctaaacatccaattagtgttgagcattactattaggtactagtagtagttattacattcaattatataagacccgatacataattgcactctaagcaccacttgtgccttttagcattaagcagctcagaataaggacccaaagaataacatgactaaatccctaattttgatttctttgcaagaactctccacaaacaagatgagcacaaaagcgatatccataatgaatgcaaataacaatccaaacatagggaaattgtaaaatgaaatggcatttgtcttacacagatagcatggaagccaatcatagttcaattatatcaaaatgtaatgcttttttccaaagtttcagaaaaattgcaagcaaattatttcatatccaactccagaaaagaaaaaaaggaaaacaatttatgagaaatgaaaaaccctagcttctttcttatgggatatcccaaggtttagcctcgggaacggcgaccaccataccttggagatcaggcgagaggacgacctggcagctgagcctggagtgcttgttgagaactctagctcttgagtatttcttgagaatgaactcctcgtcgtaagagcggcccggaagcctgtcgagccattcctgggcaacgttgacctcgcattcggcggagcaagcgtcgatatcctctagccggtgggaggctggctcgatcataccggcgttggccaaggtcttgagaagagtgtgaccggtcaagccaacgatctcccgcttcttgccatccagatcgatggcgaagagcttgacaatacgatcagaaacttttcttgaggaagagggagatggcgatgtgggtgaggttgaagtgacggaggatctcgaaattagagagtttgaatagaaggagagggcaggaagacggtggatttgggcggagagtctctgtaggttggagactgccattgttttgggtggttcgaccttcgaaattcgattgaggtgtttcggatgattcccttcttcgagggactcttttcgtttatgctgccactatttagtatttaccttctacatgtaacaaattaatttttttttttacctcaggtattaaaagattgttagatttaaagagaaatttgtaacggtgaaaaaagtttagaaatatgatttagtacatgtaaaaaaaaaaatcctaattaacatttatcttcactcactcctctcacacatatgttaaaaaaaattttacatattaagagtttgtttggctgtgttttcagtttttagtttttaaaattgtattttttaaagtgagaatagaaaacagttttttgtcattttaaaaatttaatggtgtttggtacaaat

SEQ ID NO: 379348 - DNA, 1507 bp, Cannabis indica
gttcgacatggcactgtccttgaagtcgtacatagaaaataagcttaggttagctggttgtgattgggacactaattatcaagagaaacaaactacaaaggcatgcaggagcccacttgaagcaaaacactacacctgtattacatatgagacatgcctaagaaatattatggtcaattgtcctcaaagttgttgtagtggggtttgaaagaacaggcaagataattatacataaaatatgaaatattggggtattttgtttcatttcaaaagttggggtatggtggggttgggaagaaaggaaaagaaaatttcaaagaaaaattaattagtattttattttaaaagcagcctgatctaaacttccaatccataatggtgactagttagacaataccatgtgattacagaaggagtatgcctcaatcatcagaccccatctaagctaatttgctctgcagtcttgaccattcatttcaaagagcattggttataaatacacatatgagtgttttcactagcatcccaactcctcaaactcacaagtactcacctttcttctttagacacaatcttattattaattacaatcatgggttttcgctttgctagcttagttcatgccaagcaactcattcagaggcctttttcaagcacaaatgatattccaaaaggctttgtggcagtttatgttggtgatgagagcagaatgaagaggtttgtgatccctgtggcatacttgaatcagccttcattccaacactttctaagtcaagctgaagaagaatttggattcgataatccaatgggagctcttacaattccatgcacagaagattcttttatcgatcttatttctcacttaagctcctaagcttatgagtttacacaccaacagatgctaaccacactaaacttattgttacatttttttaggcatacacaatgccatgttgtaaatattttttccttgggaacaaaatttgtcccaaaaatgatacaaattaatgaatattattggaatttttctcagatattttttatgatattagaattctttttcttctggaatgaacataataatcatagaatccttgtcttagaaagaagttaattttttaagaggctatattagggatcttaaatggccactatgaccaacaaattataactaaattaacttattcctattttgtgaactctgtgccaggaaattaaactagtaacacttatcattcaaaacaaactattataatatcaggtatgtaagctaatcttcttaaaactgaacactttgtattactattttatgtgattaattttaagtacttgtcaaataaatgttaatggattttgtagctggtacaacaataagagatattaattttggggggtttttacactacatactcaaattttcaatttttttttttgtaaaattttttttcaaaaatactgtattttttttttaaaaaaaatactatgtatattttatactgtgtactgt

SEQ ID NO: 379349 - DNA, 5255 bp, Cannabis indica
ggagcattgcaggatttttgttattactagattacatatcaaaatttttaggttttagggtcttagtaatcctaagacccataggatagtaatcctaagatgatgatgaagtaaaatacaagagttaagttgctactagccaaagggtctccctttggctagttatagtattttgggatctagtttttcaatttttgagttttgagtgttttgatcggattgattattttctaataaaattttttggttttttgatttgttttcagtttattcatattcgttagctttggtgacggctatcaacaatggggagatgtatttcaacaagttaggagcgttgtttgaagatgttatagctttattgtctaaatttccgggggcagttttgtcccatgtggctcgctctgagaatttagcggcccatggcttggcaaagcatgctctgcggttagacgatgagctatcctggttcgaggaggttccagcgccggtggcggacgtgggcgtcgtaaattcatgagtgatttaatcactttgtcaaaaaaaaaaaaaaaaaaaataaaaataaaacctcctcagtttgtttcctagttgtatagaaaaagaggtaaaggtcgagaagtacaatgacttaataaccctttatttttgcaatgacttaataaccctttactccactacaatttctcgttactctcgtcaaacaaacaaatccccctaaagcttttgtcaaaaaaagaatctctctaaaggtaaagtctatataaataaataagaaggaagaaacccaacacacacagtagtagggaggtagatttccatttgtgtgcgccaccaaactacaaccttcccaaatcctcaatggcgatcgccttttgcctctctccagcttcctcttcttcatcgttatcattttctaatctcaatccccaccgttcacttctctcatcgtcttcatcgtcccatcttcaccttcgtttctcttccgcaaccgttaactcccttacctatcccaacagccgcagtttgtctcattttgttgctgcttccaccggtggcggagtgggtggattcaacggtggaggatcttcaggtggcggcggcggcggcggtgatgatcacggcgacgacggtggtgaatccgacgaaaatgcaggcggaaagaacagagcggaggcttttttggttcttaaagaagcggggaggtctctggagagtttgcctaaggacttggcggcggctattgaggcggggcggattcctgggttggttgtcagtaggtactttgcgcttgagaagtcgggattgatccggtggctgatgcagttcgctggatttagggagaggcttttggctgacgatttgttcttggctaaggttgctatggagtgcggtgttggaatgttcactaaggtatactctttctaactttcttttttcaatcactgtcattgttctttgatttacatgtaaataataaatgtgggtgatcttgatatcattttcagcaataaccaaataataataaaattaaaagatgaaaaagatagccttcactttctgagtagttagagatcaaaaggtcttttaagctccacagttctgtttctatttcaaaatctgagatagtcgtatatattgtttgatagctttgataaagtttatcacttttgttggtttctgagttttgatttttacattgatcatagactgctgctgagtatgagcgccgaagggaaaactttttcaatgagcttgaagttgtttttgcagatgtggtatgtattgttttcttaccatttctctcgtcgattgatatattattttgataatttatttacactctgaattatgcaaactatgagtacggggccacccatggcctaacttctcttgttactttccatgacaaatcataaagcaaatttcgctttgctttgaaaatcttatatgaatcatggtaacttaatattttcattgaataaatttaaatttatttctaaaagttcgttctatctatttttcttaggtaatggccataattgcagatttcatgcttgtttttcttcctgcccccactgtttctctacgacctgcgcttgcactcaatgcaggattcattgccaagtttttccataactgccctgataacgccttccaggtttttatctttttctgtcaacaatttacaattctttccgaggtttgtttacagctactcatattattctacatatttatcggcagattgctctctctggaacatcatattcagtaatgcagagaattggtgccatattggtaaggagaagatgcctcctagttttcagtggagaaaaataaaatgattttaggtacttacactgacttgattgttcttgcagcgcaatggtaccaagctttttgcagttggcactgcttcatcactggttagtttctgtttgcttatgtaactgtttctgctacttctttctttcctgataatggtgtgatttaaaaaaaaaaagaaataaaaatgaaatctaactttcacaaatctgaagctggcgtaataaaattggttaattatttttatttaggttggtacggttgtgacaaatgccttgattaatgcaaagaaggcagtaaataaggatgctgctgttgaagttgagaatgtgcctatagtatccaccagtgttgcctacggtgtgtacatggcagtttctagcaacctcaggtacgtgacttctccagtatcactttaactataaatggaccttttagtttagcaattcatcctcgcttatgtgctaagttggtgtgatggatttgttaaacttggcacacgatgtgctcatcagtttattacataaacttagctgaattattaaactatttattcttgctagagtgcttcaactgtctgtacatgtaactattggtttcatgactagcattagcattggaataactttaccaaaacgataattgtgactgacaggtatcaagtattggccggtgttattgaacagcgtttcttggaacccttactacaccaacacaagctcatgctaagtgcaatgtgctttgctgttaggactggcaatacattcttgggttcattattgtaagaattattctactatcagcattttttattctcaaatgagtctttccccttcgtgtttatattctgatcattttctaaactctaatcacaggtgggtggactacgctcgttggataggaatccagaaatcccattagtaattgttggttcgccttcactgccatttctatttttctttatttaaaaggaatcatatagagtgaagttagtctcccttgctccactacagagatgttgtaaaagaatggcaaattgctaaaaattggatttgtgggggagtttttggtgcttaggatgctttggatattctttgtcgtagtacatttacagctcttgacagtgctaacacatgggattttgataattagtttctggtccattataatttcaaccccattcatgaggatttgtggtacactgttacataaacttgaattgttgttgttttcttattatggaatgagtttttgaattattgaagagatctgtattctgtggttcgagcaaattactatagttttatggctccaaaaatattgtagtattgccttttttattagttcagttattaacgagaatacgtatgcacaagcagccaagcgaatcatgaccatgagttttgtttcttgtcattagtggttcctgtgaaaatcaccaaccattgaaaactcttatgcatgatcttctttatcccgaagctgtatgattatcaagcaattattgttcaacatatctagtattcatttccgtcgcagtccatataacttactaatcggaaagttaaatctaaatttaagcttagtacattcatgcccttctcttgttaaattaagctgtgacatcttccttggtacatgctctgtatctgacctctgtagtgttttctccatctccatataccacgtcgcaacagtctcttccattactctattacattttcacagaaaaacacacaataatcaaaacaaacaaataaattagcaaaacataatgcagattgctgtatacaatcataatcatttatgactaagtactgacctccagtggcagttttgcaggagaaaagactcgaattctttgaatgtgattggcagagtggttaccacaaggtgctaagccaggagaagatgctcttacataagtgttcataattcgatcattggactcctgtgtggagtggaagaagaagacatgaggagtttcacagggattgttggtcggccaccgtgtgttgaacatgtagaaaggtgacctacttgatctttgtccccgccatgggcgaaaagtctcgagtggtctgcgcagaaaactgcgagggagtgtggcttcatagatgtttgtggagtagccccatgagatggagatagaccagttggtgggcctgtggtggcatattgtctgttggagaacacgagaggggtcaactttaactgccttcatgaggtgtttgatggagtcgagtcgggttttgttggggaagatcgggtctacggtgtcaatgtggtggagggagaggaatggagtctgtggatgagctgaaagtagtcctgatatgtcaccatgtagatcaatctacaaccacaaattttaagtaatgatcaaaatttacggcgtttggacctttgattgttataattgatgtatatttaataatacatatagttaatcaacattatggaagggttagagtaactataatatgagagaagtattctatgaacgtatgcatacaatgacttatttatgtaatttgatatcgtattagattttttaatataaattaaactatatatataacattcacaacaattatgggttaaagagagtttttcctccgaccttgtaagaggaatggtaaaaagtactagtggtgcttaatatttttctatgtgttaatatttctattggtcaaattaaatatcgggtctcatagagtttaatgtaagggtaaatactattttaaatcatgtgttttacaaaagttactaattggaccatctgttttgttaaatgacaaaatagaccatgtattttttaaaatggtacaaataggttcttgaattaattttttatcaaaataaaatttaattataatccgatctaaagtggtatgataaaattgtttacattttttgtatatatt

SEQ ID NO: 379350 - DNA, 6075 bp, Cannabis indica
aaaaaaaagtttaggtaaaaaatttattttatgtgatttagtttaagttaatgataatgctatatgtaaagaaagtttagtacatgtattgtaatttataattgtttaatttttgtatatgtttagttattatatgtatgtaatgtgtttgaaaagttctattattattatttttaatcaattgccaatgtttaattttcttaggagttaatttattttctgggtggtccaacaaactcctctttcattggttctctgagtgatctcattttcggtatattattattatttaattagataagtttatgtaatatgatacaaaatttgtgtaaattgattagtctcaatttaacatgttaatttacaattgatgtatattttagatttattttttaagtatgggttcttggtgttgattgaagagcgtaaaagtggctagcgttatttgagaaaggtataacacaaaaactttaaaattcttttagtggagtttgaatattttagatattcatccgtagtgaagtatgctctgcgattaattgcactattgtcaaatgtgtggaatatgcatggttgataggtttgaatatcttaaatttttatgtgtagtaaaataggttatgtgaatacatgtattgcgatcgaatggttagataattttttgtattgttaatgttattttgtttatgtagtattgttttgtattttgtttcttattttttgtttatttgaaatttttgggaatgtcttattataattgttatgctttcaaaattttgataaaattagaataaatttcactaaaaatgcataaatattagataaaaaagtgttagattggccaacccaatccacatagagtgccattagttatcagctagttataattagggctccttacctaatagttccttttttattttactttttgtacataaaatgtgaagatcgagccttttttttcctccattcattctcacctccctctgtggtggaggattggcttcccctctattacaaatatatatatatatatatatctatatatatatttcaaaatattttattaagatttaagtggatctaaaaacaaaacttattcaatattaatcatccattttatggggctggccttaccagactacaaccgaatcctttacacatacaagcctctcacaattcacgagggatggcgatagtgaacattctttgcttcaaacttgctatgtgatcgttagggtccgttgtttcgctgtacatcttcattgatgggaagacaaacatttttggcatctccacgagagctatagcatccaagaatggggactctaagcaaagctacttggtaagctctttttcaaaggtgcgggacttttgggatttaatgaatcatagcctccatgccttcaagcttccttgctaccatttgttcgatcatctccttaggtgtcattatgatggcttgacctgcagatggaacaataggaacattagatatcaaaatacttggagggattaggttggaggtcctgagttgtccttcttgagcacttggcgcaggaatgcttccgtttggaaccgatgtgacttgggcatcggtcatagtttcgtcacataccaaagagggtccatgtgttagagtagatcccctggtactgatctatctactccagtatttgctgtagttgaatgttggtgtgttgtttagtttggtggtgttcctgtgattgctggacgttggcctaagtttgtggtcagagtggaatcaaggtattgcgtggatggaattggaacacgaaaccttgactgagactcatactacgttgaacggtctccagtatctccacctttgatttcagcaaagcattctcttcccagaatgctttattctcttcttgtaccattctaaggctttcattagtttctctcatctgagacataagagtagctatttaggcttgaacgtcaatctctccttccaaattttccatggtattggatacgtgtcccttgctcctgattcagtttgttagggccccacggtggacgccaaattgtagagggcaaaatctacaatgatcggaatggaagggccgcaggcactaacaaaacgaaaaaggagcgttgaaattaaccttgggacaccgggatggtaccaaccgaagggactccgatgataaaatcagtaaataattcgaataaagaataaccgaatgtaaataaagaagatagaaaatagatattttcaccgtagagtgatggagaaggactggtaataataatagtaatgtattgtgtgaatgcttgagtaagtattcagtgagagatgatgagatgatcattcaaaactactgggttctccttttaaagagcctctaatggtcaaattcatctattttgaagaacgaacgtggaaagtggtgttccccttttctaggatgaaggatcgattcttatggatcagttatagactcgttccaattctttgtatttgatttgtcttgtagctactgggctcatttgggccatgtattttagccaaagctcaatgtattttgggtgactgggttatatttactgacttggttttgaaggattgtaattttaatttggaccgtaaaaagcatttggtgcaatttttggccactacatatctaaacataaatttaaataaccctaaaatatctaaacttgaatcctctttatactaacatgactatcttaagatatactattaatatttaaactatcataatatatcatactagttttttactaataatatatattcatttttaatactatataaaatatatatgatgtattactaataacatgaaattatatcataatatctatttatattaagctaataatatatctaccataaatatgtaatgtctaatgaagcattatcgatgtaacacaagatttattattaacatactttctaagctcatataatcatctttgtccacaaatcgatacaaacacatacgtacatacataattactcgcacacaaataataatatcatcacacataaattgctaatattaaacttggtattatagttgtgatgtaaggtatataagcaacggactatttgatagcagtcaaaaggattatgaggtatcttaagagaaaaaatatataattagatgctcacatataaaaaattaaatcatttagaggtcgtaaaatattcatattcttattttgctggacgccaagatactagaatatgtacatttcaggctacattcttctgttagttggagctatattctagacaaatatcgaacaaacacttgtagcttcttcaactatgatatagcgaaatctataacagcatcaaatcatggaatatgggtgaaaagttttgacacttggctgtgtattttggagaatgtagaaagagcacacaacttattttgtgacaagaattcagcagggctatattccaataacaatatgagcccatctaagtcaaagcattttaacataaagtttctagttgtgaaagaaagagtacaaagtaaataaattttcatacaataaattgagacaaactccatgatagctggtctgctcacaaaaggattaccaaccaaggtattttactcatgggtgtagtatatattgtttggggagatcataatttagtgggagtatgtatttatttgattgctctatgttttctaagatatttatatatgacataacttaagtttagggaggatcagttggaaatagacatgtccagtttacattatgtaattttcatgttacgtatcaatgattgatccatgtctttggctatatttgtataggtgactattgatggctttagtcatgattgataagatgaaaactgcttttatcccattggatatcgttgatgcagtagattgttatgaatatctttatataatagcaaattttgatcagttcataaggttacacatttataaggtagcatatactgtccaagtagggattgttggattaaaatcatatttagtgggcacatatgtagatgctattataaagtatggtatacaaaataaagtgactaaatatgctgtgggtatcaaaatgtattgaattgtcatgaaaataatttatagataccataagttaatttataattttttgagggactaacttataaatatccaaaattgattctgtaattagtctataaatatctagtggtccctatcagaaaaaacaaataaataaataatatatttttgaaagatcataattttctgtaaagtctcttaactttatgttagatattcttcttctttaatttatgttagatattcttcttctttaatttagataaagttctataaaaatatgatttacaattttttatattgaaatacatttagaaattatgatgcaacactacaaaaatcttacttttagtcacaatacaatttgtgactaattataaattattattcatatgttgtgactaaaaggttcgtggctaaaggtattagtgaagaaagtgataatttgttgtgactaaatgtatttttagtcacaatacttgatgtgactaaaactaaattagtgacaacttgtgtctaaatgctagatattagtcataaataattgtttgttaactaaaagtcacctttagtcacgaaaaatttatattgtcactaaaaagttgccattaaaagtagcaattttttgtagtggaaatcttagtccaacccgacaccaatgcagtgtccatcaaacgccaaacggacacctaaattttcttttctaataattttttttttttgacaattttcttttctaataatattatatattcataaaactaaagtaagcagaggtaaaggaaacaacagtttgtgctattgattaaagaatgaatttttttttttttctgaaagcatgttaatgaatgaagttgattagtacgggaagcacatatttaacaaaggactaatggtctaataagaaacactgacacgacaagaaaaaaaaaaacataatagagagagacagagagacagagagagagagaaatatgaaaggaaaggacagaaatgtgaaccctgtatatacgacactttgaaccttaattaattatcataatctattctttgcagctgcaattttccccttctcacctttaataacataaacaaaaatatccatattcttgaaaaggacctctgcaaagctttggatatagaacccaattctcaccaagtaaaaagaaaagataaattatggcataattaattctgaagcatataccatttcttctaaggtttattctatgtaccgatgagaccaatatttagctatttaaggctttgttattagatgcctgtgaaccagaattaatggcagtaagaaaaagagttgagttcaagtcatgtataagctaaccagttatagggcttctctttcttggcaagtgttggtgatttaaccaatatatataatcccaaatatacttgccaaaggagagttgccctgcgactgatttggcttgcttattttattacgttatatatgcagtactctcgttggtctactttcttatagcgtacttcttaaaattttatggtgagtatcattttcactaaaacctaccttgtttctgtacttctctcatgcttagtttaatttgtagtcgattacatgcagtcacaaatattcgatcgatttcgaatgtttagttaaagataaaactattttttcttctttattgatcttctgatcacccagacgttgaactattggtaatcaatatagtaatataactactaaaggtagtctataatgtttcctttgctttttgatatatctattttatttgaagcggccactttaatgtatggactaattcattgcttttaaagtacgatatatgagcattttatgaactatactgtacattgttaggcatgtacgtaataattattgaggactgtaatggaatgagcaattatacaaagtaagtgcaattctatatatatatatatatatatactagatagtcgttacgtgccaagccacgtagtgttagtt

SEQ ID NO: 379351 - DNA, 3233 bp, Cannabis indica
aagattagttagagatgattagccaattgtcattgcgttttttttttttttgagtaagtttctgtttggatattcaggttgagctgatgagtttgtgaaaagccattttctgagaaattttttccattactttgatcatatttagaggtcaattgaggagatttagtactgggtattgaaatgaggaatgaagattagagctgattagcccattgttatgtttgttttgagtaagtttttgtttggatattcaggttgagctgatgagtttgcaactcaaacgggcaaagaagcgaacggatacacaggatatagaattggcaatggatatgatggtggtattttcgagaaaggatgaccgaaatgctgatagagccatagtagaaagacttgggaaaaagattgagttgcataccgttgaggaccttaagctcgaaacaatagctgtaaggaacctcatcaaagagaaaggacacaatgcagagagtactcaacatctgattgatcttcttaacaaattcaaacaagttgcaggtatggaagaaatcaatattcttgatgaaccagtcatgcctaaaatgttggccaagtgcccgtccttgatgatcccacatgaatttctttgtccaatcacactagaaatcatgacagatcctgtcattgttgccagtggacaggtgatctcacaactagtaatctcattcacacttgctagggcagaaactatgatattaagagcacagagtagcaagttcttttcttaggtcattttcatggaagttcattagcttcttttacgttttagatcatgattcgaaagtatggttggtctcccaagctacacataagataggtggagaactataatagttgaaaaagttttgtcaagttcttttcttaggacattttaatggaagtttactagctcctatttaatttttagagtacattagttatgtagagtaaaagaaagaactaactttttggtttcttcttcttgttcttcttttgatggtttattctagtcatatgaaagagaaagcatacagaaatggttcgattctaatcacaggacttgtcccaaaaccaggcaaactcttcctcatctgacacttgcgtcaaattatgctcttaaaaacataatcttgcagtggagtgagaagaacaattttaaacttccctcaaaggataatccaggagaccatgaaagctcctcagctgatctcaaagaggagatcttgtcccttgttgaaggactatcttccagccatttagaaacgcagcgaaaggcggttaagaaggttcggttgctctccaaagagaaccctgagaacagaattttgattgcccacaatggaggaatcccaccattagtacagctcctatcctatccagattcaaagattcaagagcatgcagtaacagctttgttgaatttatcgattgatgaatctaacaagaagctcatagctagagaagaagccataccagctatcatagaggtgttgcagaagggaagtattgaggccagagagaactctgcagcagcactatttagcttgtcaatactggatgacaacaaaatgattgtggggttatcaaatgggatcccacctttggtggaattgcttcaaaatgggacaattagaggtaagaaagatgcagccactgctctttttaacttatcacttaatcaagctaacaagaccagggccattagtgctggcattgtagcacctttgctccagttactgaatgacagaaacttgggcatgattgatgaggctctgtccattttcctactcattgccgcacacccagatgggcggcaagagattggacagctatccttcattgaaacacttgtggagtttattagagaaggaactcccaagaacaaggagtgtgcagcctcagttcttcttgagttggcatcaaacaactcatcttttatattggctgctctgcagtttggagtgtacgagtatttagatgatatggcaaagaatggaaccaacagagcacagaggaaagcaaatgctctattgcagctgatgagtaagagtgagcaaattccataatattccatagaaaatgcattacttaatgattttgtttgggttggtctgtatgtagaatttacttctcaaacttcttaatctcgaccttcagccagtgcatgtgtaatcttatgacttacattagttcacactccaaaggcaatgttagtgatattttttttgggaaaccttagagttattcttttgctttctttatcatatatattatataatatagggtcacttaactatatcaatttacaaacaatatttacatagcagtgtgaaacatggtgtaaaaagtaacttgataattattttttagcagacctttttaaaattttatctataaaatgtggatattacatatatttaagtaacttgataatcattttttagcacagaaaatttaatttttatctatgaaatatggatatttacatgtatctgttagaatttggattggaaatgggtaaagtacataatttatctcaaaaccaattaataataagagtagtccattcattttatacataacaatttatttctatattagtaatgtgacacttactctgatgtattctcttcacgtttgggcctagaaaatatgggtataacgaacgatctttaaaagaccacagggttgaaatgtgacatttgaaagaattccacaaggccaaatcgcgaaatttgtgggtgtacacgttgggaaatttgtagattttgaaacagatcaaagacccaatactgaaaactggcacacattagccaaaaagtcccaaatagaagttaaagaggaaacaacggaagttctttagcttggctcgtctttttggaccgacagactttgagtttataacgaatcacaagcggctctgatactatcttaaaatttagaatgaaagtgcaggttccatcacaaaaccaattaataataaaatgagtacattcattttagggaatttttcattaatatacctcaattagaaaataatcacacaaatcaccacacttatttaaatcataccaaataccaatacgtctattaatacgcatgtacaaaaattaatatatacccaccctcttttacttctctattacttgtgtatcaaattttattttattttttctttttttttttggttgtctagtcatcaattattttagtttttt

SEQ ID NO: 379352 - DNA, 2035 bp, Cannabis indica
cgaagaaagtccatttgctcttcacctgtgatttgccttattgatgaagagcgtgatgcttttgatgccaatccttctgacagtacaactacctttaatcaaagttctatagccaatggagatgcaattcgaagaattgattttactgttgagactcccaattcaatagaaggaaagtcagagtcaagtgttccccaactgctcactatgaataattctactgcaacttctgaactcatagtaatgaacaagagactgctcgtttattgctcacactgcaaaaatgctttgggtcttcctgagaatcatcaacaagtcacctgctgtttaactttattgtccaaaattcagttggaatctcttcacagaaagacaatgaaaattgagtctgcaagtaaatcaaaaggcgtacatgttcttgtaacggatgcttcgtcagttcatcaacaactctgcaacagtagtattgaaggtgattccgagcagcagggtatatggtgtgaaagagatggatgtgtattcaaagccatcttctgccccttgtgtggtacggacaacaattccattggtgtacaggtcctggcaacaaatgcatctaatcttcatctacttaacaaggtaggcctttcataaaaatgcctacttaggcatctctttactaaaagttgctttctgttataagcatgctgtagacccaatatttggttctgcattataaaaataaatgaataataaacatggaaataaaattgtttagcacatagttttgttcaaatatattttaccccttacaataatgaaagagaactatgtcataaatgagagcatacttctatcattgagaaggtgaggactctaagcaattaggagcaatagagctatgggaaaatatgagctctttgaatttggtgcgattttcccagctaattgtttactcggtggtacgattcttccaggtgttgctttatgttgatcagttagaaattaaaacctttgaagcatccatgcacaaggattcaaatgccaaggtaaattatttgtatggtggttcgtgaatttatggaggcatgaggaatgatttcatgattaaatttttcatataattaattttgtaggatgcgttgcccattagaggctcgagcatagataaaggtgcaactcagaactcttctttcgacaaatttgcatatattcccgactcatcagaaggatggagaaccaccagatccaaggttagaagttaattaaacatgtatataaaactcctttgtagagtggtacagtactgtagtgctgttgtttgtttcattcatgtaattagtttttgacacgcgaagtgttttggtgcagttaaaacttccaaagaaaaggacacctgctaatgcagatgaggatgattcatgatagctttagcttaaatgtgtgcaaatgtaacaatttgtaatgtatatatatagagagaaagagagcatgtggctcgattggcaagatattggctttattgcatccttgcttagtcagcaagcaactgttctctgtttcattcttgcttactagttagcaatcagcaccattattttgatggtgtttgtacattaataatctaataaatgaatttcagttattgtgtagaaattgaatgatcaacactgttcattaattttataagaaaagcaagatatactatttcctttttatattatgtgtatatattcatatatattatattatagcacaactaaattaaggtggagtttggttataaaataaaaatggaataggaatgggaatagtaataagaatagaaatagatggaacgaaatttctattcttttgtttggtaaagactatgaaattaataattgaataagaattgtgatgtttggtatattatgaaatgaaatgaaaattttattattttgaccaaaatattttgcactcttttaaaataatttttgttttataaaattactataaatatttaagtatcaatataaatgttattcatataatttaatcatcacacattgtctat

SEQ ID NO: 379353 - DNA, 4339 bp, Cannabis indica
aataataataataataggatatgcttgtcaatgggaagtatgagacacaaagtatgaataagatgtcacacatgaaggttcaaaagtatacctcataccagatgcaggttgcaataataggtatgaaaacaatgaaaacctgccatgccacctgacacattacgataataattcccaaaagttggatcattgagaaagcaaatgatgcaacttgatatgcaatgttcagatccaccgcactttggtctgtcgaagcctaaccaaaaaaaaaatgagatttttaagccccatagctgagatggagcgaagcaataaaaatggaaacaagaagcattatgcctcaccctattcagaattcttccacttggagtagaatcaaagaacgacataggagcacgaaaaatgcattcatgcattttattgaagagtaatgtggctgtcttatatgaggttgttgccaaaagtgtagatctcataagaacacataaagagcttccaatggctaatataacatatacaactataagtgtggtgttatcaacaagaggcttttcatctgccgaagcaggacttgcccatgccatccaatagttgcttccgatttgaaggccctgaaataaaacttgtgcaagcagtataagaggcacaagagctcctccatatgctgttgtgatgtatttccaataaactgaaaaaccaacttgtcccttctccctttcttcctcttgaacaagctgccctttcggttcattgctttttggttcttctttcttcattaactcacttgcaccgcctgatttttcatcactctcgatgatacattctttttcttctttaactccctctttggcattaagtgctgacaatgcttccttgtgtgctcccacaagttccataaaatctgtcccggaattgagaatgtcaatgtacttaccagcttgcgtaatccttccatctttcatgacctattgagtacgaaaaagaaaacatatgaattttctatgctaatatgatatcacaaagaaatgtccatgcccacaactcacttaccagtataagatcagcagcaggtaagaattcaacttgatgagtaacataaacaattgttttcgaactcaacatacccaatatgcattcctgttaacaaagatgtaaaatactcaatttgttaatattgaaagaagtgtttgtataacaaaaatgtaaaaaacaaatcacatatctagattaccctgaagagatgagagcctgtgtgagcatccacagcactgaaaggatcatcaaacaaatagatatcagcatcttggtataaggctcgtgcaatttgtatcctctgcttttgtccaccgctcaaattgattcctctctccccaatgactgtctgatcaccaaatgaaaggatttcaaggtccttcttcaaggaacatgcttcaagaaccatgtcatacctttctctatccatctctttaccaaacaaaatattctcttctatcttgccactctgaatccatggtgactgggagacataagctgttgtcccacacaacttaagggttcctgagatttttggaatttctcctaggatgcatgaaagcaagcttgacttgcccgagccaacagtgccacaaatagcaactctcataccatggaacactttgaaattaatatctttcactgtaggattttgggaagttatatcccaagagaagttaccatcaactatttcaatggctgcatcagaagtaccccttggaagcctttcaataacatcagcctgcaagtcatcaagacgaagaaaagctgatattctatcaatagaaacctttgtttgtgctatcattgaaatcgtgtctggaagactgtagataggttcttgaagaatcctgaatgttgcaagtgcagacaagattttcccagaatcaagagggacccctaaaaggatgcaagtaccgaaagtgatcaccgaaacaaatgtcggggcgccccagaagacaaatgaggtcatagctgaagtgtaaagatattttctcaagcatcctgcctcagatttcctaagctccacaatcttggatagaaacttcatctcccacccttgtaacttgagaatcctcatgttcctcaatacctcagacgttgccttcattctagtatcttttgatgtcatcaatttttgttgataattctcttgcaatttccccaaaggaatgtttgccaacataactagaatagtggcaacaaaggtggagattgcagcaagaccaagatttttatacaaaatcaccaaggccaatccaacttgtataatgaccatccatggatcatgtatgtaccagctgaaatcaccaattctttcagcatcaacagtcatgaaattgatgatctccccgctggtgtggccctgctttgactgacatgaaagagtcaaacccttgttatagatcatagcaacaagtgctgctcggatccttactccaattagctgtgccctaaaaaaccagtgcctctgcgagaggcactctacaatcttagcaacaaaaaatgcagacaccaaaataattccctcatttttgaactcccttctcccattaaggtattgaacaaatgtgtcaataagatatggaccaacataagaagccagtgaatacagaagcacaaatagtgctgtcaaaagaatctctccccaagctgtgaacatcaaagctgtcactaacttaagtgaggtaactctattaattgacccgcaatctgactcaatcctattccttaaagttggaaaactcccaactacactatctctagtatcaagctgaggaatatcctcaaggtctatggctttcttattgccagctgaaattagaggagctatccaagagaaagtaagaagactgaaaagcccagcttcagaataaggagttacagttgcatctcctatggagttatttgacactacaccattaccattcaaaaggggttcttcaagagtggtatcatcaccttctctctttccccagaaccccacatatatgaaaaacagaccagaaataacagacacaacatcagaaacaaaggactgaacagctacggaaacttgttttttgtatagaacagagtctacaataaggcaatagcaagaaacgaataagaagaaaacccaccaaactctcaataaaaatggaaaccttgactgaccagaagtagaaaatttagtgtgcaagtaaacagagactacaccccaagcaagtgtcctcatggctaaatccaaaagggtcactaagttttcatcagaccaaccattcctatacctgtagaagtagctcaataaacacaacactagattaaatgcagaaagacccaaacaaaccattaaagttggtttataacacaaacatctggctttcttaaccctctcttcccgaagactccccttgaatttctggctaatccatgacgcaaacaacaagaataacaaaacaaaatgcaatgaacccgaaaacccacgaaggaaaatgggtttcatgagaaaattagcacttgggtacatttttaatgtatagaagttagagaaaaatgaggacatgacctctgttgatgaactcaaaaactccatggtctttggagcttctggctttgagtgaagatatttcgtttctaatatggaatatatatatatatatatatatatatatataaatggacgaaggcaaggaatacgtggtgagcaaggttcacatggcggagtatcttaatttaataggttggctgcaactagggaggagatgatggcgacttaccatgggagaagctgagaaatataatatatatttcctagaggaatttctacactccattattaaaaaagggagttatatttgcaccccttaaacttataaatacaccccattattaaaaaaaatataaacttaaataatttttaaaaattactcttaatatttttttaaaaatttttcttcacattattttatgttaattttaatacttattttgattttattttcataattttttctaactcatgtatatttttttattttttcttaaaaaatttcacataattttttattttaatttttttatcataatatttaaaatacactttatttttgtttgataggtatattttttaagaatatgaattgaaagaaaaaagttaaaaaaaattagtacaattaaaaatataaattttatataaaataaaaattatcaaaatggggtgcctttagaactttttggggtgtaaataaaatttcccttaaaaaaaattaaacttaaatattttttaaaagttacttttaatatttttttaaaaaaatttcttcac

SEQ ID NO: 379354 - DNA, 7761 bp, Cannabis indica
tttcttttttctttcctttttaaaatttcttgtttcatattttgcagataatgataatttttatgtccaagatttaaaaagagctgttagagaagctgctttgtcaactcaatctttgaattcagaaacaccaggggacaatctttcagaagagagttctgagcacttctttttacctctatcatcatctggtttctcacgtattagccctgaattaaaaggaccttcaatgagaagtcagacaaccaggagcaaaaggttgtttgcaactcaaaaagattcttccgtgcttgaaaatcgtgtctctgatgcacataccgaaagcaaatatgacgagttttctgacgttttaaatggtttggattcacttcgtgattttgaccaagtaaatggatttttttcggttgctggctcaaatggtactgcttctgatggacaaagatcattctatgacattgatgaagctcacgatcaggtcttttcacctcctctgctaatggactcatcactgctagcagatacttatgaggacttacttggtatgttgctttggccacaacgtttatctgttacgttaactatatatatattgttggtgagtgagtttattttaggaatttatttatctttgtgggtaagcttattagattaattgtaattacaaagcgagcatgacaagaaagcttggaatataacataatcgtagatattacttccagtgtcttctgacagttctgttaattgttttgcagccccactctcagaaaccgaaacagccttgatggaacattgagataatattctttttgagcaaacttgcttaaggtttgttgatgagatgattttggttacctacatcatagtattggtccccattgctcggaatattctcttgttactcgtgtttgtcagctgacatggtcctgccattggtttacgccttttctgatccttgttgacatatgtaaattttgtttctcatgcttgcatggttggtatgagtaaatatgaagcaactagaagtgagtttacacattcttcatagattttcggtaaacctgctagaatatgcagaaaattcaaactccaaccagcaccggcagccaagcacaggttatgcagagaattcctctggatatgtttgtaggtgttataagttaaaaagaatacgatgattgtaatttcttagctctgattggtatcaggttagcaaatccggtttccctagctccttctttgtttctatgaactgcccaatttgattattggactgattttcatattatatatcccataaattgtgtcttacattacatttacatatgcatcatctgaactgaaatttctttttgctcatatggagagtaattagaatattgttgatctgcaaggttgaattatttgtatttattgaaattcctttgttttttttttctttggtgtatttgtcttcccaatcaattgatcaactcgcaaagtttgactccttacccaagtcaatttttcgtgtctttcactacacatgataatgagagcttaagtgatcaatctgtcacagttttgttacctataattgagggaaaatgaaatagaaccatttattgaacaaatggtcaatttaacttttcaattcagattggttgaaattattcaaagtcagattgttgtggcagaaagaatatagccatgaccaccctctacaatttcctctactaagttttaattgaagtgtttattttctttttgacccacaattgtcaaaactttagagtgactttcagaatgttttgtaatagttccattctgaactttcttttttctttttctttttctggtaggaggatttgtaagagtcaacaagatttaagttgctagtaattggtaggttaaatttgtcttagtttaggaacctggttgtactacacttgtttgtgtgaaagttcgttcgtacttatgatctttcttttttagttgaatatgttgttaggattttctcttttttttactgtaaacaagtgggtaaattatttgttgattttactcattgaaggctttatttttatgtaatgtattatatccgattacctatatttgtaagaacatttttgtgcttttaatataataaaatttccttttttatgagcaaattatatttgtagacattttcaatgtcttccacatctgcacagtttgactttctttgatgattaatcatttgattaaaacagataatatatataattaactacccaatataaattaaaacagtggacctatgagaagaaaacgtaaaacactagtaaaactttatttagagaaaccccaattggaaatttatttaataatcccataaactcattatgaatttttatagtatttttcttggggtaattgtttttgaaaaaaaaaaagtgttttgtagaagaagcatcattttggcaactgttcttgccaaaaaaaaattaaaattgattgcattatcatcattattatcattggattttcatcactaatttagtgctttagtaataatattctagttttaacaaaattgttgtgtcagatacagttaatccaatcttatgaagcttatcaaaaagtaactgcttaagtaaaaaacaattttaattatactactgtcaattaatacaaattaataattatagtctaaaaaaagaaatgaaacagtgtgcaaaacacgcgcaacatgaaagcgtcatgagtttcgaacttcatactctttcagcgcaaaattacagagaaagagaacccctttcctcggtaacaaaactaatcccactctcagtcaatgagcgcgtgtaatcaccacataatttgtcatcacatttccaattttaaccttttccctttaatccctacaaatacatacaaaagcgagtgaaatatggtgagatgaggggccaaattgaaattaatcaaatcatgtaagggtaatttcgtcatttacaaaaaaggaacggtttttgaggggctggaaattgaaatgggtgagagagagaagaaaagttaagaagaagaaagaagaagaggagggcatatatgaaaataaattattaaaaaaattttggggttacaaattcacaaaaagaataaatttacaatacacaatcatcaacaacagctacggtttgctgttcttcaacacccaccttttctttctaattttatttaatttaattttcattcttcttcttcttctccttccttggctacttgggtcgattcaatctctctctcttccttagaagaaggagccaagattgtatttttatgtaagttatatttttatttttagcatttctttttcttaattgagccaatctatttatttcgctatgtttatttgttccaaaatttgaacttgatattgtgtggtggttgttaatatttgtttgcatgtaattgttggtggagaatgctatctgggttttctagatcgtgcccagatctttttgtcttttgatccagtcgaatagcttattaatatttatttagcagaaaaaagtggagagagcaagagaaaaggggggaggaaaaattattgtggaactcaaacttgtaaagatttatcttttaaaatgaatttgattttttttttggtgggtctaatttgatttgggatgtttttgttcaactgggttttgaaatataagtcaaaatgtcgagttttttttttcttctttttgaaaaaggtacaatactattgtttctttttgctttgtgggttgattttgttgtagttaattgattttagtagctagagataaggtttttcatttaagttttagcgtaatatgatttttgtatggtgtactttttatcgtttaaagtgggtttgattgatgtctcttttctcagatttcccatcttgggctgcgacatttgtttcttcatctggtaaaggtggattgggaagaagataagagatttgaagggtggcgatttttatgtaatcttaagctggtttgagctttttgtatttaatgcttttagatttttcttcatcattaatgctttgaaagagtttgataagagttggattatcaacacaagaaggagcttttgattttcaattttcagttatgatcaaacaatttcttaacaaacttcctaagaagccttctaagtcttctgaaaatcgtgaaggaggaggaacttctacctcttcctcgaatgctaaccacagttcgaaaagtggtgagttagctagcaatagacatgggaatccgggtagcacacctctttcaggccccaattctgctcctaattttggagtcagtttcgggaataggcttaaccaggctgtgaattcaaggcttaatggaaattcactggtctcttcatatgaggcattgcctagttttagagatgttccgaattcggagaagcagaacttgttcatcaaaaagctaaatatgtgttgtgttgtatttgacttcactgacccaacaaagaacctgaaagaaaaggatattaagcgacagacattggtagagcttgtggattatgttgcatctgctaatggaaaattctctgaaactgttttgcaagagattgtaaaaatggtgtctgcaaacttgtttagagtactcacttctccgccccgcgagaacaaagtcctagaagcctttgatgtagaggatgaggagccctcaatggacccggcatggccacaccttcaagttgtgtatgaattctttctaaggtttgtggcatcaggtgagacagatgcaaaattggcaaagaggtacattgaccactcctttgttctcaggttgttagaccttttcgattcagaagaccccagggagagggattacttgaaaacagttcttcaccgtatttatggaaaattcatggtgcaccggcccttcatcaggaaatcaattaataatatcttctatcgatttatttttgagactgagaagcataatgggattgctgaactattggagattttaggaagtatcattaatggatttgctctgccattgaaagaagaacataagctttttcttgttagagcacttattccacttcataagccaaaatgtatacccatgtaccaccagcagttgtcttattgtatcacacaatttgtggagaaagattgcaaacttgctgatacaattattcggggtttgctaaaatattggcctgtaacaaatagttctaaggaggtcatgttcttaggtgagctggaggaagttttagaagcaactcagcctgcggaatttcagcgctgtatggtgcccttgtttcgccagatttctcgttgcttgagcagttcacactttcaggtgggtaattttactggtttcctttgcttttcactacttgctaatttcctcttttcttttgttattgtgatgatttctgaaattcagttgaaatcctttcaaccttgacaattcaatttaataggaggttcttttattcatttagtttctggtgtcaaccacaatataaaattagacaatctttgaatttgaattttgttaaagatatcttgtactgggcaccaagatatcatataactcaataaataaactaatttataggagttttcatcaacagtttgttaccaaaagtcacaaaagaaaatatatttcattgggtattttctctgtgttgggctagagtttccccaaagactaaaatcagattccatgtatcaattagattcaggtgtttgttctaagttctctgggaagcttagttctgttatgtctcagatgctgagttgtgtttttttaaattgggtggaaattccatttgtttgaatgaaattgtttgaattagatcatttgaataactgtttgagagactaggtttaaagaaacagatgatttcccagatctatagtcaaatctatatgcatcttttagtttatttacctgttgtgctcatccagaattgaaacccctatgtgaatctttatttgagaaaaactaaaaattaaaagtggaacaattgggtagcatttgtgttggaagttgaatacactggaactattaggtggcgattggttcagacttcagtgtaatagattgggaatagtaattgattgtaataggaatagtattgagaatgatattagtattcataataatgattaatggtgattacattgtaaatctataacaaagttttcaaaaccaaacaatggaattgtaatagtaatttgttacgattactattaagccaaaccgaacttgccagttcgtctcctcttgcagaaggtgtacttaatgattaggctgagggcctagcacttttattccttttcaaacttgaagataatgggactttatttcctaattttgtaggtggcagagagagctttgtttttatggaacaatgatcacattgagaatctaattaaacagaaccgcaaagttatactgccaattatattccctgcgttagagagaaatacaagaaaccattggaaccaagctgtacagagcctgacactaaatgttcggaagatattttctgatgttgaccccgaactttttgaggagtgcttgcttaagtttcaggaagatgaagcacattcaaaggaaatgagttcaaaacgcgaggctacatggaaacgcttagaagagattgcagcgaagaaagccactagtaatgaaccggttctagtttcctccaaaatagttcgtgcaccttctagctagctagttgaagatggccatctaacagcggtttcagtattgctaatggtatgatggcatataaccatataatttatgatacacgagatggagcctagttcatattatttttttcttggttgctcaccttccgggtttttttgtatcatttcaggtattcaagtcatggtttaaaggatgcccactgtccgggcactcgcagccccattttgatcatgtactagattgtatatatatttgattggttggagtagaacaaatgggtgttgcacaggccgtcgtctaatcagagatatggctagtgtaattgatccgtttgccatccatgtttctaaaggtaacagataagattcgagttttgacatgatgatggtggttacattttgaatttggtttaatggaagtatgctcaatcttgatttacgtgtatgtatcatcaaactttgttttcttttgtgaatcatttctataaagaattccaggggaagcgagattagaaatatgccgaatatggcataaactgcttattgtttcatgatttcaaattcttgatcttctgcaatataatagattattaagttatgcaaataagctaccataaattcctttaatatgttaaagcttatcaaagtttcttctcatgagctttaatagcattttggggttactatggattttagtacttgaattgttgatttgagattttttatctttgctatatagcatttatgttgtgaacaattcccatcaagcatttcatctgtcatgaataggggatttggttttcttcaaaagtattgaaatatggggtccccatcttcatagccataatatcatatattactatatatttattatgtaaaacaaggctttccatcaatgacagcatcttggtgcttgctcattttgaagttaagctcaagtgtatgcactatgcatttagagcatctccaaagagattgcacaatgtatatatgcagtgggtttcttctccaaggacacaccatattgcactgcattttgaggtgacatatacggcatttatatatatatatat

SEQ ID NO: 379355 - DNA, 1496 bp, Cannabis indica
agagagagagagagacttatgggataagggtttgtgtaagtcttggatgacgacgatcttcttggttgatgtacaccaacagccacgcttgattcagagacacaaccaatagaaaatggaagaagtacaagtctttccattctctctctcatttttgttctttctaagatatataatcaaagagaatgaaagagaaagagccagatcagaagatgatcagttaggctcagacagaaagagaaaagaaagaagaaaaatatatggtgttttggttgatgaaacgcaaactcagaagtgggaattggtttgttataatatataaggtacataactcatatatggctttgatatcaagttacaataattttacgtataaaaagtcaagctacaaacacaagctagttaggtggaagatagagataacacaaaaacacaactaactaaagggtatgttcggacgtagaatatattatatatatatacatgtctttgtataatgaagtttaacctaacatgcaatcatcaaattccaaacccacgtgtctacattgaacgtacataaaatgacataaagaatataatataagtatgataattagttaataaaaatccactgctactttgagttcacttaagttttctctatacggtggggtcactacttcacttacttctcttgtatagaaagccaatatctcttaatttaaaattttgttgttttttgtttacttagtttgaactcaacacacgaacaacattgaagaagtatatgctaagctatcttgaaatattttgttgggtgttttaaaattactttgagctctcatggcattgtagactgaattgggtatttcttcaattcaaagaaggagaggatatgatgaggatgatgacttgatgagttgaaggaatagaaaatgattgtacaattatatattattattattttgttgaggcagctatatagcttacattacattacaggtagaataatagtacccactgccactagctacgaatattatttatttataacccccaaaacacataaattaaacggataataatattggtaccccactaccttatattctcttcatatgttcatgtgttattagaacaaatccccaacaacctccaaaaaaaaaattagtaataaaaataaaaataaaaaattatgtggttaattcataataagtgacttaataataattaggggttttttcataaatatggaaaaatgtagtagagtttatttttaggggttttttatttttacacttcaaaacaattttgttagtatttttacggaattttacatagaaactcttattgcaactaatggagcaatctaaatcgcaacaaaaatctgtatagaaacccacatataaaccaccggagaaaccaccttagaaacccaaaccgtaaatttgaaaaaaaaaataaaaataatgtatgaggtaatttccctacttttatatggcataaataaataa

SEQ ID NO: 379356 - DNA, 3970 bp, Cannabis indica
aaaaaaaatagacaaaattaactaggggcgatgtacttttaattttatatacaaaaaatagagaatctcacatgtttattttctcttttttgtttttttttttttttagtaagtaaaagacgaaagcaatatatattaatgatgaaaacagttagacctcgcggtcattacataataggtcgaccggtattgaggaaaccggaataacaccaaatgtcttgtgggtgaacgcccacttggccacgttatgggccgcaaaattacaggttagacctctcacatgttattttcatatacaccaattttgctcttaatttatgaaattaccatgtctctcttcctttctaaaaaaaaaaaaaaaaaaatatgccactttagatagaaaatgcctaagaaactacaaatgatgtgtattgctattagcactttttaacaaaagatttacccaattatgtgttataatttgtgccaaatttagtataataaatgctattttttggaattcaccatcgaaatgcctagctttcttctttctctggtttagatactaatatcgagtctagattggtggttcgtcaaaggaagaaagaggcaaattttgtgttgtttgttgatgcttcttggtatcacgggaacgggagtattactgcagttgctcttaatcggtcggacaattcttgagcttttaaagtctaaaatctgaaactggctctgctttggaagcagaatctcgtacggttttgcttgctcttttgtgagcaaaatagactaattggaatgacattcatattctctctgattaccaagtcttaatgactgctttgtctatgggtctagccccagattggtcctattaaattttttgctggaaaatttagatttgtgttctagctttagtgtctgtaattttttctttattaatcgttcatttaactcagttgtgaatgcattagcaaaaaaagttagagtttttagcatttcggctggtctgtatcaactattttctctagtttaatgaactttaagttctttaaaaaaatatatattttttaattacacttttatcattaatcattaataacatactttaatacatatattttattcataatattgtcattaatattttttaaaaaatatttaatatattgatagtcattaatgacattttgctttttagacaaattacttcttaaattgttatttctaattagagcacaattaaaaatgttgtgttatatttcaaaaaaaaaaaaaatgttgtgttaaatataattgtttattgagattctcagaaactgattaaaattaaagttaagaagttaaagaaaataataaagagtagagatgaagatttttacgtggttcgagtattaatgaatcctaatccacgagtcaattgtattagactaagcaaccttaatatattacaatgggtttttacaagcttatgaactctagcttattgctataatatttacacaataattttcccccacctcttgcttgagggtatacaatagtatttataggctaggattcaagtttaggtatatccatgacacgctagggtttgcgtgtaaacttggcccactaatgggataaatacatgaaatatgttgactatggcccataaattgaggtcatcccatgcggcagagaccattcgtacgcttggggaccacgtgatcttcgacaaatgtcatgcattcactgttttttatgtattatagtgtcaaaatcgtgccattagacaaaagagaagtttatttttggtggtacacgcattcttatggtctaacataggagacaatcttctatttctatgggatttggtgtcagagggttgtcatgtcgtcctatactgggtctatgagttgcctcttgggatactctttctatatgcgtcccaaatgcttattcggagggcctcagatgggcttagatccatttttccgtataggttggacctgtcctcttggtagggtttctaaccaggccctaattgatatatttttgaattgggaatgctatgtgtcccccttccaaaaatgtggatagagtttacccccaagcttctgagagttgcaaaggcttgcagtcttctcttcggattgcatggacatgtggaaaatttgaaaaaggagcgatcttttcgacatttgtatcccttggttgtggatagccagggacctttggattacagctaatggaacatatgtggtactaacttcttagtttgtgaacttcatgcgcattggaaaagtgtgtgaggcttagggtggcgtgttgacaactaaatcatgttagcacttgtaccaaggtgaacgttatgatttgaaaatgcctcagtttcaatgtcacatattaaatgttgacccttccgtttccccgatcattagatcacttttgtgttttcctcaaacttaacctttactcgccctcgagtaaagaccaagttaaactgataaaaacaaacacaacaacgaacaagctaagccaacattaccatttgcactgcttttccattactcatgatatctcaattgcaacattaactagaatttcaatgtaatcactttaaaaaattaaccttaatgcttaaattaaggaaattaacaatataattcacaaacgatcacaataattgtattccaccgtatatgctcaactcaaaccaaacagacccacaaaccaattttaaatatacttccatcatttaaccttctccacttatatcaaatcaaaaggactttcatagattataatattaggcttatgcaagggtagatgaaataatcatttaggctcagaatttctataagcatataaactttacaaatcaataacaaaccaaataatgcatccaagtaatacaaatttatgttttcgaaaaacacatctagaaattcttgaaccactttgatattttctggtcgaactaatccaggccgattggtgtctaacaccacttctagaaaccctaaacaaccttcttgtatcaaatctttggctttcaatactgagatcactggaattcaggatccctgaactaatctcaaaacacaaatggttcctcgccctaaggttggaagatcaccatcttccgcctatagtaatactagtagcatacttggacatgaaatctattctaagtataatgtcaaaatccactaaacccaattccactaaatcaacactcaactctctaccttcaattctaatcggcacagacctaacccaccttttggatataattaattattcgtcaggcattagggttccaaatcctttatcataattatcacatggcctacccaatttaccaattattctgactgccacatacgaatgagtggccccagagtcaaacaaaatagaatagtaaagttattaactgaaagctgacctgtaacaactgaagggctagcttctgcatcaatctgattaagagcaaacacccttgctggagcgggttttgcttcagtcttctgctcttctttctttaactgtgggcaatctctcttgtaatgttcagttactctgcactggaaacatccttggcctatacactcacttcaatgatgtttttttttgcaattagggcagtctaagtaagtgtactagttctcaggaccattgtgacagttaccacgaccttggttcccttggaaccttctgctctgactcgaaccaccgaacctagatggaacttttctcttatgatcagtggttgagtcactaccacccctaccataaccaaaggtaggagtattggctccagttcctcgggactcctgaatacattcagatgcgccttcagctcgcagtgcttttcccaccatatctccataagtggtggtatcatccgttgtgatcatcagatcatgcttaatctttggatttagcccatctagatatttttctttcttactaaaatcagttggcactattgttggaaattatttta

SEQ ID NO: 379357 - DNA, 1056 bp, Cannabis indica
agatttagtttagctgagtttgcagttgtgtctggtttactgtgcgttggtgattctgatttgagtaagtatacacacagagaaaatgttttacttttttttgtatatttttagggtttgggggtggtgatgctgctaaagctattggttcagattcatatgtagatggtggaaagaatgttgaagaaggtggagagtgtggagattttgaaaataatgataatattgaagaaaaagcagtggacgtagatgcaagtgggaaggatgttgaggatgttgctagtaagagaaagttgtttgatagtcaaggaactaaggatagtattactgtgtctgctttggagataataaataaaaaaattgatgcttatgagggaagcattaaaaatgtttatctaattttgtttttgtttattgtatacttggttttttttatgttatattttgttttcaaatttttaggttgatttataattttttttattattttaagacaagtttttgaacaaatttgaggcaacaacacctgatggagtatctgcttttggtttggagaaggtttgtttacttttgttatttttgtatgtatttttagtgttggttttagtttactattttaaatatatgttttacttttttacatgatatgaaaattgaaaatttaaaagcaaagattcctgaagttgttggtggagacaagaaacatggttctcaagaaagtttttctgtgtctaccatgaagattactaataatcaaatagtttcttatgaagacaatttgaaaagggtttgtttttttttttttaagtttgatttaatatttttttaattttgttattgcacttgtttttaatgttaggaaaagtccataaaattggaggtaacaactcctacagttgttaagagagagaggaaacctggatctgtatacaatagtccctataccacagagtttagttcaggtattattggtacaccaaaaggtggacaacctggatcatgtgctattagctttggattttttaacatgattgatgatgtgcaagctaaatcttt

SEQ ID NO: 379358 - DNA, 4050 bp, Cannabis indica
aaaccattcatatggagtaaccataagttttcatatgaacctgttcagggaatccaccctttcggtcaaacttttctattctccagtgactctacatccatcaaagccttgatcttctcaagattttcctctacacccatttcattaaccattaaacctaggaacatttcgaatgataccccaaatacacactttagttgattcaacttcattcaatattttcaaagtgtggcaaacatctcgtcaaggtcattgatcaagtcttctgtcttcttattctttataaaaatgttgtcgatgtagacctccatgttgtggctaatttggttggaaaacatcttgttgataagcctttagtatgtttcccacacattttttaggccaaatggaatgaccggatagtagtatagtcctctatcactgataaatgaggcgtgctcttcattcacagagttcatgggtatctggttgtccctgagtatgcatcaatgaaacaaagtagctcgtgccctattgtggcatcaacaagctgacctatgcatgacaacaggaagctatcctttaggcaagccttgttcaaatgattgaaatcaatacaaaatctccacttcacattagatttggggactaatacggggttggacaccataggaccaggtagaaagcttctcgaatgaacttgatcatgtcaagctgatccacctctccttttagggccgcatactttttagagtcttcagatctatgctactgcctcactagttttaccttagggtctatattgagatgatggcccactatggatgggtatataccttccttgtctttgtgcccacaagcaaacacatctacatttcgttccaagaacttcttcaactcacccttaagggcattgaggagccctttcttgatcttgaggagaatgagtggcttatctaaaattatgatatcttctaattctttaattgtttctacatgcacattctcgcagattttggggtccaactctaccatggtttctctgattcaattgtgccctccatgtatggtcattgtcatgggttctcaaggttttgttacaatttgaagcaccatgttgtagcattctttggattctttctattcaccctttaaggtggaaactcctttgggagtggggaatttcatggccaaataatatacggaggctatcgggcaacccactaataagaatgtggccatcactgtggaatgtcgaggtcactctccaatgttgagggccaactctattttcccaactggttgaattgagtctccaataaatctgtatattacagttgcacatggtttcaagtatttaagctctagcaccatcttcttgagggctatgaagtacaagatatccatggaacttccattttcaaccaaggttcggtgcacccttatgttggccatctagactgtgagcatcaatggatcattatggcggaaatgcacaccccttgcatcttcctccatgaaagtgtgtgagtctttttctcccatgaagctatttggtagccttttttctaagcttaagacttggggttcacgccttgcctcttaggcatacttgtctctcccattgtgagtatcacctcctatgtcaggccctccaataatggttttgatgtctctcaacacttcagaagcctcatcgagtacttctcagtggtgccattcgtctgttctctaattttctcttctatacctcccaagtacccacattgtatcaactcttcgatcccaatcttgagatgtttgtattcctccatgagatgcccaatatccttgtggaatcagtaatacttgtttgggtttctcttggctctttccttccatatgggtggtggtctcttgaagggcactcgacactcgtttgtcaagaatatgtgctcccttgagtgagtcaactccatgtaatgggtgtattctcggtgttgcgactccacttctctcttgaccttcttgtttcgaccattccctttatgtttgaattccattttcttttgtggctcatcagccggaattttcttgggttggctacttcttcccacacctaggttctcatgcccatcctccacttggatatacctatgggatctttcatagaaattctccaaatcatctaattctctcttgagcatattgttccatagcttgctttttggcatgactttggcggctatggccatcttatgtttatctatggacaatcttccaactttggccacttcagcattgaagcactgaatgtagcttttccagctcctagtttccctcagtttgatgttggccaaactcgtccttcggacaatgtaatctcggaaggtgtggtattaggctaagaattcatcagtgaattgcttccatgaggtaattgatccaggagccaaccttttaaaccacttgtattttgtgcctctaagtgttacaacaaatcattgacatattgcattgcttgtaaccctcttcatcttcatgatttcattgaaggcgtccaaatggtattttggatcagtaattccctcgtagggcagtaggttaggctctttaaatttttgaggtagttgttcaaattggatttctctgcagaaaggtaattcatcaccaaaatcatcttcatcgaaattacactcctcagacggggccaatgctatccttcgtcggaggctctcgatctccttgtcaagttcttgcctccttttgttcaacttttttgaaaggtttggtggcatgtgccttggaccctccttattgaaaggtgttatccgtgatggcactttcttctcgacaatggcctattgatttagtttctccctcaaatcaccatgaatcgcctataactcagatttgttaggtcgctatgagggttctagttcctttcgaaattgagcttttagtggtgaggattctagcatgttacttgttaaatatttgcacattccttcctcccccaacttacttttgactttctttctaacttttggctctctttgcttgaccaaaagcgccatagaccgtccttttaggagttcatccatcactttttgcatgtttgtgacgatttcttccaaccataagttgttcattctcagctcttttatctattgattgtgaatacaactttgggagcttgaacttactaaataaactcatttctcttttcccgatctatggtgcaaggttccaggatcttttggtgtcagtggcaaagggtcccttataggctagaaaactctttacctttgtgacccatttcccttattaagtgtgatggaagcggtctccccatcgtgctatttgtccatcaaaacttcctcacaatggctttcttcttgttttgcttgagacctttgcccatttgcaccttcttttcttgcttgagacctatgaccgttcacatcctcttctcttgcttgaggcatgtgactgttcacaccctcttcttttgcttgaggtatgtgaccgttcacaccctcttctcttgcttgaggcttacgactgttcacaccctcttttccagtgacaggtcgttgtgggtctcaccttgaagtaatcagctgagttctgtcaaggtaaacctccatatcttcgagatgatgagagtatctacgcattttgcaatgattgtatataaggaaacaatgtagcattagcttgttgttcccacagacgatgccaaactattgacagtaaaaactcgttagctaacttgtcggccaaaaaatcaaaatctaacttcaaaacttagaaataagatgaagatgaaatgggaattaaaaaaatgagatttcagactagagagaaaacattctttctattgctttcaatgcgtcaattacaagactaattttccaaccccttctcacatttgagaaaggagtatttacaggctctaattgcctttgatgcattggtgtccttaagaaaattgtgacattgatgatctacaaacactactacaaaaagtataattttcgtcggtttttaagtgtcatttaaagaatttgcgtcggttttttaaaccga

SEQ ID NO: 379359 - DNA, 910 bp, Cannabis indica
tatatatatatatataaagtatacatatataaattcatcttttaagactgaaatcaaaaactgaaacagaacatatttggaaactcgccagaaatccaaagcagcaagagttaaaaccatgaatggcggcaaaaacaaagaacaaaaaatcaacttttttctacccaaagaagcgccaggctctcatatagagggaataaaagaaacaacagaaactaaagcgctctatttccttccttgaaaaacagaggttctaaacttatgtcaatgacataaaagattcctaaattataaagccattaaaactcagttctgaaaagaagaacccaaagaaaagatttagcaaaagagagagcttacgaagcagtcgtcgtcgattgtgaagatgtacttcttcttggaaaccatataaccaaaacagcgacaagcagaatccttgaaagaaatgcaagaggctttgggaccaagaatcctgttaatatcgtttcggttgtagagctcgtagtcgaaaccctcggggacattaatgatcttcgatggatcaccgtcttggacgatgatcaagtggtagggctggaaaaatggtcgccacatctccaagaaatcgaggttccggatcgtggggatgacgatgtccaactcatctttcaagatcggagtaggcttggccgaagaaactgccgccattgctgaaggcagagaaaagagatacagagacaatagtgaaagagagaaagtgaatgactgaaatttgtaattgaaagttggaatttgtcttttttttataataatttacatgagtacacccccaaattttaaatacatttttattctctagtaaaattataaatggagagtatttttttttttctacctctgcatcttattattattaaaaaaaataaaattt

SEQ ID NO: 379360 - DNA, 3078 bp, Cannabis indica
ttttttttttttttgaagaatttgagaaataagaaagccattaaattttaaaggtgagattgacttctaagattattagaaccatttgattgttttttgaagaatgagaacaaattgtaaaacataggttgtgcttgaattttgccccacaaaagaggaagctcaaaacaattgtggggacataattggaataaaaaataaataatattataagtccaatcttagcccatttgattttcactctttgccttttcattttcaattttttggaccattttttatttatgattattcttatctcaaacttatttttactattgtatttcacaattgataagtatgtagttgtctcatataacatacctaaaaaagaaaaaagaaaagaggaaaaaaatcttgtaagtgaaggtctttgcttagtttggcaattagactattttttcttaaaaaaatttgtacttgtatcctcatagaatgtaattatatgagtaatgtaattgccaataaaatagttcatttttatcaaaaataataataataataataataataatatgacaataaaatcatgtgtattttgataagttacatatatatctattcacacacaaataatttattttggggctatatatgataattaaaaagattaacaataataataataattaaacattttggtacccttatcatgtaaaaattctcaacaaaatgataaggagataatgatacaaaactatgcttatattaatgttaattatttacttatttattttattttaaaaaatgtactcttagtgtcatcattgttctaagtttcacttagaatgtctcatctaattccaatatgtgtcttttaagtcttttcaaattaagtaaacaataaatattcccatttaataaaagaggtaaaaaaaagtgattacttccaactttagtcaattagaaaattttctaatgttcctttctctgtactcaaaggttgcaagtaaaaaaataatattttttgaagttttactctcttgtaaattaatacttaaatttaatttttgatggtaataatactttagttatatttttagaacttctgcaagtatctaaccgttaagtgtcaaattattattcacgtgttcttttttattggtatattgaaattaatttttaaataaaaaatgaaaatttaataatttggaccaatcaggaactaccacgtgactattgacttgacagttccagaaatataacttaagtattattaccgtaaaaaatttaacttaaatatttatttaccgccaaaagataaatttaaatatttataccattaattattctaaaaaaaaaaaatatccaaaagactttgtaattagtggtaaaacaaataagttgatattatctcttctcatatattatataccaacccaagttatatattattagaaaaaaaggcaaatgggttcttgaattgaaagaaagagacataaagacataaagggatagtgtggtagttataagagtggaccttgatagaaaatttgacagcctggtaaatggacccatctcaaatgataaattaaccattaccccacaaattcaataacaaataacaaacacattccatccatctttcttaatcacacactctcccttctcactccaaaggcccattttttagtttctcatttaattccatattttattattattattattatttggatagaatgaatgcttattcatccattggcatgattgttatagagaaatttttttgaaaaaaaaaatgcaaaatggtcattatattgttgttgatattattataattgagttacttgaatatgctattacatttaagacaaataattcaaagaattatattcttaatatatttaagaaacaatatgagtttgattattttagtcttgtctatgtgatatagttttattttgttttattattgattcttctttatttttcaatgactcatcatcaacttgttgttagtggttgggattaataagatctccgcaactcaagggattgttagtagtgcagttatttatattgcacaataattaagtgttcaagctataatgttgaataaacaagttgcaatagtttcgactgttatatcttatgagcggtaaatgaaactgaatataggtgttcttaagataaactgtgatgctgcaatctttttcatcgtattttattttttagtttctttgtcaaacgatctgtgaattaaacggctgattatttgactcatttttttaattttaatcttagtcgcgtctccaattaaaaaatattccgattgaattacatgctattattttaactaaaagctattaataaaattacatgctttattaaaataaactctatgctaaaacccttatagtataaaatataaatttctttagttagttctctcttttcttccttttctccattaccattttgcctttctatgatgttataattctctaaacctagtaaaagctatatttgatctctttctttcttagtaataaataatgatatgataataaaggtatattagtgactattagtgtttagcttactaaacaatattcaccaccactacattgaaaccaaaatgagtaaatatataataacaaaattaactcatatatattttttgataattaaaattatataggcatgctatttaaatttagtagtgaatgtttgacttattcttaattatgtttcatgtgatgcattgaatttgatgaattagtgtgaagataatcactaacattaagttggttcacccatttaagatattgtaagatttagttcttaattacaaactatattacttatatattttgttctttgcatctagcaaagcatgccctcttaatgtttatttctattgagattattattattattattattattattattattatttattagaacaatgaactttcattcaatataattagagtttaatatattacagaagaatggaggaaaatcatacatctaaactagcttgtcatttatcctaagttcacgaattgttaattcatatgcagtcatgtt

SEQ ID NO: 379361 - DNA, 1913 bp, Cannabis indica
tttgtgatattggtttttttccattttgtggggcttgccccttttcattgtatgttttgcacttttgttcttttttaattagtgtggttggttgctgtttagtcatcttctcgtgagatatgtgcagtttcgtttttgcctaagtgattaaacttcataccatttaacctgaaaggaatttcttctctataaaaaattatgattttatgcgaatacaaacaaatgaaatcgtaacataatgtgtgaatttctttttttttttgtaaataaacgtgcatagatggaattagacctcgcgttacagaggatattgttcagaatggaagaaacacacatacaaccataccaattgtgggtaaaagcccacttaaccacattatgggccataagttacaagttctgttaacaaaagaaaaattacaacaagcaaaaaatcaagagagtctagcatagttctcaatctcccaacagaactctaaatcgttgaaattgataaccaccctaaaatcactctctattataataaaatttcagctttcatctttagcaacttccaaagccaaacagcacgctaccgcttctccacaaagagcatcagagaactctaatctagctgtatgcaccccacacaccacttcaaggtgatttctagccacaactgcaatacacatgcttttccatcccccacttaatgtgtaattaagttaattataatatttttgtaagcaaaaaaaaggattaattgcaatattgatactaatgtgtgcctggtccggtaacaaatattttgtttgtttttttcaagatcaataaccttaaatcattgctattaggcaccagtggtgcctagcactttctcgacatgtcgcattgcgattggctagcgatactccctaaaagctattatattaaactatgtggaaactgatacttagttgaaccaatagcgatattgacacattgtgctaagcaccattagtgccctttagcatttctcataatcttattataagtaatattttatatatacactaattaaaaaaaacaataattttgtaataaattagtgagatataagagtccccaaccccaactcccaacacagctgcagcctatcaatcctatccttgtttctatgtcattgtgtcttgcaataacgtttattgagcattttgtatttaaaccactgaacattttcaggaatatgtcccaattaactaaatttaattaattagtaaacatgccattatatcttgcaagtactgatttttttcctacacctagaaagcttcatcgaatttaattaattatataatataaaaacaaaatgaaaccaaatttaatttattaaatttaaagaaaaagcttactccaaattctcccagatctcccttgatgacctaaaataataataataataataacctttacaagttgagttcattagatttatgacagcctaaattcactgaatattaaatatacttttgtagggctcaagaacaaaaacaaatttcttcacattcactttctgcttaaactaatataaatttttcttgaaatcatcttggatacgttccttttcttatttttcttcttcttatcatagttattatttgatagatactttccttgtttttattatattatagtttctgaactccaattgttattaattatctatttttatctaatttacacaaaatacgatatttcattccatacgtaccacgttagtccaggtagctagctataacagtataacgtttctttttagtgtacttgtttctctttcatgtatgttaagccaaaaaaatatctatattgaaaaaccgtgtttttgcaaatgtcagttgtatatacgaaaatataaaaactgtaagcgtttgcagcagcagaaagtaattctgcta

SEQ ID NO: 379362 - DNA, 2681 bp, Cannabis indica
aaaaaaaaaactatgtagctctaaaattgacaataattaaaatcaagccaaaatttctgacccacattatcttcattctcatgttgcatacatcacaaacttcacaaagagtaaccatcagtgaattctgcaccaaaggcatataactttatagttgtctcattttgatggtcctaaaaaagacattatcgtagttaaagatgctaaattatccaaggaagttcattataactaaatgaagcaccaagttgcagagaacaaaatctgcaaaagctctctctgctggtaaatcctgcaatgagacgtacagaagagtatgagcaacaaaactttcattactgctaaatgaataatgtatgtaacattacaatacaatgacacaacacccaacaattctttatgtctatatataaaatcagcaatgcaggaggattctttttgttttttataatcaatatggaagtaagtttgtaaaagggattaattggcatccgtgtatatagatcagctctaatgggaaagtgttagctccgaatggggtgcgggtagaagatggttgtaaacttgtacgattgattaatggagtttctttcttgataagaaaaaataaaaaaaatagtaaaagtcttctttaaatagtttgcctgaaattttcttccagaactacaccagcatcaattaaaacacaagacggttagtttatgaatgaaaccaaaattcaccttgaattccttgttctctttgttcacttgaatgcgaagacaaactaggaacagaaagcaatcgtttgtcagcatcatgatgttgaaatgaggattataatttaggtttactaatacatgaaatttgcttaccagcaaggactgcagtcccaacacaagaaagcactcctgaaaggaaggaattgaatgggaaggatccaacaacagccatgtaagctacctgtttataagataacatatttttaagggtcagtcaagccactactacctctaatttttgtatcacacaaaataacaaaatacaataacgaacgaaaattgattaccaacatttatattggttccaaatacaatgaaggctaatgaaaaagcaaatgggaattaaacagttaaagatttaagccaagcacaaaacatatcaacaaaatgaaaatcaaaatttcagattattaataaaaagtccaaacaatgctaggcctaatcattgacttctgctcacaattttgattgacttatgtacgacactacaaaaaacatatgaattcatgatctaacatccaaacaggataggccagaaacaaattttgagacacaattagcaaaatctaatcacgtttcaagctttaatgatgaaaaaagaataatgctacgaattcccaagtctatctatcagatgggtgtacgaaaggtatttactttcacaaaaacccaatttatatgaacaaacattttcataaaatttcagccaaattaaagtgcatagatagagatccaagtttacctgaacgaaagctgtcatgacagcaaaaaccacgtagagatctatgacctgcggaggaaggaaatctgggtgaagatcgtgattttgggtaaacagaaagaaagagatgtgaattgagagagtgagaccttgagcttagttggtgtggctgcataggcagaacggagggattgaaaaagagcttgggcgtccttggttgtagatctggccatggcgtacgttactttctttctttttttcttcttctagttccaccactggcgttctctgccgctaggatcaacaatcaccattattaaagcccttttgcccgcgggtcgtctccgctccagggataatatcgtcatttgacacaaaaattatttaaattttgccccaaaattttgttctaaccaaattgtgtaccccaaaaatcgttctcgcatccatgttacatgtgtaatttaaaattagggatgttttcttttttttgagagaaagctatttatattaatgaaaaagttcatttagaacaatagcttcaatagggtcaagacaaacagccctccaaacaatattagtgtacacccttaaggcatatctagctaggccatgagcagtagagttggcactccaatggacataatttagagtaatatcggggaaataggacatctgatagataatatcacgaattaaatcataaaaacaatcataatactgttgaggattattaacattttgagagatagtgaaagcatctgtttcaattaaatgcgccgaacaattgatgtgatgcaaccagttaagacaataagaaatggctttagcttcaatttctttgactgaaaaaactcctttaatatatgccgaaatcgcaacaataacctgtccataagagttgcgaacaatgcccccaacacccatagtttggttatcaacatccaaagttgcatcaacattaagtttcaacaaaccttcagggggaggcagccacagttggcgtcgggattgagagcttttaggaggcttggcaggtggagtgtttgcttgacgataatcatagagataatccatagctttgtctaaaagaacagattgtggaagaggatgtgaatgatgtagagtcttattacgatcgtaccaaataaaccatgaaattccgtattttaatattcccagtttgattatttaattaa

SEQ ID NO: 379363 - DNA, 1764 bp, Cannabis indica
aaatgtagagttataggttattcatatacatactgtgatgtgtcactatcttttctttcactaaagttagcatgactttaccttagtattctaaaaaccacttaaaacatttccacaaacagatttactaaatgggtaaaatattctgtgaaatataatacatatgaatacatttgatctcttttgcaaactaactcaaacatcttaatatccacattttcctttcacatttggtttatttatgctatcagcatagtgttatgtattacttatatttgtacctgaaatgtctgctagctttcatgttttaagtaatttttcatgactcaatatctttactctatgatttacattataccaagtgtgagatttttgctttttcctgtgatcattctttaattacaatattacttctacctatgtttgcaggttcaagaacctcaggaggtggaaagcctcttcactggacatcatgccttaaaatagcagaagacttaggaagtggtttgctgtatattcaccaaagctctggcctaactcatggaaacctgaaatcctccaatgtattgttaggttcagatttcgagtcctgcctaacagattatggccttacttcattccgagaccccgattcactcgaagagcccagtgcaacttctctcttttacagagctcctgaatgccgtgacattagaagaccttccactcaaccagctgatgtgtacagctttggtgtactcctcttggaactcctaaccggaaaaactcccttccaagaccttgtacaagagcatggctccgatattcctaggtgggttcgatcagttcgcgaagaagagactgaatccggtgatgatcctgcctcaggcaatgaaacatcagaggagaaacttctagccctcttgaacatttcaatggcttgtgtctcgcttgtacccgagaaccggcctacaatgagagaagttcttaagatgattagagatgcaagagctgaggctcagttatcatcaaacagtagtgaccattctccagggagatggtcagacactgttcaaagcttgccaagagaagaacatttaagcatatgagtggtttactttaaatttatggttttttctttttccttaaaatttaattttcgattggattgatgcatgattcttctcttaggtactgtagagttcacttgtgtaaagttttcaagattcatttttagttcttgtgttagccagctagttgatttatactttttttaagaagagaaaagaagaaaaaaaaagggtgctcaggtaacaagtatggtgttggaaactagacaacatttgatgaattgatgtactgtacgtagattctgatctgactatgttaaaagcaaggttttgaagaacatactttggagttgtttcactcataaaacattcttccttgatgtgattaagaaagaatccaggttgtgtttgtgcttcctatttaatgtacttctgaacctcatgtggattgttgacaacattattgtactaactttggcaaaccatatgattaagttggaactttgcttagtttgctattttttatttattattttaggagaaaagcctctaaccaccaaaaatagggttgttctgctcatgttcttaaaccaaagtttggaaagctcgcttctaaattgaagtgtgtatatttataggatattcagatgagactttgttgcgaaaattattaattactacgcaagtccacgcaatcaagtagtatactcacgca

SEQ ID NO: 379364 - DNA, 2377 bp, Cannabis indica
cttgattgacaattgatttagttccatattcggaaaacatgattctcaaacatgattatgggaattaagttttgatattgtgagatttgataattaatgaatgtaatatggagctagatattcgaaagtctattaactactcctctgaaagctttgcttggggctatttggacacatacagtgttgaaggtttatctcacctagacgagtcgtttgtccagcattcggaaagcttgaatttgctaatggatccaacccattatcttgattgggcttggaacagctgagacgtggataatatttaccctaaagctttcagaactcaagtagtttcaaagacttgtcttcttccttccaaatgacccaaggaaaggtgggtgcttaaaaaggttgaattctaagtagaaattaatggttgaaaacttcttgtttttttagaatgaggcaacaagtggcattttttctttagctcgtaaagattactttcattaatgaagtgtttgtatcatggatctgtaaaacaacaactgatcatgttagcaagtgtcccatatcataatttgaatatctcggttccaagcaacgcatttaatacaaatatgatatctttcagttggatgtattttgtgttttcttggatataatacacgaatcaccaccattgttgtataaatacaataatttttgtgatgcggtgtgatttatattatattatattttaattataatcgatttctgagttattgtgtgttatatatttttacttattttgttgtagaactggttctatttagtttatgtctccgtgttgagggaactgatttcctcttattttttaattagaatcgatttctaagttataatgtattatttgtttttaattattttttatgaaatcgtttcagttttattttatctattagtgcttttggaactgaaaccctcttgttcgtttttttttttttttttaattataacaatttattgagttattgggtgttatttgtttttagtcattttgttgtggaacctgttctcttttaattaatatctcatatggttttttatttagtcatttcaaaaaataattttcgaattatttattttagaaattgatttttaatttaattaattcaaataaccaattttaatttagttatttcggaaaccgacttttgatttagttaattcaagaaccagtttttgatttatttattttatttaactgatttttgtgtgtaagtttttattttggttactttacggaattaatttttttatctctgatttttaactagttgagaaatataaccgatttctttatgttatattttcagttattgtgtattatttttcttttttatgaaacaggttaagtttagatttatacctcagtatttttagagttgatcccacttttttttaaaattataactggtttatgaggtattatgtgtcatttgtttttactgaatttgttgtgaaactaatttaatttttaatttatgtttcagtgctttaatagctgatttcctctttgttttttaattataaccggtttgaattgttcagtgtcatttgtttgtattcattatgttatagaatcgattttattttaattataaccggtttgagttattttgtgtaatttatttttattcattatgttatagaacagattctattttaattatagccgatttaagttattgcgtgctacttgtttttattcattatattatagaaccagttctattttaatttacatctgagacatctaaatccagtgatttttccaatgacgactcaattccattaacttttctgacaatttttcagtgacttttctaacgacagtgacttttcaggcgactttttcaacgacttttcctgtaacaataattttttcgacgacttttcttgcaacaaataatttttccggtaccgatgtcttctccagcaatatttactattagaaattttgtcaaaattatttatggtcattttttttttgttttggattcccatatttcaaactttaattatttgagatcagttaagaaatacttattttttgtatccattaataaaaaaatatcatcatattatatttcaattaaatgtatccacttttgtgaataagttactcaatatgccttcaccctccacttaagttcaacacataatttacattaactaatggatataataggtgtatcatctataaatctgggtatatcttaaataatatagaaataaaagtaaaaattaaaatatacaaagtaaagtgggtatacaatgtaatttcttcaaattattttgatgacatttggtaacatttttttaatcagttttttgtttttaaaagtggaaaagt

SEQ ID NO: 379365 - DNA, 5224 bp, Cannabis indica
gaagcttgcaaccttcttctagatcatcaaagtgtatccgtgacacgtgggtgactttcaagaatactaaatcatccttcccatttggccttcaacaattgaagggtcaaaaagtcttgtgtagggtgcaactggtattgcacgtgtatcgtgtctttaatgagcttgtagtcaacacacgcctacaaaaggcttgtttttcctgagaaacccaactgacagcaggattattaacatgaaaatcttgtaatgcacattgggcccgaggtaggtgatgatgaaaaataaaggccttaattttgacgagggaaattgaatgctaccttttcaactcccgagccatcagatcaacttatgtttctaaggggatgatctagatcgttcaaatcaaataacatggactcgccttgactataaataagcccaaggcaagtcattttcttctctttaccagatcaaacttccaaattcccctcattctcaagaaatttaaaccagagccatttctttctaaaacccaaacctaaaaacctcaactttcttccccaaacttccacttgtgaatgtatgagacctcctacattctcacaaattgtttgccgcaagtcagaacacagtttttcccgtacgctttgctccctcgcttttaatacagcctacccccacttagatgaagaattcatcataaaatcaagctttgacagaatcatcaactggacgcacagttcttgaatcactcccaacaactatattttcccttcgaatcacgttacaagtcagtgtttcaaaacttgttgatatttttttgattttatgctaggaaaaaaattgcattttttaagctttgttctgtaaacacttgcatgtgactgcttagagaaaaattttaagatgttgtgtagtagtgaaacaattagggttgcaaatgtcgagtcataaacgtatttgcatgtttctcgaaaataggtgttagaatccaaactaggtagggtagatatttagtggattctgggctagttttaattctatttactcatttagagttgtcaagactctgaatggacttaatttttggggaatttctcaatctgcaggagctttgtgtgtgatgggtctggtggtgacctctccaagaaattttaggggaggccttccccaatacccaacggtccttaggatattgggtatttaattgtttcgtttttcctttcttttccttttctagtgactgatttgaatgacgagttcagtctcaaggcggtggatgttaaggatgcacagactgcagcatctgcggaagagattcaataggacctagttcccaaggccatcccaattggggaggcagaaaaaacaaagcaaagggggaaagccaaagcttcaccctccgcacctgttatttacaatgactccatctaggaaatggatcagaaggccaatagtttcaagtcctattggaggatggaattgtatgccactgagttgggagtccgtaacattcctggactaatgtggcatagcttgttagtggcggaagagtcggcctcctagagcaccgacaagttcaacgcttggagttaggccaatatcgtgagcagcgcatacctgcctcttagatcatactacacaaatatctacgctaaagttggaatagctttgttctaactaattcctttgacctacaagcttttatctagagggcatgtttttttacaagatctggaagtttgaagtttccaatccagaggagatattatatttttacggtgtaaaacccaaacccatgtgtacaaacagcaagaaaggtaggattttaaaagctggagaagtacgcagatgtacattatcttaccactcatacgttgcattctctagacctctgagaatactagttcttctccacagtttctcggtgaggtgggggccaaatcttcctttggatttcaaaatcctgagtatgcgctcttttcccttttcttcctccttttgcaatctattcgatttggccactgaccaaagtttctttgttttatttctggcagaactattccccaaactctagagaatgaagaattaaagaagaaagtggcccagtacagctttttctctgacgaggagctgaaagttgaaagcgtggggtcaccacgaaactacttcgtgaacacgggctaattgttgggttctagagcattgacaatgtaagtaagtggtaggggctagagccaagcttctaaagaggccaaggaacagattgcccttagtattgttgcgataataataaaagttgttaagaaggatgaacgcttagtgggggattgggcacaccaccatcccaaccctatgacagagaaatagaagattgtagagaggtttgccactgaatacccagatgaagatgctcctcgagctagcacctccagaagaggtagtaatcccttctgtgtgttttgtacccccaatctctatcaaatatcccagagggactaaggggggtttgacaattattttctaagtctagatactcttaagtaccccatgaagacgtatattaatagggtagatgagattattaggatcccaagtaacctagagtcatctttggatacaattagagtggacccatttttgaccatatcctcccccacatcatctgacacccagacaacccccaagaccaaatggaaggatggccatgatcttaggagggccacacatcgaaggaaccacgaggaatgagttgaagcgctacgccaaagacttagaccatgatggagaaatatgggaagttaatcagctcttggcacaaagaccacaacttatggaccaacccatcacctttacggaataacacaatcacacataaatgtgttcgatagcattttatccacctccttttccaaggcatctgacttcaccgaatccaaaggatgcctcttttgttaaaccggaggcatacctttgttaacgttcaaaacatgagtgatgacatgcgggcttattctagtcatatctccatggcaccatgtaaagacatctgctgactctttgatggtggttatgattttgctcctttcatcagggcctaagccttttcctaagcggataactttagttggatcttgatcacaaattcctactaacttgatctcttccatatgctctaatacagtttcggagccaatgcgaggatctaattcatcttgactctcgggcaagagtacattgttggtccccttgaccatgaaatggcttgttgcacaaccacactataacatttttttacttctccttaattcctaccgatagttcccactccttttgcttgtgtgggaaacttaaggcataggtgcttgatggaggcaatagctccaaagtccaccaaagtcggacgtcccaaaattgcataataactcgtggagcagtttgctaccacgaaggtgcaatacctgaacgtgctttggggggtgtccgaacacaaagttatggggagtcttacctttcccataggaacaagagtactcttatagaagaagattgcccaaatggtggatgccacctcctgtttcaagctgttatcttttatgggctcatactctgggtataaccagatcaaaatgcatgtggcagaccaagaatgtgctagcttcagaaccgacaatggggtatactactacctagtcatgccatttggattaaagaatgtaggagccacatatcagcgtatggtaaaccggatgttcaaaaacctgctgggaaggaatatgaaagtctatgtggatgatatgttagtcgaatccaagataagcaagggtcatttagagcatataaaatagtattttaaggtggtaagaaagtatgggatgaagctcaatcccaaaaaaatgcacctttagcgtcaaatcagggaagtttctaggatttatattaagtcagtgaggaatagaggtaaatctagaaaaaatacaagcttttctagatattattttttgttttgttttgatattatttttttttataaaataatagtcttgacatttttgacacaaaaataattgactccttatttagattccatatagtggttattttatccttaaaaaaaaagaatataatggttattttattaaaaaaattatataaaatataatttttacaaaatgaaattataaaataatatacttcaccatttatataaatatagaataattctatgatgtacatacacttttttaaccactcattaatataattttttagagtcaacattctttatcatgtaattgtatgtagtatattagattttcttatttttttaagaaaaatatagacaccaaaataaaaaataaaaaaaaagttaaaacttctattaattattaaataaattaagtttatatttgaaaaaaaaagtaataaaaactaagtttttgtcatcattaatctattttttctcattttctcccttttttcatcttcatcttccaaaattagaacacatctccagatcagaaatcttttagattgtagaatttaggaaaccaaatccataccaaggaaagaaagatttcaaaaagtcaattgtcgtccactgtcaaatctcaaagttctaaattttacgaaggcatagggagataagtcaattgtctctgccattgttaataacatggtaaaatcctgctttatcttctaaagccatacatatataacttctcttctcattataccttgaaaattccaagcattaatggaagtggtgtgatggaggccattgctttcgttaaccctagtcttagctcttattattcacaaataatcgatctcaactccatcatgcaagactgttctcactcacaaatctaaattcgaattcagattcacccaagaaaattaccccgatggcctcaacgtcatgatggtagctaatctattccctatgggctccgactctactttcgtcaattaacttttctcaaattaattgtaatgccctatgcatagtgttgacttcgcttttagccaacgacaatgagtctttttgataagcgataaacgatatgtcgtaatgagaatatataataaagcaataataagacacataaattttatagaggtttagccccgagcagttcggtaatagcctaatcctcgttatttgtattgacttaagaacaaggaaggagtttccttttcttatagctcttacaatagtatctctgaatatataatt

SEQ ID NO: 379366 - DNA, 4325 bp, Cannabis indica
attcaaaagagtattttagaattatataacatgtatgtttccctagtaatctttgaagtgcaattttgcttgcaggcatacaatgctttaatgaaggcttttactgagcacaataaggtataatttaaactctgatgaaaattttatgcctatcacttggtggtaaaagataactaacagacttaatcaattgttacattttagtttggcaatcttccttatggtttccgagcaaacacatgggttgttcctcctgttgttgctgataatccttcagttttcccaccgcttcctgtggaggacgaaaactggggtggaaatggtggtggacagggaagagatggaaaacgtgatcataggccttgggcaaaagagtttgcagttttggctgcaatgccatgtaaaacagcagaagagcggcaaattagagataggaaagcctttctgcttcacagcctatttgttgacatgtccgttcatcaagctgttgcagtaattaggagtgttattgacactaaccaagactccttgaatgatcctaccgtctcccttgtacacgaggaaagatttggggatgtaattattaaggtgacaagagatgtgcctgatgcaagtaccaagttggattctaaaaatgatggaagtcaggttcttggaatgtcacaagatgagcttgctcagagaaatttactcaaaggtgttacagcagatgaaagtgcaactgttcatgtgagtatgttggttgctgtcaatgcttttttataatctcacaggaagtcgtttttagttatcttttaacgtcatttgatcttgtaggatactgcgactttaggtgttgtagttcttagacattgtggcttcacagccgttgtaaaagtttccactgaggtaaattgggagggaagtcctattcctcaggacattgagattgaggaccagcctgaaggaggtgccaatgccttgaacgtcaacaggtatttcaactatttgtagtgcaataattagaaaggaaaatcaatcaaacactcataatttgggttttttcttctacagttaaatggtatttgtatgtgtttatagttactcatacatatttttctatcacttgctcagcctgagaatgctattacacaagttttcttcacctcaaaaactacagagttcagatcatgaaaattcagagtctgctaagtcgttggtacgaaaagtactagaagaaagtttatcaaggttgcaggaagaacccactaagcaaaagaaatctatcagatgggagttaggagcatgttgggtgcaacatttgcaaaatcaggcatcaggaaaaacagagaccaaaaaaactgaagaggctaaacatgagccggcggttaaaggtcttgggaagcaaggtggactgctgaaggaaattaagaagaaaatagatgttaagagcggcaaaaccgaacaggggaaagaagtcactgcaggtaacaaccttgacattaacaaaaatgcagatgctaatcagaaagaaatcgaaaaacaagatgtggaaaaagaaatgtcagcaatatggaaaaatctgcttcctgaagctgcatacttgcgccttaaagaatcagatactgggcttcaccttaaggtttgttttctgatcactcttaatgaccattatacaacaatttgtttgtttatgttttagatggaaattcatctatcaggagaagacctatgaaatgttttacactaggtcattctttggaaattgcttgagtgttttttttctttgatctaacctcatataatgcataatctcttagctgtatttactttgacagtctcctgacgagttgattgaaatggcacacacatactatgctgatactgcacttcccaaactggtaaattctcaaatgatcttgttgttttgttacccccttgaccttagatgttatggtcttgatatatttaaggtgtttcgtcttcattattaggtggcagactttggctcactggaactttcaccagttgatggaagaacattaaccgattttatgcacacccgcggtctgcaaatgtgttccctgggacgcgtggtaattatccattcttaattttatttttcatgttttctaatgtaattagttaattgcttcactttattttctcaacatgcttactagaatcaatgcgactgactaggctatcagattctaaagaaaagttactatgctattatcttaatggaatcatctggctaacatatcagatctgaacagagtttttatgtttttttgtgtcatgttaggttgaacttgctgataagctccctcacgtgcaatcactctgcatacatgagatgcttgttagagcctacaaacacatactacaagctgtcatagcagcagttgataatattgctgacttggctgcatcaatagcatcgtgtttaaatatattgctcggaacaccttcaactgaaaatgttaatgcaaattccacagacgatggaaaattaaaatggaggtgggtggaaactttcctttcaaagagattcgggtggcaatggaaatgtgaaaatggccaagacctaaggaagtatgctattcttcgtggattgtgccacaaggtagacaatgaccagaatgttttctgtatttgtgaggtcttttagtaatattagcaatcttcattaatacttaacaaacattcctcaggtgggacttgagcttgtaccaaaagactatgatatggacagtgcatctccttttcagaaatcagacatcataagcatggtacctgtttacaaggtgaatacacatttaaactggttacttttacaatatagctaatgggtattcagttccattaaatttataataatatgcattaaatctattacttccttctacagcatgttgcttgttcatctgctgatgggcgtacactattggaatcatcaaaaacttccttggacaaaggcaaactggaggatgctgttaatttcggtactaaggtatggctcctttaaaatatatatatatatatatatatacttttatacataaaaagaagcattcatcaaacaatatacagtaattcaattcttttctttaatgtcatggttattcttaatttcaattattaagttaactaactttttcatattcaatcatgaaggcactcgcaaaacttgtgtcggtgtgtggaccttatcacagaatgacagcaggagcatatagtcttctggctgtggtactctatcatactggggactttaatcaggtattcaccgcatagctagtcataaacactaccattcaatatgacccaatccttgtaagaatgaaagatgcaataaaataatagaagtatactttgaattataatgatttgagaataaatcaatcaagatttgattttaaaatttataaatttagagaatttgacaaagctccggttacttgaatcaggctaccatttatcaacaaaaagcactggatattaatgagagagaacttggactcgaccatcctgacacaatgaagagttatggggatcttgctgtattctactatcgacttcaacacacagaattggctctgaagtatgcttccatatttatctcaactgaaaaagttacttcatacattctagttatgcaccttttatttagtttcacacagaaaaaagcatcaaacccatattttacaagacaacctctgaataaattaaagctcagctaacttgacattaaatgttttattctaccataaacttaatggatatggctatattaattgattaataattaaatagcaagactttataacatgctgctgttcttttgaatcataatgtttcaacacttggtcattaatattttgcaactcactctatgttcttctttaaacaaggtatgtcaatcgtgcactataccttttacacttaacgtgcggtccttctcatcccaacactgctgcaacgtacataaatgtagctatgatggaagaaggtttggggaatgtgcatgttgctctaagatatctccatgaagctctgaagtgtaatcagagactacttggagctgaccacatacaggtcacccctctctctctctcaaaatgattatgtgctacaagtcaccttaagaacacaaatgcttgtcaaaagtgttctctgcatcttaccaacacttaattatggtttactttcttgctcttctaataatgtgttcgggacttttgccaaccatatgaaccactaattattttgtgtgtttaccacgttcagtatttacaatcattactcatattctccctcttatttatttattttcttctttt

SEQ ID NO: 379367 - DNA, 3730 bp, Cannabis indica
ttaattttttttattattaaatacaatactatgtttggtattgacatgtattaatagatagtgtaaagatccgggtccgagttcaggtccgggttcgggttcgggtcccgggtccgcattcgggttcgggtcgggtcccagtccgggtctgggttcgggttcaggtcttggtttgggtttagatccaaggtccaggtctaggtccggaccgcgttcgagtcccgggtcccgggttcgggtctgggtttgagtcccgagtctgggtttgggtccgggtcctagtcggggccccgggtccgagtccgggtcccaagttccgggtctagtttataccatgtattattgtattctatgttacatacaaattcattttgggtttattataaatttttctaacaaattagtcatatgaaataaaataggaaataggataagtagcagaatacgaaaagcatagtacttaagatgagtaagacaagtgatagactgacaagactttgatgtggtgggaagaggaatactctcccgtgttgaatcatcagcagtcgatgcaaaagaaggaacatgaggcaggtcactagaagtagcattaggatgagagaaagaattatcaatagatgaacgagaatgtgtaggttgaatggggaatatatgctgataaaaattaacaatgggaaatatatgctcataaaaatgaacatctcgagagtgaaaaattcaattagtttcaagatcaaataagatcaagtgaggtataagtttttatatcagtaaggttatcaatgaatacacaagcctggaatctcagaataacaatcttggttttcttcttcacttttgaaatgtgattaaattcaatattatatttcattttttaaaatgtaactattatagtaacattttttaaaaatgaaaaccagaaacaaatattaataaattagtaataatttttatgaaatgtcactaaaatacattaagagtgacattttaaaaaaaaagaaataccaactaattaaaatgtaatctattcttattaaattacttttattattttgacaattttatacaaatatcaccaattaaaatgtggctaattctcatttttggtgtagtacaataacatgataacttgttgtgcaagataaacttaaattaaattacccatagtacttggtatttgctatttataaaggatggtaaacaaagtctgtaagaatgttaaaataagtaagatagctgcagcgaacactgaagtaagagcccatggatgtttaaaatagtcatgcataagcactcttcggtaccttggccaacgatgtccacaatgctcattcacatcctcaataagctgattataatgaaagtaattgacaaaagtgtcattatagagttggttgaaaaattcagtggcttcttcattgctcaaccagttatccacaaccccgctcttgcacaatatttccatgtctttgctggtgttgatgaggttgtccaataatatagcataagaagtgattttcccttcacaattagggagacattgctcgaagcatattaggttccgaaataaagattccgtagtctcatgaatgaagagtggtggaatttcaaggaccccttttctaaattgaatatccaagagggaggccttatttgtcgccttgaacttaattccagcctcttgcagaattgcagctgatggatagcggttgacaatttatataattatgattatctttattaacaccaaccattgagtttcttagcagatcaagaatgtgcttgtgtttacgttccataaaatcagttattgattgaatcatgtggtcttcatgttgtagtaagcccgcctttctcgagaaagtgccattaaagaaaattaacactagcaaatccaacgggagctgatttattacttgcttggtgatcagctcgtacaaacaggcaagcacaacccaaggtatttggttctctaacaatatcaaatcatgatgtagaacttgaatcatggtcttcacactgaatattgggtcatcttcacttagattcccctctttatacctgtagaaaaactcaataaggaagcaaccatcaagcaccaacatctgaacgaattcatctttactcatattaataggccctgcgtaacattcgcgagcctcttcccaaatttcactcatagcctctgtgagatccattaatattaatttcttttcagtagtacttgtaccttgatcaacaaaacgagagaccaggtcgtacaagtacttcaatttaatattttgagtatctcttagatgttcttgtccatagtggaatggtccgattgaaaatgcatttggtgtataagcttttggattatgcctcaacagtatgcgtggaactttgaagatgcaacacttacttgacctacacaaatcatctttggatatcatacttgctagcttagttaccactgcatcaacattaatcctcacatcttcctttctgacatgctcctgatccgccatttgatttttccttctattgtaaatatatatttcataaacaaattaaacagaaagattaccaagtgattagtacaatctaaacatagtactaaaatagtgtaatgctacattttaatattttttaagaaaattagttaaccggtgttgtgctaaatcttcacaaatttggtatatactaaaagttacattaaatttggctcagaatatagtattgtgttcagttcagaattaattatgttttcccatgaattaatcatatatgattgacttaatacatatattttaattacactattatcattaactatttacaataatattgtagcgaaatcggccatttacttttgttacacatgtatgatattcctaaataaaaaaatgacaggaataataccttccgtcacatgtcacaattttgttgcaacggtatatcttcttttgttaagtgtcaactagctagaataaatgtgtaatattaaaccacatgttgaataataaattagttatttaataattatttttataataaatatatctaacaaaaaaaatttgtggtatagttttttcaaatgaaaaggtctctaaaagttattcttggaaagttgtttactcacaaaagccggaaggctttcttgtctttcaaggaagaaactttaggaaaagctagcctttctcaaggaaaggagttccagatggctagtctttcctcttagaaggtagttttggataatcgattccagatgtctctatcttatctaaaagctccttcagcgagtgtctttgttccgtgatcccagaagctcatatatgttctcggaagcactcttacttaagctgacatggagatctcgctcaaatgagagttggttaagttagttattgtttaactttaacaacctcgtttcttgtcgtcaccgactttaggaccttgatcctaagcctataaataccaccacactcttcttttcaaaacatgatttcagattgagattgagagatagagagagaaaagattgagaggtaagagatgcagagaaaagagagagattggatttgagttttgtaataagaatcttctgtaaatgaaaaagattcttggaaagagtatgagagtggaaacatgtttgagagagaactcaacggagaatctttcttgactgtactgtactcgttcttgtttaatcaataaagaggatttggtggtgttccagaactggagt

SEQ ID NO: 379368 - DNA, 4433 bp, Cannabis indica
tgatcatgatattgatgattataataggtggagaagacattattattaggcgggtgcaccactggttgttgaaccactacgtacattggcactactgaactcgacggagcatgatgatgagtagtagtactaatactcccataatggaccactgcaccgtccttaataatctcctttcggtgaaagttccggtgacaaccgcacgctgcgcacagaaaacccctctgatctccgctgcctccgcttactacttgctcagctgtttctgctgctggtgtcataaactcacggcagccgtccacagcctggaggcccactgaaatggcatggtttcgcctgcattctttgtatctaactatcacactactactcatggtgatctaaagtttgataatataaataaatgatgtgatatgataaggtgtatgatatggcatatagtatatataggagagtatgagagtagtagatacagaatttggcttagctgtgtttggatttgtcgtaatataatgcatggctgacaaggaggacaagtgtgaataaaagttggagcgtacgttattatagtataaaacataattacaattagagaattgctgaaagaccctcatagaggagttgagatatattattgggttaatttaatattagtctcatatattttaataactattatgtaacaaattgatagtgaaagtgtaaagtactcttagcaatgcatgcttatctagctaggacggtggtgtgtataaattaaataaatatgtttctaattagttttaactattcatattaatttgtaacctttgttgtggcaaccattcatgcttatctttatattataatttcagttattatatctgtcgtaatgcatatataacagctacagctggttgtttttggataagtacttattatatgtgcaagcaatgcgtgaaattcgtacgtatatggcaaaagtcggttatgttttgcttttgttctttgttatgataagtacaaaaaaaaatgaatatttatttacaaaaaggaatgtttatatatataattaagtatatcattcccttacaaaaaataaaaatgtatatcattcaaaaaaaaaaaaacgtatttttttatattaatactttttttttaagatcgagaggtaatggcacattttacatttttatatagtaagaaaataaaattataaagagaatcaaatattttctccgagttcctatttactatacaaaactctaaggcactatcttttttttcagctcaaatcgtgttcccaactccaatcttcccaactccggtggcggtgcaacctgtcttttccatacctagaatctcaacagaccaagattttgaaggtctgacaatggagttatgactcaaccacccatcttcccatcatgccttagtgaatccatcagaggtatgatcatctctagccctttttccaccttaatgtgagctctcaacaaattttttcaatttttggcatgattacatctattctagaccacatttgtagtaaatttgttgttcgtcaaggagattttcctatggattatactgtgatttctaagtgtgaacattaaagatcccaatttaatctctctttacacgcccagattagttagtatgttaggggatcttgtgtgtgatggtattggatttgtgttttggttttattaattatactagaagagaagcccaacaaacatactctccttttaatgcttcgtcagctattatgggtataaatgacttgcatactgtttttggtattgctgagattactcttcttgccttctactgtcactctcaaaatttgcctaactctagtctgtcttttctttcaatcttaccaaatatggatgacttagctagtttcttttctattgctctcaatcttacacatacaaagagcacagtcaactcttttgaagactcctcctctcaaactaaatccaaacctccctgctcctacatcttcattattgcaaaactccactcgatcaaatcttatagcaagaaacacttcagagagacaatggcaaaggattggaacaaactttgccattttctagttgtcattactaagaggcccccaaaccttcttcttgtggcgtttggatgcgatggagatagaaggagaattatgatccagtagtcgtggatttaccaaaataatgccattctcatcggtatccccatttctcttgatgtcctcaatggtgacaatttgaactctattcctctatgggtgcaagttcacaacacaccctttctcaaacgtagtgagaaacttgctgctttgattgccttaagactagggcctatgctggaagtggacaaacttttctttagggaaacatggtgtccatactttagaattcaaatcatgttcaatgtctcacaacctattcttcaaggaatccccattgaatttcaaagtatcaacaaggtagtttggctcactctgaagcatgaaaacctccccgatatttactttttctgtagtaggatgagctatagctacaacaatggatacttcaactacttaaaggcttgtgaagaatccccaactcccccatacctttgttatgacaaaacatcaagggtaaggttctagttttcaccaaccctcttcttgatgtctcaaaaaattctaactactttgttccaccgtctattgtcaacttcatgtctactaaccctgctagtggcttctgtgtctctagtcatgttagcccctctagcccaacacttcaattggcaaattacaaaactaatgttacctctacccaataagctggtctctatttatgtccacaagtgtttttaaggaacaaagtcttactcattggagcgaaagcatcccatcacattcctcgaaatctctcccttcccaattcattgaacctgtgccatcctttactgccattttcaatgctagcatgagcaacatggctggccaacattccacttccctagttgggtcaaaccacccgccccatcaagtgcctaaggcagcactgtccaagtggctactaaccacttcatcacacccctcccaaccattatccctttactcgataccaatcaacccctcataaggctccttacaaatttctctctgggatcaagtgcctcacccccactactataatatgggcctttagatgctgtttttcaaccatttttataaaaaaggaagctaaagagtgtaaaaatacctgcctgatacaaaattgacattttgagacagttttttgataaaaaaaaatataggtatatcatttacagagtacatttagaggtagttttaaaatcagggttgtgaagagtgagaagttctctctatgccggtgatgaggcttgcaccataccttcagttctttctttgttgtagtgtaaatttgcaacaaaatttaatataattaaataattatttataaattataactgccatattttatttggagaattattgaaagaaaataatagaatcgttatctaacaacattattgaaaatcctaaatggatttagttgcctttaaatgacaaaattaagaatatatacatatataacatcaaagaagtataatacaacaccaaaaaaataatattaaaaatggttatccaatcatctaattcttcaagtacttcaagcacggtcaaagagagaaaaaattaaacaaataataatcctgttatattatattggagttagaatattactctcttttggaatctttatagctcaataccttatagatgctaaaacttagtagcttaatcagaatattaacaatactatagttatttcagaaaaaatcaaaaaaaaaaaaaaaaagaaaaacaaatactatagttcagtaccttgggtgatctatatatgttttctatatataattataggaataaaacactgaagcttgaaaataccaaccattgaattttcacttggaaatatatataacacatcacattggaactttaattatacaaagcaaaatcaatccaaataatcatatttgaacaaaattatgtcaaataaattagaatgatcttgatataactgaccattaaattaattttgaaatgttaaaaagaaaaataattactttctcttagccttttttctttaactttagattgatttaaaggtttagtttgtccacctaatatatatatttatataaaatacatagctcatttagtttgtgccatattcaaaatacaaagataggagtgcacaaattaaagtttgtattgttgggattttatgccctacgtaaaactcctttttaatataatctaaatttgttatcaatagaagattagaatcatttatgtttacatgtagttttcatgtttatggtttaatgtgtacaatttttgttaagtccagaacatgtagttattcaca

SEQ ID NO: 379369 - DNA, 2264 bp, Cannabis indica
agagtggggattggttcaaacttatccactgggggtgggcccattaattcctcagctaatccaatttcttcagcataaatgggccaaggaaaatgggtgggctcaggatgtttatggggttgtcttgattggcataactctacatgggctttctcaaccatttggtcataagttggcccaatattagccataatggttgtaaggataccattgtctgaagggtttggaggaggcctagaagagtatttatttaaaatgtcaatatcagaggaggtactattattaccttgtattgatcttcgcatggctctaggggacacagatctggttttccttcctttttcgaagttgcaacggctaagaaccctgagaccagagctattatcctttgaatgcacacttgctttttcgaccactttcaaattcttacccaaaatggcacctgggctattgctgttgactcttatcaccttctttacaggtctgatgctagctgtatgatgcaggggctggtcttcaacagcaccagagacaggtcgctttcctgaggctttggatctcgggtcagtgatcggaggagctctcgccggcgaggaaaacctatccttgctatctctgaaaaattctagttgattccgagtgttaaaacaactaaggaccgctgtttctgccttcatccatggtccataggcgggaactgcatcaccttgaggaggaaaggcataggccgttgatcgaaagcaagattttttgtcatgaccaaggtacccgcaattgtagcacagtttgggtagcttgaagtatcgaaattgtatccattctttcctctttttatgtcaaggaagaacccagaggtgagttggtggccagtatgaatttctacttggaacttgaggaatccccttctaatgactgtcttttgattagccaaatcacttcctacaaatctcccagctttggcagcgattgtgcggacgttaactccattaaggtaaggtgtgggcagaccagaagccatgacccaaaaaattgccttctccatgtccgtattgaaccaatctccatcttcaggccattccttaactataagaagtttcccattaattatccaaggtctgtttcggaggacagcagcacagtcctcaggcttgtcaaaaaaaataccccaaaggccaggtttcaatgttttgaatttccagtaacctttgagtttccatatttgattgagaatgtctctgagtctagttctggacacccccttgccgtcaaaaaagctagctaaaacagcagagttgacgatatctgcagtaagctcgaaatcaggttctagctccaaggtcattgactccaggaagttattacgaaggacttcaatatccgcatctgtattcacggtattattgtattagcaggctccaccaactcctcagcagtctcattattagtatcctccataataacctcaggttgttggggtagttgggaaggaatctcgtgattcacaataactgaaggggccccattcatggaatcagattccactggagatgagacacgtgatggaagagagtatcccccataacagacacaaaacaaaagacaaaaaaggagacttgaagagaacagtaaaacgagaggatatttaacagtcagtggacagatgaaaagatgggagacaaaatgaactttgtgatcaatgaaacagtagaaaaaaaactacttgggtaaaaaaaaccaaacagtggaaagaaagaaaagatggaagacaaagctagctttggaagcaatggaacagtagaaaacagaacttactagaccatgaaaaggggactaatactcacttaaccaaaaggaggattaaaaggcagaggaacagagtgggaggatgggattgatcgaccagtaataggtatcaatggtgaaaatttttccggttgacattgagtcaaagttggaaattccaacactctcacttgagagaaaaatattttcctcctaattgaacacgaagtttacacactgctcatttgcccaatgttggattcatgcgaggaaattagaccctataccatttttatagagaaaattaaactctatactttttttatattatttttattattattatttttaccatcttttttaaagcctataatttttacccatttttttaaacactttaccaattttactcctaccacctcaatatactttccatgcgacttctttatgccaaggtattttgggtacaatacatataaaaa

SEQ ID NO: 379370 - DNA, 859 bp, Cannabis indica
catttttgcaaaatcatcaattgctactaacagtacagcaaatatggtgaaagacttaatagttccagaccttatatcctctttcaaaaatacaacatagttaagagaaaatacaactcaataataaaataaatttacataaatacccctaactatatacataatttcaaaattaaattaaaaaactaaattttagtatttttctcaacaaaaatgatataatttttggtgtagtaaccgattataacaagtttgtaacctaaatgtataatatgtttttgtttagtttgacacaataactttttattattaatttataataagtttgttgttatttggttatttctttataaaagttgtgttgttttatttttgtttgaccttttgagttttgcacttataatgaatgttatttctcctaaataatgtataatttgagactcgaattaagaacctctaacacacatacatgcgcctcagacagtacagttaaggtaagttaaccctccttgtaaataaataatgaaatgggaataatgcaaagaaaaaccatggttggacttggaaaggtaagatgagggggacccatcaaagatgaatataatgttatgtggtttgttctcaatcttcctaatttggttcctcaccgactcacttttcattatagtattatattaatattaatttttttgatcgattttattaataatatttatagtaatagcttcacaatccaaagttgttccaatttctctcaatgtctttcctgtctgcttctctcatcacatataataataaatacactgctattattattattattattattattattataataaaatatattattattatt

SEQ ID NO: 379371 - DNA, 2672 bp, Cannabis indica
ttttttaataaaagggggcaaaaatttttgagtcaaaatttagggagtaaaaatattaatttttaacggtaaaagaaacaaaatctaacagaagaggcataattacgtaactgttatattttagggagaatttttaactagccgtatattttagacaagatcaggtagtatcgaaagtctaagggacaaaaatactaattattctataaaatattataaaattaaaatagcacaatttatgatcctctttaaaatggataaataaataaaaaagtaaagattaagatatcattgagagaaaaaaaaaaagaagaaaaaagaaatattttcttcggtttatttatgattatatacaatgatgttgttgtgattgaagtttttagtggcactctaatcaaagaaattatttgataccctttttaaatatatttgtcaaactatacgataatgagaagaaaaatatggtcattaagaattttaattaataaaacaaaaaaattaacaatgaacaaacaaaattaaaaaaaaaatatgcacatcataataagagatagaaaaactctatccaaattaattcactatccattctaactaagtgtgtatacaactaatttatgtgtagtcatattgatcgaatgatttgcataaataaggaacactttaaaaaatttggccgtaaactaaaaaaacatctaaaagagaacctagattattgcagaaaaaaaaaatctctttaaaaaggtagagatcaaagttaaacaatcatactcaaaaaaattgagagtaagtctaattccagcaaccaatcaaataccattaaagttataatttttgccgaaataattgttagattctcttgagctcttctttatccaaccaaaaaataaaaactataactataaaagttgatacttagcaaaaaaaatacaaaacaaataaacttattaacttcacaagaaaactttaaaataagtaattttaaaattatgttatataaattaataatggtaaaatatttaagaaaaagaattgtaataaattttatcttttaaaattcttgcatctaaaaattatcaaatgagtaaaataaaaaatacctataaaaaaaaataacagtttaattaatcatgtcttatctaattctttgtacttcaaattaaaagaaaatatagagaaaaagaaattaataagaaaatgagtttcaatattaaattgcaaacaaacgtgagtaactaataataggtacaacttgcacaaaacttgaagcccatccagatccctttcacatttaaggcaaagtgaagaaaataaaacaaactactcccatcccagctagttaacatctactaccactacttatatcttctcaaaacttacacttttttttttggacacaacggagaggaagaaaagaagacttaatttatttttaatccctaaaaaaatgggaagattgaagataaagcaaaatttacataattattctttaaatatattaaaaatatatttataatagtaattttatatttaaaatttatatctattatctttcttctattttcaatgccaaacaacataaataaaagatattatcttctctattccatcatagtctctatcctttcaactctccttcttctctaccaaacataaccttagagaatgacataccattgacatggcaagtgacgcacatttcaaatgtaatatttaaatatatatttattttgttttttcttttcttaatttattctctttaaacaatttataattaaaatattgatctctctgccaactactcgcatgcatctaaaatcatataataataataacaataaatttttaatacaaggatagtggtcctttctttaagttctatatttattattttaagcagaatttaattagaaatgaaagaattaaaacaaataaaacctacaataaagaatagtacttacattttttctattaggtgacagaaatagaacaaacagtgaaattggccgtcattcttgggcgtggtggtagagttttagcactttttgcccttcaagccctaccaaatttatatttgtccatatttaaataaatataatagattttgttatttttctgttaaatttaataattaatactaatactgttacattaatttaataatattttaaaataaatttattaattatttaacttaaaatatcaaaattatttttttattttattatttatcaaaatataacttatacaattagctaaagaataattaacatttttactcattgattttacctccttaaatatactacttattaaaaattcctcttaaaatataatagttccataattatgcctcttttattagattttatttattttaccgttaaaaattagtatttttatcccctaaactttgaccaatacagagtattgccccaatttattaaaaaaattaattttaaaattataatattatattaattctgcgaaaaattaataaatattattaaaaaacttaataaaaatattaaattaattaaaaattttaagtttacttaaaaaatctaaattattcctaaaaatatattttaaattttattttattttaagaacatgtatcttaaaaaatcaaaccaaaattattgaaaatcaaataaataatttaaacaaactaa

SEQ ID NO: 379372 - DNA, 2502 bp, Cannabis indica
ctgagaatttgggtccatgtaggtgattcctttgatatcactgtaattgcaaaagatatcatttacggcatcaagggaatttgtccaaatttgactgagttggaaagtttactgaattgtgttaaaacgcttgttcaaggaaagcgattccttctagttttagacaatgtttggaatgaagataggagcaagtgggtagcactagagggatctctaaataatggtgctcagggaagtaaagttatggtgacaacaggaaacaaaaaggttgctgtcatgatgaaagcaacaactcacatgatattccttgataggttatctaacgagtcatgttggtacataactagaagtctagctttctctgaagggttgccagtgcaccagttccaacaattaaaagaaattggcaagaaaattgtcaagaacaactgcaagggcgttcctcttattgccaaagcttatgggaatttgttgcgatcgaaatgcagtgaagaagaatggaatggtgttttgaaaactcagttgtgggaattgagtgatgttaggcagagtgttgttgatacactcttgtcttgttattatgatttgtcccctttagaaaaatgctgcttgttgtattgttctattttgccagctgatttcgagattgataaggatgatcttattcagctatggatgtcgcaaggttatttgggaagtgataagaaaagttttcagaggggtgagaactgctttaagagtttggtaatgcggtccattatgtttcagaaaatcgaaaccaataactttcatggaaatgttacaaaatggaaaatgaatgatgtaatccatggattcgttcggtttgccacaagaagctctaagaccttgaaatttcgtacgatctatgcaactggctcggatgaactttcaaatctcgtgaaccatgattcgctttccaaactctcgagtaatcttcggacattgtctttgattggttgcgaccttcaaaaactgcagcgggggactgagaagctgactcgtttgaggtatcttaatttatcaaataatttatggttgaaggagttgccaaaccagctctgcagtttacagaatctgcaaactttgagattgaatggatgtgtcaaacttcgaagactgcctgaacgaatggaggagctagtaaatttgcagcatctttaccttcgggggtgtgatcagctagaggaattgcctatagagattgagagactaacttcccttgaaacactggatttgttcgtcgttccaagttcttctaatggctttaacaaaaatagtaaagcaatgaaacttggagatctgagtaagctaaaacagtgccgaggaaatctacagatacgtgacattggaaacgaagaagacgcggtcgaggccaacaaggcaaagattgtgtccctgcaaaacttggtcggtttggagctaaatttctgtcgaagaaacaatgattcacaaagaaaacatcatgtgtcgctagctttacttgaagccctccagccacctccatggttgcattcccttgagattagagaatacgttggtgcaacttttccgaattggttagtttgtctagagaatttgacaaggctcgtactgaaagattgccatgaatgtaaaaagttaccaccttgtggaatgttaccctctcttagagtcctccatgtagaggccatgggaaatctagaaacagtcggaccggagttttttggaacgtcggaagatgaagaaaacttctccgagtcatttccgaagctaaaagaactttgttttcgagatttggccaaatgggaaaagtggtcagatttcaattacacgagtttgcttagcatgtcagacttctcaatctcatactcagatccagagtcctcctacacaccaaccccctcaccaaagttcaaatacaaaaccaccataatgccatctcttgtatccttgaaaatttccaactgtcacaagcttgctactcttccaaacttcataggaacgaagggtgttttgactattcataattgtccaatactcgagcagcgtttacaaaaacctgaagagggaatggattgggtcacaatctctgatatccccaataatcagggactggaaaaacgtctagctgctcctaattgacagattttttctcatacatctctgtacaaagggtcataggtttgaacagcacttagatatcattgttatttcttttatttgctaattaccatagttagtgagctttaataaaaagcatatttgctaatagaggtttaatcagcacttagttaccattgttatttattttatttgctaattaccatagtcatcttaaaaccgatgatgtaaatgaattctctattttaaagaatttctattttcttcaaattggaagaactattcctcctttattaatattttagtggcacttaaattatattttattctaatttaattattatgtatttttttttttgacaaagtgatttaaatcactca

SEQ ID NO: 379373 - DNA, 1845 bp, Cannabis indica
gggaggagatcttttttccaacaaaaacctcataagcaaactaataggatggcattgttgaggagcaaaaaaagtcctattttctttattttataattgaactttttttcaactgaatctttattaccactaaagtagctatagggtagataattctactataacactagtaaaaacacaataaagaactttcccaaagccaagaattacaacttttatgtttcaaaaaaaaaaatgagaaatgttgtgggccacgcggtcagcactgtgagaagaatgaaaaaaataatacaaaattaaatgcatctattctggagactcggtcaaacaaagtaaaaaaaaaagttaataaaagaagtgggtaagacccacataataatttttaatttattcaaacccccactagacctctccttatcttctctctttccttctctctttccttctctttcttcaaaacaccaaagataaacccccctataaccactaccagtatagcacccacctctgatcaccgtctgatcacatgcatcggaactgcatgactactgattgattgtggtcttacaccttaagtttggtgataattggagcaaatacaaccatacgaaagcttcgaagtttcaccgtcaaaactttgaggcgacattgcgatcagctccgacccccatttgaaaaatggttggtaccattgaaatcagcattgcgagaggaacatcgcgcacgaaattatttttcttaacttgttactttgtcccgatgagatttgggtatctccgaccctttggaagcattttctggcacattcggtgattgtttaggctaacgggttgtaaatgtgtgatctactcattaagggggttgttttgacatgtattatccctatattcggcaacattctcagtacactaatttctaccgccaccgatagttaatggacacctcttgagtaagttttcagaactttacatttcatatatagtcatgttataggtcattggactcggtttgaagagtacattacaatgataataattatttatttgattggaaaatgttggataaagtgaattttagagtgactaagttatttgaacttaagaattgagggcttagaaacgtctcttttagagaaagcttgacgatcctaaaaaggcaaggacttaacttggttattggactttatttgtcactgtctatcatcatttttaattttcttttccatgtttgactgattcattgaatctaagattaaaatatagttagctagttatgctttttaagtccaaaattggggaatttgtttctagttttgcttattggattgtgttccgttccgttctttttatgcttctatatttttcaaatttggttttacatatactaatgttgattagggtacattacttattcgtagcttattagttcattaaatgtttttctgtgtagatctaatgtaagattctctaccatagttatttctgtctagttatgtgtcatagttgagtgtcattttaattggtaaattctgaactatagtatcttcttgatggtactttttattagctaaagatacttcttaagttcttattattacatttcgattctctatagtttcaagcatatttttgggttcttgtcgagtgatgatagtatgaataacattaatgttaacctaagatatgtttctaaaagaggggtgaattagaaatttaagctaatttcggtaaattaaaacatttaacacaaaactctacaattaaacacttaattaagtaaatgcaagtaatatggcaagcaaaaatgatagcaaataatcaaactagtaaagtaaagagtttaagg

SEQ ID NO: 379374 - DNA, 2454 bp, Cannabis indica
gtttaactctcggttataaataatttaagtattattttcgttaaaaattaaacttacgtacttatctgcagtcacaagttaaacttaagtatttatgacgcaaattactctttaaataatataactaatgaatttgttataaagtattattcaaatttaaattaaaatttatatacaaaaataattatttaattttattgatgcttttaaattaaatttaaatattgaaaactaatttttttcatgaaagaaaataattaattttgaaatcttgatcttggagtaaggaattgaagttaacttgttgagtttttggtgtttgggcttgaggaagttttttgaggaagtgaattgttcatttttatttctagttgtgagttcatttcttagaatttgaagcttacatgatatgtgtttatgatgttcttgatttagattttggtatgctattgttggaattagcttggagaagtaattgaggtagctaattcatctctaattgcttttaattctgaatctttatctatgattattgattttgcatgatgtggtttcttgagtgtatttgacatgaatatatggtgataaattcatgaataatatgcttgattttttgtgttgtttgaggtttgcaaaacctagattttaggtcaatttatttgttgagaaatgattgaattttaagcatgttttgagcttaggtttgtgcttagttttctaagtttgattatgtaaattttgaaaaaatttgaacttgaatgtgtgtgtattagacatgtgatatttattttattttgaacttgcatacactcttgtgatccgtgtttcctgtaaaggacacgtggacgccatgtcagcactaaaagcccatcagtaggcccaaagaagataatttgggtcaagcccaagttagacaagactttccaagaaggtatcttagctccataatcaaacaagcttccaccaaggacagcctgtatccggaagtagttctagtaccatgattctagagggccaaacaacgtaataacggaagaccagtttagtttctctttttatccaagcgtacagaataagtaattagctctccttaaatctcagccaaaggatcctatcaacccaaaaaacgaaattacctaaaatggagatcaagcaattaattcataattaattgcccacaattataagacatgatattgacagcttaatcgtatctaatctgcttagtcagcacatcgaatctttcatggtctgggcctcacaaagacagcccaatttatgtattttcatgtaaattctcccattagagggaaaaagaaaaactaggtagagttcctgtaaacactataatacccaacaaatccttcgaattaagggttgaactctcttacaatacttgctcaaaaaaaaaatagagaacttatactcattgtattcccaaagacttttctagctaaaaatacataataatatcgactcgtagactaaggctcgttaacgccccaatcacgtaaaaactttgtgcgttgttctatttctttctttgaattatttatttcttcagttctaattttttaatattggtttttcgaaaatctcggtaaacattttggtgctttagccaactgagagctgaaggaaacagtgatatcatctgaagattacatccagtaatcatggtactcacctgaactaaatttggtcttcactttactagacctagtgctaaggcgggcgatacaaaagatccaaatgaggtgaccagtcgccacaaagatcaacgtgacaaataccgaaattgagacgatcccataatcgaagatagagaatagaggatgatccccaagacacacaaagatcaacctttttagaattaaaattttgctataacaacattgtatcaagaactccaatgcaaaagggcagaaactttgactgatttcttgacaagagcctaagggttcatcaacttaaaagatgcttatgcctaagcttacggagtacttctagcaccttccactaatatagcaactgcccagacttcacaaatggttgttctgtcaatttatcctcctacaaatacctttacaactcttacaatttacggactaagtgcttttgcacagccagctgcacaagctagtttctccagatttagagtggtataaactagatacagtgccgctcccggataaacaaaccaaaaagggagaactctagagtccaatgtaagtcgatctcaaagcaagagaggttccaaaggtccaagtcggagtgattctacaaagaaatgtcaataattaagatattctaagtacacaagccttattgatactcatgagaatgtttataaggaaacttgtaacatggtacattacaagaagcctccgctaatgtacaagggtggaaaacagaaaagagatccaaataagaggtgcttgttgggttttatgc

SEQ ID NO: 379375 - DNA, 3244 bp, Cannabis indica
agagagagagagagagaacaaataaaagtaaaatatacatagacagagaataaatgtttcctaaataagaataaaagagtttaaagaggatctaaataatttgcataagcaataaacaattaacataagaataggcaattaacccaaacttggcttggaaaccccaaaaaaaaattagttgatagacattctatattcccaaaagtaaatagcgcctcctaccattcgaaatataacataatcacagtaaatagtaattattcctgttttattcctcatcaactaacattctaggtaaatgtgattagagatgctgcacaaaagaaaggattctaaaaacaattatcacccttcatatactcctgcacttcaccaaatgacacatactttagtaatataaatctctataaactctctatgttgcactacgtatcaataatttgcagaattcagcatcatcaatgtaaaaagtccattacacaaccatgtgtaatttgcagactatagcaagaaaaggcagcgcaaaagatcttttgtgaccagatttgtaagtcgatgttcccttgccttacaaatatagcgagattgagatagacttaccttgaatttaagaactttcaagctaatcctcctagctatgcctgctggataaagatttatccagtgacaagattgaactcactacactactgcactaaccaagccaaaccaagggaagctcaagagaatcaatcacatctttttcctagtttcctaggctctcacagcatgacaattgtggtatcaaatcttcctttcgtggtatcatagtgctttagaagccgaagccttgactcttgcccatgcgtttgcattgccattgtgtttatcccgttgttgggtaaacccagttttcttttctgattgccttactttagtgcaggttgttgaaatgaggaatgtccctagttggaaggataaagttcttttcttgaacctatttagaaattttgatctgtcgcctaatgctaagttatgttggatcctatagaacttaatagagcagctcatgatattgcaaattgggttagttcttttgcttctttcggttgttttcttcttaaggacatgaaaccctttgtttccatcacggaccccttgtttagagttgctataaagtttgttgcttatccaaaaaaagcataaaaaaactacccaacaagtctaacatataactagttataccttccatttagcaaagctagtagtatctatctctgtatggcctcacctcactcataatgaaagttataagctaaagtaagcaacaagttcaaaccgtaaccataatcaaaaccactgtagctaaattaaatgaaagaagaggtttgaaaccgtttttattggatacattaagtattattaagtatacaataacaaaattattaaaacagcaaaagaagaaatgtatatatcttttagttattaccagtgttcttttcaacattccaacaaacagttggtgggcatgtagaatttaattgtaacagacatccttcaaattatttgcaacggattgatccactgaatactgcaatcaaagaagaaaaagaatcttaattcacaatcgagacaagataatgagatcatataatgttgagaaagaaccagaaattagtaccttgttgaggacccagatggaatggttataggctctgtggaagagctcatcgagggctttagaatcgccaacttcggcttctctgtaattgacaaagttctcgcgggcgtacttcgcgtaataaggtctggtttccttgggtaagcgcctcaccagcctcagaaccccaccgtatactctcaaagctttctccatttctgatttcactgtttgaagctcagctgctttcctgcatgtgtagggttgcaatttaacccgctggccgccccgaaccggcccattaatattttatatacaaagaaaattaatttatttttgagttttttttgtggctaaacctttacaactatcgtttcacttacacttaattctctaaatttaaattttagcggtaaaattttctaaactaatgaacttttaacaaatttaaagtgtcatccagttaactgctagccaccatggattgatgttatattgcgaatttttcgcctaaaaactcgagagcagtctcctataaaattgatacgtggatccaattcccgaggaatgggtgagctgttaattaattgatgactctcaaagagttaatctcgcttgattcgaactcgcgagatgatgcgaccttgacagggtctagtcgcatactataccttgcgtagtgtaagataagcaagacagagaggatttgcataaatcacgtatgtatcgaaatatatgcgatgactaagtagtcttctcttgcaactaagtaaagatcgcttccttacatagtgtagtccgaatgacaagtcgtgtttgacaactggatagggactcgcatgtcccacgttgtcaacatgtgagatgtccatcaatgtgattcaaggtgaacgcagacatccaaacaataggtacattagtcgtttagcgaatatagaacgcatctaaagcctgcgagcttatgcgagaatatgaatagacaactcgcacttgataagtcgcgtacgttgttgcacttaataaaagaacgaattaaactattttttatttatttacgtttattctgatttaatattatcatttattgtaaaaacggttctaaaaccggtcagttatgtaaaactaaaaggacacttgctttctatataaaagagtaatccaaatcaaataaactaagcagaattcatttgcaacagtggactaaacagaccgtgattttactgaaccactatatttccttgtgcccttattattttccagttgttctgttatttttggtagctctgcgtcgaatacttgctactttaagtgagtgttaagtgcaagtggaatgataattgaaaggatttagccgcaaaaatctcatttatttttagtataaaaataaaaaagttgacattggggagaagagaattttttttaaattaatttggagacaacttatttctatggccatgtaaaattataaaaaaaaaaaaaactaataatgcaccagtttaaaaggggtacatcggtgtaaccctatatatctcgatattcaaaagaaatttttaatttaattttttaatggtcgtgcatattgcagttatttaagacatcttgcaa

SEQ ID NO: 379376 - DNA, 3997 bp, Cannabis indica
caggtaatccaaaaaacagaacagaaatgacagtaagagacaaaaacaacacactccaaagagagcgacaaaatcaacacactccaaagagagcgacaagatgtgtttatgtgttattattttataatcatatcccttatttgttggagtttcacaaaaatcccactttcaccctcaaatgaccaataaacatttacttatatatctcatatggtaaaaccaaaataaaaaaggaagagacattctttattactgagaaaatttcacagcatacaataaattctaactcaagccttcagtaggcacgcatgtgcctatacattataaaatccattaaataaataaaaaaggaagaaaagtctacactttactctacaatggtaaatttcaacccacgaaaaactcttccagatcagtaaactttgggccttgctacacgcaaaaacaatcctattattataagactgtctttctgtccagtgtccaactaattcacagctggttcaacacaaaaactactcactatgaattaataaaacatcatattattctcaaattcatcttcatccaccactaaaacaatcaagctctacttcctgcgcttgagaggtccagttttgtatccagacttacacggctttccccaaggtgtctgagaagtccttccccaggctccactactcttacttcgaccctcacctccaccgtgaggatgatcgactgggttcattgccactcctcgaacagttggcctacgacccaaccacctgctttgcccagcctttcggagcttcttagccccgtggctaggatttgacacgacaccaatggaggccctgcaccgagaatccacccacttttcagaaccagaagggagcctaatgagacatttactcgatgaaggttctttgagaatcttggcacaggttcctgcagctcgaacaagtttgccaccttgaccagggttcacctcaatgttgtggataatagttccaatgcgcatagccgcaagaggcatgcaacttccaatcaaggtattgatatcaagatgagccaactggttcatcatactattttgcaatgactgggtgcctttttcagccacatctacagaagcacaacaaaaatatggttgaaatctttgcctgcttaagctttgtagcgtttaggctttagaagccttttctaatcacgtaaaccacaaaacagaaaaaagaatcaatcttgtttttcttccacaggattctgaacatataataaaatgattatcactctaaattcacagtgattctcttctttcacttattttcatttttctgtaattaataattaataataatgttcctttgattcaaaaaaataataataataataatgttccttttaccacaattagggaaaagcgaatataagctttgaaatacaatgtccatatcagaattataaaacgttagaattggtggtagaagaaaaccagtagtgaaattgcgggaggcgaaagccgaggggcgggtcaagtagttgaggaaggtagatgaagcagtacggattctccatgaagccatttaaattgatcccaaaatctctgcaactctgcttctagggttctaacgctgcaaaaaggaaagcacaatgatgtcttgaacaaaagaggtgaaacacaatcatagtccaataattaataaatcaatccacaacatttactatataatataacatatattgccacaaagaaaaacaaaaaggttttcagagcagcaaaagaaataaagtatttcacaacattggagctaacacaattaatagacatatcattgagccatccacaaaaatgtacttgttttcctagtctagttccttagtaaaagaaaattacagctatggaaaaagatagaataaaacaagaatggagggtacacggccatctaaaacaaacaaagcaaataataagaaagggaaataacattacacgattcctaggaacaaaagaagagcataacaacacaacaatgtgattccacaaaaagaaaaggcaagaaagtccagaatcatacatacaataaactaaacaaagcacacaggcatatatccacatttatgttctatcacatgttggaaaaccaaagcatttcattttctcaaagaaaccaactacacttggttccgaaaggaatggtataaaacactgaaaaactctactaaacccaatcaaatttatgtaacaaataagtttatgggaacatcaagtttaatttaaaagaatccaaaactcagatgaaaaaggttcaaaaaaaaaagtcgggacttaacataccaaattactaaagcaattgagcatataataaaatcagaaactccctaaacaagtctcttcacaaaaaaatggtgtaaacatgacacatgttttaaatcgaatgaaaattcaactatacatagtgtaaaagtccaacaagaaaatgataaacaaaagccatttcgatgatgaattgaacccgcgtaactgatttaataaaatgcagagagagggagagaaagatctgaaaaaagagagaattatattgctcaatatataaatttcagatcagtgttacccattgaatctatttcaccaaaaactactacaaccaccttcagatattagctcagcctactaaagaaaatgactttatctataccaaaaaaaacaaagaaacccatgaaaatgaaaagaaaaaaaactgattacatccaacaagtacgcataatagaatacatccaattttgtaggatccacaataactatttgagacttgtgaattaattcccttccattacaaatttggcagagtttcaaaaacacagattcttattattatcattgtattttttataagatggtaattaatttcaaatggattctacttgaacataaacaagaaatgtttttttagatgtataagaacttcttcatgctaaaaagctgataaaagacttctaggagttatagtacctaagtagcaagaacaaggtttactttagatgtaggattgttcttacacgtcaatcaaataaataagcattactaagagaattagagagacacaaaacatgacattcttatatttaatttatgatttagcagtactttttgatttaccgaagttataaaaaaccgaacaaaagaaattcattgttataaaatcaataaataaaaaaaaagtatagccacaaattaatatctcaaaaccctaaaggagaagacccaaatcaaaactcagtctcaaacattcatccccaataattatgttatccttattgatattaagaggccattcctccgtgaatagaaaaatgattgctgtatacttattccaaaatgcgtaggcatgatgaatttctatatacattcaaacacatgaaacaaggattgcatcatgaatccataaaaaagcaacagagagcattgtgatagtggttgttgtatcatatgaagaggccaaagccaaaagatacgaagatggaaatggagggcattaccaaaagccgttgaagaaaagcaatcgtcgaccatgaagaggagagaacggcgtcggacttgaggagatggtcctgcgcagagagagaggccaccaccgtgaggcaaaactggatgagttgtttaggagttggagtttagggctttcattctcactctccaactctcccctccttaacccatttttatttatttatttttttgtttatttgttcttttagggggtttcttcaattatttttggaaattttgcccttaaatactaaaatacatttttttttaatgggattaaaaatttgttatctgtagttaaaatatttttgttattttaagttttaaggagccgtttggtatgcaagtgttattttatgggaatagtaatattatgataatgactgaaaatatgaagattacttgaaataaaatgtgacaacttttttttacaataatattttttttgtgtaaaattctaatgagtgattc

SEQ ID NO: 379377 - DNA, 746 bp, Cannabis indica
cacttatatatgttgcatatgatataacagaagaagacagtcaatagacgaaacacgaatatcaaaaccctaaaaacacactctacctgcgatcccatccgaacccatggatgaagaatatgacgtcatcgtcttaggcacgggtctcaaggagtgcatcctcagcggtcttctctccgttgacggcctcaaggtttcacttcttcttattcttcttcttctttattacttttaaattcatattaggcttctattcattttgcgattgacggatccatggactgattttgttgctcgatttgattcgactactcaatttgcttttttgaggtcaattataccgatctggatactcctttacattcatgacttgatcttacaataaaattcacttagccaaattctaccttttatctgctttactactataatgaaaatgtcattatactaagatgggttttagagattaggcgatttcgttaagcaaacaagtatgaaaccatggccgatttcgttagactgcaaatggccctgctgttggtctgttataacttaaaactgatataaaataaagactcgaactgaagtattttaatcagcagtagattatattttctcacatatgatattgttgtttgccaacttctaattgcgtttgtattgatgttcctgctttgtgaaataggtcctccacatggataggaatgattactacggaggcgaatctacctctcttaatcttattc

SEQ ID NO: 379378 - DNA, 3292 bp, Cannabis indica
tctaacaatcttaataattcggagaatttttttttaaaggcctaaaaagttcgaggtgcataatttggtacatatcaaagcttgggaggcaataatcctaatttgtctacatgaaaatatgcttaaaataatgaaaaatatttatacctaaagagaaaatttcttccaagtatttaagaaattgaatggtgaataaaggtaagaaaaatgaaagactggaactaaaccttaaaatgccctcaggatcaaatggcgcaaggcaccaccctggggaatttggtggacgaggcccatagtcgggagaattaacactgcattcctaaggaacaagaaaaagcttcacgaacaaacaaaataatgttttggggtgcaaatcaaaagaaaaaatcaagacaattgtcccaagggagaaacctttgttcttctgtacaccggatgttggtaaagatgattttctccaagaataaccctgtcaatcaaaccaacagaattgcaaggaggttcaagacttcccctcacttcacaatggacctgggaaatgaaacattgttctacaattccacttaacgaacatctagggtgaagcaaaacgaagaacccttgtggtaaaggaatatgacatagctaccaagtaatagattcacagaattgtaaggataatgagatcataaaaagatgacatcgggaatcatcttattacttaagaagcaataatcattgtcctcattacatgatcatgtattgaaagcttaaaaagaacaagtgaggtgttatctacataaaacttgcagatattaactgatgtcatagggcagaaaaccatacaagttaactcacagcttgaaattttgaggcataaccagacgagttcaaatgggaagctgcaaaagcccaatttggaacataaagaccatataataagaccatgtaaactgagcagagtaagatggaaaacaacctgcatagtacataaacaatcataagaaaatagcccaagtacatccaattacttatataccatcatcagtccatacatgcactatactagtacaatcagaatactatatatggaacaaatgggattataaatgacaagattatccaattccaagttcgatcatcattgattaaaagttaatgcctacctatgatgtaaacatatgtcttttctaaaaccaacttacatgaatttcatagccaaacttaagattggaaaaaaaaaaaaacataaagagacaagttcatgaaacagacatgagcaccaatgagtatctaacaaaacatacccttgagtgtagtattttcttatgaaggctgctggagattcaaccctgatgtttttaacaaaccagatctctgacaatgaagccagtaaataagcaattgatatcctctgtcaattaaaaaaggcaaaattttcaaaattaaagagatggctacactttaaatatcagtactcatagttacacgtagagcagcagacagcagataatattccaatgtataataaaggatgtacaacattggcaatgtaagcatgacatagaagtacttcactacaaggctttccacagagtatggtacctgtaacactccaagccaacgaattttgcccacatcaactccatacatcaaatggttacgcccatggaaatacccacctaatgaaacattccaacaataacagcaaagagctgatattcattaaccattatttcagataatttaaaagggttgcataggaaaaatactgcaccatgcttagagagtacaaggaaaggaatgtttgctctcatttcaaacaacttattctatccaaataaactaaaaccacacaaagatttgactatgttaggaatctttaagtgactaagtttgttagagtggttagttgttatctttaagtgggttgttcaaagttaagctaatcataagctaatggtagagactgaaaaggatctcgggaaccaggatgtcaaagcaagaatgcagcaaaccttgaagtatcaatcctaatagaaagagcttaattcccctcagcagtactttctgtgtagcatttggtttattggagagtttctgcattgaaagccaaagagtgagacctagttttggaaaatttgagccatccccaatgataattgtcagaatttacaggatcatagtatcgaccaaacaaatgcaatataaaataataaagaaaaaaaaaatcacattaataatatctctaattcgcaccttaaagactagactgatagaaacaccaacaccaaaaagaaaaaatggcattacaaaatctgcaagcgttacaccaaaccatggagcatgatttattgacggaaaagctcctccagcgtcgtccaccaatatcattagctgtaaagtaataataaaaataagaaaaaaatgctcagacacaagaagtaatgaattttccaataatgaaataacaataacacaacaattgtctccataaaccgaaagcactggctgaaagtatacacacaacatcaacaccgaaaattaagccctaaaaaaccccaatttactaaatatagccgaaactcagcagagctgaaattgggtcaaaagtagagtgaaaaaggataggaatatggaaatcaaatagcatacagcgatggtgaggccacgaaagacgtcaagagatacgaggcgttgattatcatcggcgggagtgggtgacgatgaaacggggtcgtgggacagtgagcagggcacaatttcgtcgccacagtcggaggagtctttgtaggggaggcggggcgatgattggagaatgagaggttgatggtggtcctgggccatgtcgatgagcgacgacatattttccggcaacttagaataccgaagcagcagtagtgtagagaagttctaagtgagttttagctattgaaagagtcttattatgaccataacgctcgaacaaagagtctctcatattcagcttaaaattttcatcttatactatcattaaaaacacgagtaattggcatttttggtcaataaaactttctacactattttaacaataaactagtcaactcgccggttattataagtattaaattataaaattaatgttatatggagttatgaatgatttataaattaattattcatatattatgtgtgtaataataatatagtgattgaaaattaacagaagaaacatgtaaataaaagaatacgtagctattgttcactatatgaaaaaacaaaaaagattttgttgttataaatattattaattatgtggatgtccaaatctttt

SEQ ID NO: 379379 - DNA, 2735 bp, Cannabis indica
tctaggtttatgaatccttgagctcgcacaaaaaattcacttaaagcgtctacccttttacactaaagatctccccacactagggatccaattacaagtcccaatgttagagccaccattttcatatcatcagtgacttttgtcttagcagccacatccatcatacgctggatttatttctttaagctctctcctttttgttgcttgacgcttgtaaaagagctagcttttagatcataagccttagctggtataaactgtttccgaacatcacctgtagatctttccaattgtggattgatcacggacacaacctcttccaccagtcctccgcagacttgctcaatgttaatggaacacacaaatatttaacatcatcactttccttggcgacttgcatgaagtgattgtatttggacagatggtccttggggtccgtccgtcccttatacagttcaatctgggacatcctaaaatgctccagcaatggtgcattaataatccttttcacacaaggctctgtgtcctcttcctcagagtcagacgtgacaccacttcacttcctaaagaccttttcagtgatcttcatcaactcctcaactttgcgttcaaggcgttgagttttatcactacaagattctcttccgcgaacaagatcattgatgtgattcctcaaattgtttccacggggtcttgcttttttggccttggccttttccttttttgcatccagctttctttgaagatcattagtcgacagacttctgccactatcttcggatacctgatggacttctttaacctcttcatcatggttactcgactcacttagagggggtgttttcttttgaggttttaggttctgggttccaaaattttccttgtctttctgcatggctctgcctctagaattggcttggtctccagaccctaaagtatggttttcgttcctctttcgtggaggttggtcagctactttagacttattaggtcgctacgtggaaggaatcttttttggctcctctatagtgattcctttgcctatatctttatgaacacctaatgtcctaggttcctttggatatgcattcttgggtacactcgttgttggaggagctaccacgtcaagagttgtcttagtcaatgcggtcattaacccctccattttggtcatctttccgagcaatatctggttgaattgatcttgttgagataacctttattcgatcagttttaactggctctttcctccagtagcagtctcggcagcttcgtcctatgggacgtcttcctacacattttttggcgtaccatcattgttcacctcgaccccctcaaaactactttcttctgtgtcctccacaatgggagcatcatcatcctgatatttattttaacaaacctattggtgacttgtcttttctgggtgatcactcgtgtctcctgttctagcaccaggggcaatgtaacgaaggtcagactgggttctggtgaaggccatgctttcgtgaacgtaattggaggatggtcctcagtacttccttcaactctcaatgaaagcaccaaaatgtttcctaaaattttcggaaacaagataaaaacaataagaactgaagaaacaataattgattgagaaagtataataaaagacaaacactttcttacgtggttggggcattaatgagccttagtccacgaattagttttattcagcaatgtgttactttcaaatattctcaaatgtatacaccatatgtgatcgtatatttccttgagaaaaagtacaccagagagttcaacccttaatcgatgagattggtgaaatattaatagtagttggagaattacaatagggtttcccctttttcctctactggggagtttacagctgaacaatatccatgggcttacgtaggatgtccagtccatgaaggatacagtctactgactaggaaaatttggcttgagttgatcaggtcaaaatcgcatccgatcataatgggagaatattcagaaataacttctctgtgattgttatgggaagtttcctctttaatctcgatatgatattatggcgtgatttgatagctggtgtttccttgtttataggaagaaaaaaatagggaacctagaaggatcttttgggaatgatacatccttcccctctaggctcatgaccccagagctgtcttctaggctcgatctgtcaaaggtggaaggtactgggagcatagaacaaagataactcccaaaaggagatgtcaagatggacttggccccttttatcattgatgagggtcccattgatgggtttggaatgctgacagagaatccacgtgtccaattccagaaatgtggataacaggtgtcttccatgttggattgtcatccaacaagtcgacttcttcaaggatggtaatgttgggttcctttagaaactgtaggggcactaaattttccttgtcagctatgctgctactcgccaaacaggcaagtgcatctgctgcagtgttctgcgctctagggatttgcatgattgtgtagccttttagctgacttagtaagcttttgattttgctcaagttggttgcagcagaattaaatgattccttccgctaagatctctaacccttgtatcttttctgtcgcagagtatcaccaagatctgagcccaaaactccttcagttgtttggattcatcacaatcttacacactatgattgaggactaacttg

SEQ ID NO: 379380 - DNA, 3947 bp, Cannabis indica
tttatctggatcagatcagagtcagtgtgtacgggagattcgtctgggaatacacagaggtttgaggtgatatttgccttctaactggatgtacattgtccgtacaagggttccaaacactctactggaggtgaatcctgaaccttcactccgatcgagggttgaggcagaaattactatcactgtcgcagatcaccctccatcaagctatccattccgctcaagaaaagtggcttgtaccaaaaaaactgtccaaaaaattagcccgagagattgggacttcgtccacttaatggccaggcaacacgacttgggaagggaaaactctgagggggaagatgtcctgcctgtaggggacccaaaagtctaagaaatcgaagagcaaggcaaaaatgataggtatgccttcatgcctttcaaaggtgccagttaatattcagaagacggacaaccttttgacttttggggccattttttagtcctaggtattgattacacggatgaagagttcaacgaggctgaaccattcgagcatcaggaggtggaaggctcaatgtggatttctccgccattcaaactgacagagaggtgccttcggaattcagacaaaaagggcttcttggccacgtgcatgtatgtctcccctttgaggggcaattggccaatgatctgggaaaagggatgtgtgtgtggttcggtcctcatgctgagcacagtgccttctttgcacttcatgaagctggctaattgctacagaatttccctaatgcaattcacgcggaaagggaattaaacacttggtcgtgatgtttgtactgtatgcgtagaaaggattgggggaacattttgctcatgacataaactggttctttgaactgaagtcttccttgcatcacgaacgctcgggatagttttacttttcacagttggagtgttcatggataatcggcacaaacaagaagtttgtaaataaaattggtggtttcctccgagattattacatagtcaccgaggtgaagactaactttatagccttttaacatgctaaaacttacatccagcccgcttttacactcggccttagggacagggtccaggccatttttaaacttgtttgattttgctcagcatattgtcttgttgacatcccctaagaatttactcaagtatggactttatctgagctcgaatagtctgttcctcaagaagtcattagcattagtcaaaccaacctctcccaagaagaaaaagaccaaagccaacaaggtcaaggcttcgtttgtggaagaacccattcgtcttagggattctgagaaagaaactatttttagggttgtttagcatgttgaagggaaagtaaaggaaatccttgaataaattaaagtagaatcctctaatgatgatgctctttcaatccttttctgggagggtgctcctccagaagttcaaggtagcactattaataggttgtgtgccattttataatcttgaccaagattttgaccaagttttccctctttttttatgtagagatgtcaagcaaactgaagtctttatacaaaaggaagttgggtggtacctcagacaaggaaagcccaagcaaagtgcaaaaaactaacccaaggtctgtcctggagaagaagtggtattcatcaactccgagcaagagatggtcaaaaccaaatccttagcgaccaaaatctcgaagggtatgctcctcgctcctttcccgtcaactcaaaaattaaaagatttggctgtggccacggttaccttagagttgaatcatgctgaagacatttgcaacaactatcatgaaaggtaccatgcggaggccggggaaatgctgggtggagcaaacattcttccaactgacaacctaatgtgcagtttgcttaaggaatgtaacaatatgttgttgtttaccttccgtattttatgtttggccaattcatttcgtgtcttctttctgacttggctctattttctttcaggtgaacttgtaggcgagctatatctattcgaggactaaggccatggctaagcaatctgttacaaactaagttgagtttgacaaggttcaaaaggcaatggctgagaaggagacaaccctgaagtaagccaacaaagatttgttcgagcaaaagaagaaggtcgaaaagttaacccaatagatagctaacactctatcaaccatccagctggaaatagaccttgaggaggttaccaaggccaaaaatgagctaaagaatgaaaaggaagtcaaaaaaacatgaaaagcgaatttgcgagctagaaattgcccaagttgcagttgacaaagaaattgatagtcttgtatctactgacacaaaggttttctacgagttttggacagctaatcccaaagctaactttgatcatctaaaatatgacaaggagttcatgtttgctcgagtagaagagataaaagctcaacatgccaaataagcatacgaagttgaaacttcttccgtgcctcccaactcttttgtggccgaccagaatgctgccatagcattctcaacttattgactctaatggatttctaatccatctttttttagtttatgctttaaaaatagttttgcggcctttgtggcctttatttttcagacaaacaccgaccaagcagtctttttccttagtttcttcttaagacaaatggctggcaatgcaacttttaaccccagacttaattcatgactttttgccttgctttttaatttgaaattctttaattttcttcaaattttcattgttacttttcaatgttgtaaggatataagtgccccaagtgtctgagcagacttttaactcttgctcacttctaattcatttttgcctcttttttttatgttttttttgtttggtatttctcttttgggtggacctccctgtatgcctgttttaagtaattttgtatttattgaaattaatcaaaatatatttttattttctcggtgttccgctagttccttgtcatgataaatatctcgggttgccttgctttgtgggtaaaattaagagtggcatgtttcaatctattaaagataagatttggaacacgttttttggctgaaaatcgaagcttttctcttttggagatcgtgaagtgttgttaaaattggttattcaagtcattccttcctatgccatgagcttgtttcatctactagttggtattgtcaatgagattcaccaaatgtgtgcaactttctggtggggggatgatagtaagaaaaagatgcattggtgtatgtggcttcgactctgttggcataagaatggtggcagtattgcctttcgggacatgtttttatttaatcagtctctcctggctaaacaagcagctcggttgtataattcgtctgattccctggctactagataaatgaagggtttctactttagcaatggttctctattgagtgctgtagtgacaaagcgtgcgtcttttctttggcaaagtatcttatggggtcgggatctctagaagaaatgatgtcgttagcttataggcttaggagagtctatcaaaatttgtgaacatgtgtggatccccaaggatcatgtgggtttgtcttactccttctcgggtgggtcaaactttcaaatggttagtggtctcaaatttgattctggaagatggaattcatctctagttgaggagttgttcgataaggtggaggctagtgccagtttgtctatcctgtgcttgttgtggtatttttgcacacgcaagtgtacgtatcgtaacaagtagtaaactcactaagagtgaggtcgatcccacgagaattgagttaagtactttaaaattaaacttttacttctatttggttgaataaaaattaatagagaaaattaaaataataaaactagtggaagtaggaagcaaataaataaataaaggaaattaacagtta

SEQ ID NO: 379381 - DNA, 1147 bp, Cannabis indica
aaaaggattataggtgtagattgaataggatcacttgtccgtaagggatatggctctgatactatattcttatatatagttcaatattctatcatttattctatgtggaataatgtctacaatataagtacgattagacgacgatagtgtatgtatgtaagtttgtttgagaaaaatgaattagaagtttaatatgtaaaataaaatatgtattttgatgaaggtggtctgtcacactatgcaaaaagttggttggatgatatggggaagtggttaaaaagcaattgaaaatgaatgaggaaaatggaccagaaaagtttctgagttttagcacttacattggttttgatagatgaattgaccaaaatcattccattgaagaaaaagaaagaaaatgaatagtacaattattaggagctacctagctaggtctttgatatataaatgtacctttgagtaaaaaaaattaaatatttaatatttaggcacgaatttatatagtatttctttcatattttaaatatttaggagctacgtctcattatgatttggaagaaaaatattacaagacaactttaattacgactcactctccttgtcaccaatttgtcaaattcagctttttaatatatatattttttttagaataaatataatttttcatatgagttttgcttatttatatacacctaactactaaataatacaatattattttttagatatataaccgccattaaggtatttatttaatttattggaataaagcttcatatatcagatatacatattttgtactaaaaaacgatacatatttttttatatgtataaaataaaaaataaatattattttggactttgtgttttgtaaaagttattaattggactctgtactgttttgttaaataataaaacagaccttctgtgttgttagatggtaaaaataggaccttgagctcaatttttaataattttattatttaatataatcaactttaagataatttctaacacgaacagatacaaaatatttaactagttttgtcataatatctctagatcggattattattaaattttattttgaacaaaaaatcagctcagggttcctattgtacaattttagaaaatacagggtttattttgt

SEQ ID NO: 379382 - DNA, 1628 bp, Cannabis indica
acattatttaatttttattataatccttgtattttaaagcatagagttaataacattattggtttcatatttacatttaatatctcaattttcccaacaacatatattttattgccaaattcatggtcaacaattttcaaaataaaatacgcgagattccatatgaaattacactagcaaatcacactaataacaaccgcctcaaagcaccattaagaaattttcattctatatatctttattataagttaattaataagttgactatgttacgtagattaacaacatatgggccaattataatgaatatacataatacattacaaattcatgtcaacacaaattaataaggtgtttaaaaaaggggtcagttaatgtataaatctaaaagtgcataataagcgattagcaccggaagagacaagatcattccaaagataaccctgcaataaacaagtgaacaatatcaagataaattgaattaaatattttataatatcataattttaatttattaagtaataacatgaaaatgaaatattattctttagagaaaagcaatatgaatattttatacaccgttagttacatatacataagtaaatatatatagtgtaagacaatgaatattattatgtatatatgaaagatattcttacgctgtgctaagcacatcggcatgcaatccgtactctttggcatatataaaagatgtaatcgattgcggcaacgctgactgcatcacaataatagtcactaaatgataatatattgtaaatactatatactccttaatactaaattaaatatagtttttaaaaaataatagtaataatgtattaattgttatatgtaaaattggacaatattatatgtttttccaaatttcatctaacttttagcacaatattataaaaaagagtcttttacatttttgcagaaacctaaaaatatagcattacaacacatttttagaattacatcagttatttgactgtgtgccaaagtgataaataatataaactccatatggattgatcctttggtaagtaatttattatatggttgaaaagaagtacctgaataatagctacgcgaagaacatcgccatgcaaaccggcagcaatggatccaatagccatagctgctggtcctgctataaacctcaacaccatgccaatcacagttagccgagccccacacccaattatcttttcttgcatcgccatgaaaataccctgcaaaaataataattattcattatgtaattaatatatatatatatgtatatgtataattttctataacttattagattataaatatatatatttatatatatatatatatatatacatacatacccatgctaaacatagcagtgcctgtcccagctttcgacatgatcaaaattgaaccgtcgaagatgcctggcatctcaatatgccacctacgcgcgcgtcaatacaaaaacttttaaaaattgtattacacgcaaacacatggtatagttcaatatagagttctatatatttaatgaaaatataagagtagaaatagaatgaaataaaatttaaaaggaataattacataaggtactattttttgtaaaatatttacatttttta

SEQ ID NO: 379383 - DNA, 2420 bp, Cannabis indica
attcatgatgatttctgtttttccattcccagcaaagggcaacttttttaaattctcccgtggccaagtctcgtgttaaaggccatctttggttgtgtgccattggtatgtttttcaagttctcaatgatatgccttttcttctgattaggatgttccttgtcttgattcatgtttgatttattttatttgaaagctagaaagaaaaagttctatgtcttctattgtgcttttgtcatacaacttgattttctattagacaattttccagggaaaccatgttcaaactttgtccttcaaaatagaggcctgttggtgttttagttaatagttactttatattttttagtgttcatagtatttattggtagaatttgaacatcagatgtttataactgtgtagatacatatttggactcattctgcatctacatcattctaagtttgctttatatggttttctcttttatctttaagtcatatgataatgtgctggtgtgtattaaaagttgattgtctgtctacttgaagctttgttgcctatctgtattgtattgtttctaatgtccataaacattttggtattgtatcattacacacatttaaaaaagttgaattacatcttatacaattcaattattttcttgttaaaattttggactcattggcttagtaaagaactcactatcagtgtttttgatttctctctatttccctagtgtatttgtgtatatatgctcttctgttgaaatcatttgagaacaaatttctagtgtgaattgataagataaaagcatggaatacaacaggggatcttgctgatggtcaatgcttgtttacgtaattggtataacaatacccagtttgacccgtactgttgtctcttgttgtgtttttagagtaataactacgttctctttgctctgttcttgtatgatacaatatcataatctgttgtattagagtaatgagccaatagttttatgctctcaagacttgaactattttttaatatgaatttatttcagttaatatgtaaagcgttgaggcaaaaatgttttaacttagctgacaagaacagaagacgattgatgcaatcatcaaggtaatggtatatgacgctcgtaaccccttttctattatttttttattgccaagacataacctcttagtgcaactatacgtattcgcaaacttaactgttacttttatttagctgtttaattctagtctggggtaaatttgaacttcaaattcaagctgttttcattaagaataaaaacacatcatgtattaataatgtcacactgatgaagatgattttgatatatcatttttttaggtgtcattttattgcgcatgctaacgtttattttttttagaaaaaaaattacttttgtcgacacttttttacgctggctaaagtctaaaatttcaacgactttttctggtgctttttttccgttgtcaaaagtcttgtactatttttttggttctttcaactttaccgatgcaaaaaaacgccaacgactgttattactggcgagcttttcttagtgattttttgcgccagcaaaagtgtgcaaatcaagacttttgttgacgcaaaaaaagtttcagcaaaagtcactgctttgttgtggcaacggttaaagaaaggctgaagatgaccaacatgctttgtggtggtgcacgactatgaagaaatttcagaaaaatagtggcttcttcaatcttatgaaacaagcgcaccacaatgattgcgttacttttctgttgaatatctctggatttatggccaaagagaattttgagatgttggcattatcttagcaagcctaatatttaaaaagaacttattacatgaaagatcttgtttgcgatgaatgatgtgctagagtggatttcaaggttggttgcttggtgaagaaattctacatgagaacaaaagaaatcaggtttgttgaagaagatcattggcctcccccaacaaataatatgactttaatcaatgtagattattgggaagtaaaatgcgtgcagaaatgatgcagcggctagagatagaacaggtaaagttaaagcttctcaatgcaagtacatcagttggtttctcagtcctttggctacaaactcattgctatatgggactgtttaaaagactgcatttttctttgggtttttttcataaatgtacaacaaaaataatataattacaaaaaatgtgcaaaaaaaattattttgaaaatttatacattttaaaaacttattacatgaaaccatacattgtaatcattaaataataaaacatgtttattgaaactcaaaataagcaatttcgtaaaattaattaaacagttttataataataaacaagttaaatatttttttattaaaaaataaatatttattatctatttt

SEQ ID NO: 379384 - DNA, 4894 bp, Cannabis indica
tttatgtaagtacgaggtacccaaaaaccaccccatgcgatccaccggatcaccaaaaggttcacaattttctagcagaaactcaaaatctcaacattctcaatcaatttcaccccaaatcctataaaactttccagcatacctaataacatctcaatgaacataattcacccaaaaatttcatcatcaaagctatggaaataaaaataccattgttaagcaagctttaagtttcaaaaactcaaactttctcaacaccaactaccgcagccacaactcactaataagcatcaaaaaaaacataaaaccagctctcaaaatagtttctaacaatcctaaagccttacagaaccgagctcaccaaaacactcactaaaatcaactttaagcttagaaatttaaagatatgaagggcaagggctttaccttgatcttccttccaatccacacttgaaaacctagctgaaataccattgaaattggtctgaaagcttgagaaatattaggattgtgtttgctgagagagaaagagacaaagtgagagattgtgtttgattttttgattccaagttttatctcttaaacatttgtttcattccaaatattattcagtatatacacttaggttttatctagaaattccaccatgaatccaacttaggcaaatttctaaaatatccttttcttcacttttaggttatcttaaggcttaggggtaaatggtcaaaaaccataatcccgcataattctcgcattccaaatgtccataatactcaccccgctaattcttaaatactctatcgcattattgtgatactaatggacaaatcgccacattctacttttaccggacataaaatataaaaaacatactaattcacatataatatgaatattcacacctaaaacttaataaaatctccatagttgagaaattatttctcaaacaactaacaataggtttcatttccactaatgtatatataatcacaaataattaattaataaaccattaatgcgttactaagttccatgcctaaatatatagtcattacataacatcttgtgacaatatatttattagaaaaaatcttaagaaaatgaaacattaattaataaaataaaaattcatggtatgtcatgtcattcataatagatttttatgatggatttccatgtattaaaattatgtgtaactcaatacttaattttataatttataccaataataatatagtatcttaattgatgctagacaccattagtgtcatttaatattttactttttcataacagaaatattaaaggatacttacgtatttagcatcattatgaaatatttatcactattagtacaattcgatatgaaatttatttttttattttaataataattataaaaaaccgctaactattttcaagatgctatattattgtagtgctacaaaaatgctatgttacgagcattgctattaggcaccagtggtgcctagcactttctcgatatgtcgcgttacgattggctaacgatactccttaaaatctattatattaaattatgtgggacccgatacttagttggaccaataactatattgacacataggaaggtgttaggcaccactagtaccctttagcatttctcttattttacatggagcattgctattaggcaccagtggtgcctagcaccttctcgatatgttacgttgcgattggctagcgatacttcctaaaagctattatattaaattatgtgggactcgatacttaattgaactagtaacgatactgacatatagggggatactagacatcactggtacattttagcatttctcttttacatgggtaaaacttaaaagtataaagaaagagttagtcaaatcaactcaaccaaatcacacttcattaaccattattataatatcttaatttctttttgttcatgtctctcattagctgacacttaactctctctctttctgtgccaatacacaatatactaattaaaaataggagaacaaaattttgatatgatataaatttggtataaccataatataatctttctctctctatatgtatataagcaaacttcattttccaacttacttaccaaagatccaaactttctttctccaaatttcacagagagtctattgataggggtaatatatatatatacacatttatattgaataggagagagagaatgagtgactttgtccagaaatttctgttcaatataaaacttctcatctgactagctattatcttttttggtccctaatgccacaaagcccataattttttgtctccatcatcaatcccataatatatataggaaggaaaaaaagatagattggcagaaaagaaaagaaaagaaaatgaagatccgttgtgatgtttgtgacaaaaaagaagcctctgttttctgtacagctgatgaagctgcactctgtgatgattgtgataatcgtgttcaccatgccaataaactcgccagtaaacactcaagattctctcttcttcaacctggtttcaaagaatctcctctctgcgacatctgtcaggtaaaaatcctttcttttttctgtttggttcccgagaaaataatattcaatacacgaatatcttaatacatacttcaaaacagaaaaaaccaaaatctgggttttctttgtctacttcagtagaacaattttcctcattcattttaccaaaattaacacataaattttttttgggtatttttcattttttctaggaaagaagagcttttcttttctgtcaagaagaccgagcaatattatgcagagaatgtgatattccaattcataaagccaatgaacacactcaaaaacaccatagatttcttctaacaggagcaaagctctcacctttatcatcatcttcatcatcatcatcatcaattactactactactagctctgaagcagccattaacagaagctcagtcactccattgtttccaacaaaaaacaaacaaaaagaacttaaaacaagtaatactcaaataataataataataataataataataatgagataagtagctgttcttcaattgatgaaatgactcaatttccatacaattcaacatctaataataataataataataataataataataataataataataatagtcatgaaagtggttgttcatatttgacaagtagtatatcagagtacctaatggaaacacttcctggttggcatgttgaagattttcttgacccttcttcttcttcatcttgttctgcttcaaataataacaacaacaacaataataatggattctgtaaggtttgcttccaattatatatttttatatatatatatatgattttttttgaagtgggtttggttttgttgatggtataactaattgttttaatgtgcagacaaataataatgatgattttgatagcaataaatgctatttaaactcatctcaagatcaagatgatcaagtgggtcaatatgactattgggtaccttaaatttcaccataatattaaatttataatactttatgtatataattccaataatggagtttttttatgcagaaaaaacagatgaggtgatgatgatggtgataataataatggttgcataataatgtcatctttgaagacattatttttagttctaatttagaagaagaagaagaataagaagaagaagaatgttttagttaaatttttgttttttgttttagtattaattacatcgattatgtgttgtttatgagggttttgtttcttttttatttctgtctacactctcataaaaattttgagagtgggaaggaatttgggtttttctcttttacatgtttatgcaaatcgatgtaagaattaatataaggtaatattattgggtagaaagggagagagtgttgatgtatattatggtctttgaatgaattatcaatattgtaacttttggtaatatctttgttactttagaattttcctacaaatggatcaataataatcaataaagttagagtttttcttttctttaaattaattaggggaataatatagtgataataagaataatttttttgtattatattgatttaagatgataagggaaaaaaaaaataccattgaatcattataattggaataataaaattaaagtatcctttcttttatctatcaaaaaaataaataaataaattatccatttaatgtataagttataaaattttaattgttgaatttagagcaatttttttttcctcatattgatcacattagttaataaaacatatgaattagtttagcatatattttttgttaagacaaacaaattattgacatggaagaactctctctaaagttttttttttttggtaataatattttttgaattcttaaaataaatgaatcattttattataaaaaaaatgaacttttataataaaattataaataatactaataagtttcattctaattttagtaaccataccataaataaagaagcaaacctaactaattttgcagaatgagaaacaagtcttgtttgtttggtaatattgaaggatagtatatcatgtgactattcctagtagaatgtcccattagaaaccatcacaaataacaaatggtccataaatagaccatctcttttggagcaatattgttatttattagccttaattatcaatatcaacttctagatctagtggagcccacctatatacatatttattttttgaaagaaaatatacatatttatttatatagaaaaaatttataatatttctatacaaccaagggatagttatttaactatgcatgactaatgaaacatttgattgccttgagtaattaacttctcatct

SEQ ID NO: 379385 - DNA, 2886 bp, Cannabis indica
ttttttttttttttatttatgttgcagttaatctataacaaagaattaagagagagattgttgggaaataaaatttgagctagcgagaagagatgaaagggagagaggagagagaaggggataaaggtctggtgtggaagcttccggtggtgaagtcaaggcacctgggtaaggttggtcctgccttcggccttggtgctggctgcggtattggctttggcatcggcctcctcggtggtgcaggttttggtccgggaattccaggcttacaacttggttttggaataggtgttggatgtggagttggtattggatttggctatggttttggaagtggcatagcacaggatgaggatcggagatactcgagtgttgggaatctttacagtggttctagaaatattcctacgcaggatgagattggtgcacttgtagatgatcttgtcattagtacaaagaggcttgtaaaggctacttcaaaagaaatagaaaaatggagaaggtgaatttgttggctgcccttttttgtgggtaacattaataaaaggattaacacaaatggggtcacaattatcttggtaagtttgtgttggaagatgcgttttgtgatgggcttaggatcttaatatgtatatgaacggtttctcttatgtctttcaaaaaataaataaagaattctgtcttctgttgaaaaattattcttgttgctattccaaaatactgatgttacaataagcattagatagacttgcatcctttgctgagtgaggaccaagtttcacttaacaacaaaacagggtcattctgggaatttgggatagagacctttgtcacccaaagtgtgaatcataccactacaccaaatggccattattgtaacttttttatatataggattgatttcttttcttgtattacgtttttagttgccggtcctaatgtatagtgttatcttttaaaaataggacatgatatttaataataaacatctagctctttggtttgtgttaatcatattcattagagtaaattgcagttaaatcttcaatattgcgtttaactaccaaatcattttttttgatgggttaacggtttagctttttcatccaattttttctgttaacgtttactttgcctaatccaatattacgtagatgcttttcatgtcattttaattgtgatgatgtcttaaaattatattggtccatataatttatttatttatatattataaaaattatttagaatatcattttaaattaaaaaaagttcaaaaatttggaaaagaaatcaaattttaaatgaataaataaatgaattaaaatgaaaaattcaaaaatagaacctaaattgctccctatctctgcctaaagaaaaccctaatttccaaacaaaaaaattccccctcttttcttctttctctcccttgcttcaaccatggcctccgtcgatagctgcttcaacgaacaaattcttactcacatcaaactagtcttgaaattctgttggaatacatcctcaggaacacttcgagcttgggaagcagacgaaccaaataaattgagaaagttgagagaaaaattgtgtaaactgaaagagattgaatttagattagaccgaattttttgtaaagaattcaaaatcgaaatacaatttgttgtttttggcttcaacaataagtttaggtagtttgaccataaaaaaatgatttggtggttattgaggagcagaagagaattaatgtggaccaatcaaaataggcaaaaaaaagagaagctaacaaatagaagacccctcattcgaaaagacgaacgaagtcttgctcacatcaaactattctcgaaactctgttggaatacatattcagaaaaacttcaagtttgggaaacagacaaaccaaacaaattgagaaagttgagagagaaattgtgtaaactagcagagattgtattttgattagaccaaatttgaaataaataattcaaagtcgaaatacaatttgttgtttagccaattttcgacttcaacaagaagtttaggcaatttgaccttaaaaaattaatttggtggttaaacgctagaaaaaataaaggattggagatttagtcctagtttactttatttaatatagtcttgttggaataaggtttacatcaattctttccatgtaagagtacaaattctcaacttgctgggaatcaagtaacattaacaacaattaaaaattaattaggaaactaacttataagtactagtagattccttcaccaatttatttaagaagatgacagactaacttacaatgatgcagaggaccaaaaagaaagatgtggtttgaaaccagaaagcaaaataagattagaaggggcattccgagaatcgaactcgggacctctcgcacccaaagcgagaatcataccactagaccaaatgcccattaataaacaagtttgcataatccatatttgacaatttttaaatttttggctatatttgactttattttatactctagaatatatggtttacccaaaggcttgatctgaaagacttgatattatattattatcatgtctaataaaaatttgtttatcttgatagtctcttgtattaaaaccaaacttaaaactcggaaagtagctctagtgtcctgcctttctttgtttcatcatcatttcacaacgtcattggtacaaaagctaccaaaaccaatcctttgttacaaataatgttagcaaaataatttctttcattcttctctgttttctgctttaatatttgggttgcttgttttcctattaaaagaaatcagtacaatactgacattacaatgttcataagtgggcatttggtctagtggtatgattctcgcttagggtgcgagag

SEQ ID NO: 379386 - DNA, 8479 bp, Cannabis indica
ctatttctttatggaaagtcatgcttataatttttctttcaatctcatatatgtatgtaaatatttatataataaaaagataagataaaaagatattattttatacgtataattgaatttaattattttttaaaataaaatatattttaataaatttatcaatcttatataaattaaaaatactaaaaaatatatatattagatatagaaaaaaaaaaaacaaacaatttaaatattttaatatttaaattcaaaattgatatcttaatgtattaaaaaaaaaacaatgcagtcttattttcttaaaacatcattaccacaaaaatcatctctattggatggattaaaatcataactatctatgaattaaagtacgcttccactatttgtgttacctttaaattaacaaaaaaatattttttaaatctatgtttataagtttataataatatataatatatttatttatgaaattaaattttattattgcattgataattttaatatcttattgattcataagattacatcaaaccaaagaattttcaatatctctcaatggactagacttcgctaagtacgaactctttcatttaacctaaactgcttaattgctcttttaattgcccttgccaaaattatttattctgatggagaaaataagtagtgtataggtgtagatacagagattatgacttatttcccatattgaattcatacacactattttgaactatcaaaaagccagacaatgtatcacttcaatttttcgaaaaggaagtgattaagtgtgaaatattttcaatatttcttctaatgtctctgacggaaaacgtgttataaaacctgaccgcgcaaatgcatgaagttcaagctagagcaaatcactcatttgcaatgactacttgctttacagaagctgttggtcaacccatttggctataaattccattaatgccttcttgttggaactaacttaattagaaagagagatgttaacccaaactatttccttcaatcacatatatttatattacgcaaatgatcctattttctcacttcacatgagaggtaatccataaattacatagcatatctttaatttggcatgagtgtcaggttaatcctttggattttgaaagtcccaaacatctatactgccattccaagcatccaaacatgtttgtctctaaaaacagcaagggggatcagctcggagtggagttccaatattaatagcagtaaattcggctaaaagtaatgtagcttagttggtctagtgagacaaccatcgactaattgccccccaaaacgggctcctcaataaaccatttgaagaccaccataattttgtctacaccagccgtcatcaacatcttgaacaatactgtctactctactgaaaactagaccctaaaaccatgaagaagttaaaagacaagcctgaggtacaatgtaatattagatcaaacaaactttgaggaaccagattacaattaaacaatgtatgatatactgatttcaactggttcgttcatgtgatgagagatttctattaagggggaaggaaagaatttgtaccggagtttgtcaatgacttaattttgtgaagcttatcgttaagattgggttggagtagctgtggtgaaaatagctttggcctttccaaagctttcactgctgagtttgcagcatggttgatctgcaaggaaattagaggtaatacttaaagactaataaggaataatgtaatacgcccttcttcaatctttccgttttaaaaacgcatgatatgttgttgttatattttggaattttttcatttttacactttaaaatagttttttttttttgcatttttatggaattccatataaaaactattattgcaatatggaacaacttaaatcgcaactaaaattcatttagcaacctatatagaaaccaccaaaaaaactactttaaagaatctaaattactaaaaaaaaaagttaaaacaataatataccaagtaatttcccttaaattttgtagcacaagtcaaaataatatacatttaaaatagccttttattaattttcttatcagaaaaataaccataaaaaaatttattagtaaaataattttgtatgtccaccaaccaccatatattatagactatttttcagtgagattatttttttttgaaacaaattttcagccagattattttataaaatttagtatttcaaattgttaattttggctaaacttgactatagtttactaaactaaccaaagctaaagaaaatattccagtccacagacacattacataaatatacatatacatataatacagagcagagaatatttcataccgagtttgaagccatctttagaaaaccctttgccagaggcacaatgcaaaaccttttcccccaaataaaaaaaaaaattattaacgtacttaattgctcatattcatggttgataaaagaatgttagaaattgaggcctaaattagaaagtgagaactaacattccccggccaccggacagagcttcttccgatgggtccttccattcatcaattctgcatttgacataaaaaattgaaagtcataaatatatatatacatacatatgcacatatgtacctatactttggcacaatgagagacttacacccaaccgtaacgccggtcgaaaagaagacgcttagaagttggagtggaagaggagctggttattgccatcgaattctttcttctcctttttttctcttttgcttactactcacaaaactactcgataataattagttaattaaataataatgaataggccacacatcaaatagggtaagatttaggcccattacaatttagaacagaagaaaataaatgggctaatcgatatgaaggcccacaatatatgggctagctcaagaacgcgcgggtgatgtttatgccttactaatcaaatgtctaaagtaaaataattctgaaaagaaaaaaaattctaaaataaatagtgataaatcagtttcccgcttctttgaatcgccgagtcactttctgttaaagagtttgggcaatggcgaatgatatagcagcagctgaaattcgaggtgaggtgctgaataactcaggtgcttctctttgcgtctgtttttcgttttccgatcatgtaaaattttcaatcgaagcgtagttttgaaagaccaagagaataggttttggatttggatttaaacattttattttcaaatttcaacctactcggtacatatgtaaatatgtgagtttctgattatgaaatgggttagtacatacaggtgttggtggggtttgtatgatgagcaatacatggagagaggagcaacactcatctttcataaatttcatctctaccttcctaagagcaaattctttccgtcttaactttgttgcgattgctcctgtaatttccgtaggcataattttcatacaattgttttctatgttatgttagacccgaatcgtgaactcatttttcgttctaggatttcattttcaattgtggcggttcgtctgtggccttcatttttgtcaccaagtgggatgaaaataatgtctcaacaatctttggcaggtgagtaagatggttctcccagtcattgttgcttcattctcttctctttctttttgatggaatttgtcgtgtgcagaattcaaaagttgaggatgcagtttggacacctctatattgtcgtcacccttactaccaacgaccaaaatgactcttttgttcgttcctactttaagtaagttttaaacactccagttctccaattgagtctcttttcttttttggtacaaacagttattagttctatttgaatctttcgttaagatttcaaatggagcttggcaagccaacatttataccagttcgagatatagagatggggtttgagaagattgtaaagatagctcactcctttggaggtttgacaattttcccgaacttcaacttcattgagttattccaattgtttttttttatttctttccccaaattactaatataaatatcagtatgcaagcgacaagatgccaaaacaaaattgaaatctgaggtcagtaagtgaaaaatatagttccttgtttaatacgtacatagcataaccatgatctaatctatttgtagtgcggtatttctttcttgttttttaagagaaaacaaacagtgcaaggaatggactatttcctgaaagtggttacatccatcccgggaattgacagtcatgacgcaaatgcggtaacataactaaacattgtgaaattctgacgaacatgatgttgtttcagtgccgtgttacttgtttccatgcatttaattctcttctaaaatgtgccggaaattccaacttcttttgcacaatttactaagagaagcttctatatatagcattcatcatttcaaatgtttataaacttgtgctatgtttagtaagaatgattggagatgagaacgaatgagaagagactaaaattgtatcttgcttagtacggggagaagtggaacaaaaagacacatttgaattgtagaatcatgtctttccaatggaagtattgaaattgttaagattgagtcctcttatttctctcattctctaaactgacaaacacgagattttagtttttggattaaaaaaacaacaaaaatttactttgcgtgtccaaattgaagaaatgatgagatctttccgttggagggtgagctactaatgtattgtatgaatctttcgtagcttttcatttaagctgcttattaaatttgaattaacatatttcttttctgccattcacagcttaatcaggctattggttcgattgaagatattgccaagcaatccaaggagtatattctggaaaacactgatctatcggctgaaaaggcagatgtgatttttaagtttttcagggatccaaagttctacctgggcccaaagatcaactgataaaagaaactttatgtaaattttcattgattgtcacattttcttggataaatgatactcagactaattggattaggcatttccgtctttaaatatatattgtactcgctttcataatccattctagcattatccttgcattaagattaaagaccaaccggaccacccaaaacttctacattttgaagtaacaactttcccattttattagcttttaaatgtacaaatgaatttgcattgtgataatgttagaagaaaagaaaaacacttgttttaggagaaaagcaaaattaccatgccttttattgagtagtatgttattgttgatgctaagaactcgtcaactaggaaatgatcggaaaatcaacatcaaagatgaaattaagcaaaatgaaaatttggattaagaacttttagatgacacttagagccaggagaaaaggattgtattgcttggataaatgctgaattacaaaatcttccaatcccctttcaaatctaggtatggggtatttataggttctaatggcttgaaatatattggtggtcctcaggagacaagctggacgctctaatcttccaggttgcaagtgtaggaggtggtcttgcgccttgtactgctgtcagttgttaggtggtataggtttgcaggcgtaatggttgcagtgtatcctttttcgatgtgtcagggcatattggtgagacgcctccactacttgtaccttccctcgtcaactgaccatgcatgaagcttggttgtacttcatctgcgtgttcgccttgtccttgtagttgcacgtacactaattttcttctcaacacttagaaaaattttactaagcgttgattgcatcctcgagaagtgcattgtcaagacgctcgcaagccatggccctctttcgagatctttgcaagcaaggcaccattgatggtgccaatatgcttgcaagagaaggatctatgctgagatccttgcaagcaaggcatcactgatggtgtcgagatgcttgcaagggaaagatttatgttgagatgcttgcaagcatgcaagcttggtgatgttgagatgcttgcaagcatgcaagctaggtaatgtcgaaatgcttgcatacatgcaagctttgttgagatgcttgcaagcttggtaatgtcgagatgcttgcatgcatcctatgccgatatgcttgcaagcatgcaagcttggtgatgctgatatgcttgcatacatgcaagctttgtcgagattattacaagcatgtaagcttggtgacgacgagatgcttgcatacatgcaagctatgccgagatgcttgcaagcatgcatgcttggtgatgtccagatgcttacaagcatgcaagcttgctgatgtcaagatgtttgcatacatggaagctatgccaagatgcttgcatacaagccttgtcaggatgcttgcatgcaagcttttccaaaattcttgcatgcaagcttgtcaaggttctcgcatgcaagcttgctgagatgcttgcctacaagccttgccgagatgcttgcatccaagccttgccaagatgcttgcatggatgcttgatgagatgcttgcatggattcttgttgagatgcttacatgcaagcttgccgagatgcttgcatgaaatccttgtcattatacttgcatgcaagctagccgagatactttgcgtgcaagcttgtcgagatgcttgcattcaagcttgccgagttgcttgcatgaaagcttgcctagttgcttgcatgcaagccttgtcaatgtgcttgtaagctgaagcttcttgtctcgacgcttgagtctacaagttgaggttgcatgcaagccttgccaatgtgcttgcaagctgaagcttattatctcgacgcttgagtctacacgttgagggactcgaagtgtgaatggttgtggcttcatcgccctaaattcaatgataaaacttgttaaaaactcgctttgcttgactaatctcggaccattgtagcattaatttttggagttaatacttgcccctagtccgtaagaactcttcaagttgaggttgcatgcaagccttgccaatgtgcttgcaagctgaagcttcttgtctcgacgcttgagtctacaagttgagggactcgaagtgtgaatggttgtggcttcatcgccctaaattcaatgacaacacttagttaagaactcactttgcttgactaatctcggaccattgtagcattaatttttggggttaatacttgcccctagtccgtaagatctcttcaagtgttccttgcaaattgagagatttgagttcttcaaggccttatcttgttcgaaagtgaaccttatctttagcacgtaccttgaggcaacccttagtatataaaggtgtcttcgtgagtttttcattcacttcactgcatcctttttggtccaatgccgatcctccttctactctatctaagaggtaataagttcaattcttagctaagacatccctagttttcaagaactctttcaagtgttccttacgaattgagagatttgagttcttcaaggccttatcttgttcagaagtgaaccttatcttcagcatgcaccttgaggcaacccttagtatataaaggggtcttcgtggatttttcatccacttcactgcatcatctttggtccagtggtgatcctccttctactctatccaagaggtaataagttcaattcttagctaagacatttttagctctagttttcttctttttgatcttattttattctattctatttttttgtaatttttttaaacgtgcgtctcttgctcatgcttgttgagacgcttgtgagcaaggtcttataaaggtgtcgagtgttgggtttgtagtactcaatgaggtacgtagcggaagtatttatgacgattatcattgtaccatactctaagatctccatatgtacatatattaaatctggaataaaatatgaaaaggtatatttacctcttgaagcgaatcagaatatcttcgaatcatttcataatttgtatcctataatggtgatgacgaactcacaccacaattttctaaatcttccaccacacacaaggattagaatgggctaattaggataaaactatataatgtgttcttgagtttttctcaacagatgagcaagaactactcttttctctgagtgaataatgatttaacttttttaggttttttaaattatacgtatgtatagatttaggatatatcgatagattaattcaaaccactaacataataataaaagcttaattaaataaattaattattattttcaaatattaaaataatatttaaatatttaattaaatatctttaattgattctgctatagatatttatttaaatttaaatatttagcttaaactaaatatctaataatcgattgagaaaatctcttgactacctaagagaatctcttaatcattttgaggtaatatctccgttgggttttatgccctaaa

SEQ ID NO: 379387 - DNA, 4573 bp, Cannabis indica
agttgttttggttgcaaatctaatttcccttactcgctgtaagtatattgagatggatatgcatttcgtgcatgatcagatcattgccaaggagctccatattcgatatgttccttctattgaaggatggcagacattctaactaaggccttacctattgatccttttcattatctaaaatccaaactcaaataggttccacagcctttcatttgaggggataataacagtactgcaccaaactattaaaacagttttagttgttagttaaaggctattatttcagttagtcagaaagtttgttagctgattttattgttcttgtgacacaagactgtattttctcagtataaatagaagtcatgatcacaaggatcaagcattctatgccaaatcactgttgtctataattctttgatattttgaaatcctttacactttatctagatataaaactactaggggtaattattcgactaattgacattaatcacctaaatcctgtaataatatttcatatttgcactagacaaactttgaagttaattatttcactgttaatcatcaaaaagcttactttagtaaagcttattggtaccattatttatacagaaaagatatgcagtattactttacatgattgctcgaaaatgaaataaatagaaactatagacagtaaggacagtcaggtaaagtgaaaaaagaaaaagaaaagaaacaaaacaaaacaatgtgtcggaaactgatttttactatgagattctactaacccacttcttgcttctcatttcaacctgatcatcttagcacagaccataggtaacagcactaaacgacaatcactcgatctttactatcgtaataatctttgaaaaacatacacaaagccacataggagtgtcctaactcagaaaaaaaaaatgcaggtcatgtggacctcggcctctataatgttttcaattgacagaatctaatatatatgatcgtgttatcattatttgggagtgacaaaaatgctctttgatcaaaagtcaacttcatcaatgctactatgcacatatatttatttattattttcttaacaaataaaataaaatcaaatggtgtatggtatggcttttctgtctgtgtttgggatcagagctggattaaaagtcaaaattcatgcttaaaacagtaaaaaacttacacttttccataactttttttcatgtaattatctgcctcagctaatagatagacccctctttctctttctcgctctctatttttactttcatttaacacgtagctccaaaagcatttaaagacgatctctatcaacctgtaaaaatattacttcttttgaggaaatgtttctgtcacaaccattaatattctaacatcttcatcctaattcttctctcttgttcaacctcttgttttaaacagatatataagagtagtactagtggattggaggcttgtgttaagtacttgtctcttgctccaaacgaagaaaactaaaagcatcagcaaaagggttgttaactttataaatctgaatatggaagttcggtctagaagacttagagaaaccagcccggacagagcaaaagtctgcctcaggccacgagtcaaaccagtcaaaaaagtccaaattgtttactatctctcaagaaatggccaccttgaacatcctcactacatggaagttacccatttagctgatcaaccacttcgtttgagaggtaataaggctagctagccaggctttgttttgttattattttgttattggtaatggtttgcttacattgtctggtttggcttgctttgatgaacatttatagatgtaatggataggcttacgcttcttagaggcaaaggaatgccctcactctactcttggtcttgcaaaaggtgacattttttattttttgataaaggctctgtgatttttgtactttgttttatttttagtgactaatatggttaagttttgtaggagctacaagaatggttatgtgtggaacgatttggctgaaaatgatataatttatgcagcagaaggagctgaatttgttctcaaaggttctgaactagttgaaggctgttctggtcagtaatactcagtttagttttcatttaacaatttctctatgaaaagttagactggttaagactcgtaaactgttatggtgttttcatgtatgttttagaaagattaaaccagattcagataagcagagacttcagcttccaaacaagaccgaaaacactgggaacagagaagtaccccaaatacgacgacgttcgggactacgaagaggaagaagagcccgaagagtacgaagatgaagagaaggttagctacaccagctctacaactccccattctcgctgttccagaggagtttccactgatgaactcgaagaaccccaaaatcggacccaaaaaacttcctccatcagcgacaaagcagaacaaaccataactgtcaccaccaccgactccaatcacaacaacaacaacaaccgttctaaaaggttcgacgaaggtgtggtagtggatcgagtcatatccgaatcggcggtggctccgagtcgtaactcggtccttctccaactcattgcctgtggcagctcagcggtggccaaggcgaaaagctcgccgtgtgtgaggccgagtgatgaaatgagcagatcccaaaggagcattagaagtagttatagtaatgttaggagaagtgagagtgatcttgggagaggggttatgtggaagaacgcagtgaaaatggcggacgaagatatgattaactatatgtcggagaaccccagattcgggaatcttcaggcgcaggagaaggaatacttcagtgggagcattgtcgagtccatgaccgatgaccgagccgccgccgtcgcctccgccacaccggttcttaagaggtccaactcctacaacgaagaaaggtaaaacaaaaacagcaaatattcttttattccattgggcttgggcccattcgtttcgtggccctataatctagggttttgtggagatagttcttcacctaatcatcgtccatggaacattttttaaatattaaaaataaaatcattagtagcttacgaatttgtctcacattatctcttttgttttagaaaaatatatttttttttttataaaaataaattgattttggtaagttttggtttatttattttttttttttggataaattttaataataactctctgtaggtggaagttaggaagaattataaagatacattgttataggatacatgcacacgcatcataatatataggccaaggcattagagaatacactttatagttgttgtaaatgaaatttgtagggtagatacacttttttttatgagctcctctaactgaacaactttagcgtacgtaatgttacataacataactgtaattaataataagctataaagcaacatttgcattgacactactctagttagttgagaaatgatttttttgctttgcctcctctgatttattctactttaccttgtttttatttatgaaataatataattgttgtgttaaattacattacaatatattagtggatttatttgctattatttttattgacataacaataataataatgccttgcgatctataattatggatcagaagctccaaagctgggttagaggaaaatatggaggatgtagaagagaagaagaaaccaaagccaaaattaatgagtggaaagtgcatacccagaaagagatcttcaacttcgtcaaaactcgaacccaacaaaggaaaattgatagctcttttttgctgctaattaatatatatcataattaagttgttttattttattatgagtactaatagtttgtggggttgttgattactttgatatgtaattattagtcacttaattatcgagtttacctttcgtattctcattatgatcagacctacatatattattacttaccatatgatatggcatatgaaagaaaaaggtacgtgtaaaagcaatggtagaagtttttattgggaattcgatatactggaatcatgcatgggagttcctttattgttattgttgactactcattccctgttgctaagttgattaattatcatcattattagacatcattatcgatgtgaaaagaatgtaggaataggataatcttgcacggacttgagaaaattctggtaagttttatttgaagagctaattttttttttattataaaacatatgtgcctgatgataattctcgttttgttgttttttttttcttgttttgttttgattttaaaaaaataataaataaaatcatattgaaatttttacactaaaaatataaaatatcaattttattacatatatataacaacacagtcacatcaacatttttaccttctctcttaattttattacacatataccacttgcacatcaaatccatacacctattaacatttttctgattttttttcgtcattttctgtttagatcattgcaggtcttcttttccagttgattttgccagaattaatggttgtattt

SEQ ID NO: 379388 - DNA, 2718 bp, Cannabis indica
ttcctgctttcactctctacaatatccaattaatttattggattcaaactggctaatgagagttctaattaggttgatgcttataagcaacgaactccatattttaatgacatttttgtaatgcaaattattctttttgctgcaatctatacaaactcaaaattttgaataagggataagaataaagagagttcttgagtagttaaacatcaaagaggcatgactcgtagtaatataacaatttcatctttgtttggccaaaaaacacactcatttttttatttttacaaacaacaacaatttaccatttagtttcacctaacttgagtttgatgaaatgagctgtgttgaaatcacgagctctatgatcttatatatatgaagaacaagcaatgtacaataacagaattcagttaaagagtagcaacttttgcctaaacgcacagctcaataactaacttataaccgaattaactaacttcaaactaccttcactaacagcctacttatttgacttttcctttaataacgaagttgaatgcatagtattgtctgaatggcttgaatctatctcactaccttccccatcatccttaaaagcaaaagctttagctgtcaaactagggtgcactttgttacttgaatgtttaacaccaacaacgaaatcttgagtatggtatgtttcaatttcgctttctacttcattcctatccacactcccaaccctctcttcattgactttactcaagctcctgctaatactttgcatgttctgcatcacagcactagaagcatcatcatctttataatgttcatctcttgcctcctggccattacttttaccttcttcttctgtttgatcctccaataattttgcatcctcaaactcaattctcttgtcttcaatctcttgctcatcaattccctcctccctctctctatcatcttcatcaatcaaatcttccacttcctctggttcttcttcttccactctctcttgatcatgcccatctatttcatcatcttcactcctaccttcttcattatcgttttcttcttcgagcttaatttcttctaaatcgtccttcaaatcattctcctcttccttttcaacctcattttgagtgtcaacttcgggatggaggtcccgcctcccaagctttatgagttcaaccccattatgcatcttagctgatatcattgaggagctatctacatatgccttattcttatcatgtgagtgctttacttgataaagcaaccagaagcaaatggcaagcaacaaacatacttgaagaatatgtagttttaccttgaacccttttgacctatgatttttgctaggtgattgcttcaacattattgagttttcaaatatattcaactctaccaaatggctacaacaattggtactctccaatctgtataaagtaaagtaagaaagataagagacagagactccattaataaccacacctgaaaaaagcaaaatccacagggctgtctcctattaaaacccccaacctacacttcattactgagaaaagagccacaaacaaagttaatgttcaagtaccaatattacttaattatgcaaataaagtttttagtttcaatgctccttttgaagaataaaagactgttttccaaaaagtttaaattgtcagggctagtttttttttttttgtataagtcagggctagactttatggtgttctcaatactttcccaaattggttggaattaatgtaacacaacacaaaaaatagggatcgttttggctaaggcagttacgctatctaacagtacatccaaaaattaaaaaaaaataacaataaaaattaaacaaaatcaaagataacattttatcagaaattgaataattagaaaaggcaatttgagggtgacaggtacacaagaaccgattactttttacattcgtaccattaactttagaattcaactttataggagtagaaagcacaaaactcaaatcaaaaggaaacccaagtttcaattttaaggacacccaaatgtttaacactggaaagaaatagaagaaaattgttacagcaataaaataaatgcactgaaaaagataaaccaaaaaacacggtgaatgtaagtagcttaccactgggaattaaagctcagatagcaaagggagcgcgagcggatggtagagatggtctaaaatggagtccacaattccaaagatttttttgagggaaaattccaaattttatttataaacgctgtgagagattacattttctcccaaatggaacgttttttttatttttaatcttttgggtgtttagttttgttctcttgaagttatagtaatagcgaaacatttaaaagagaagaaaatataaaaggaaaaggattatgtgtgtggtggaaagggtgagtgagtagttgagggtgtgaaaaatgcatgggtgttggaatgaatgaagaatgaaataaacggataccaacggcaaaaggaaacatcatatagaaggaatgacattgtttagtgaaggtgagagacagtgagatgtgagagtgaaaaacaatgccattaatagcttttacttcaatactatggcccgcccacgcccagacttgtgtgcttaaaagctcttcttccaaaagctacattgggagatttactttttttgtttaggctaattagtaatttttctccctgaagtttgacatgtactaaat

SEQ ID NO: 379389 - DNA, 6513 bp, Cannabis indica
atattagtcttttttataataaactttacataatttacatagagtttcattttcaatcttataattggaactaaatgaaatagaatatagtttctttttatggccatattctttataattgtatgattttggttgctgattttaatgttatttcttttatttttgttaaacggtctgctaataaaattgcacatacttattgcatctttaattttggatgatttagtttaatgaaatttaatcattattcaaaaaaaaaaaaaaaaagaaatagaaagagtatatcttcatttattttggattttttggggggtttatgtttgaatattagtttcttatgtttttaaatcttaattttaatttaagatataatatgaataaccattgagttgtatactcatcacacatctcaaaaaattataaaaaatattataaaaaaaattattacgaagatattaaaaaagaaaattcctctgtactttgacacttacataattttatcttttaaattattattttttattaaaaatgctctttcaactttagaaataattataattttatctttcgcttatttttgcaaataatttttttgtttatgtaagattgatttatggctaaattactgtaatttgagagtatgcaaaaaaaaaaataattgtatagatagtacgataaaatttaagattgtataactgtaattatatttgttagcttaagttaattaaataagttctccaacggtaattattcgcttaatttatagtcacatcaattcaataaattgtgtaaaaaaattgagtaaaatacacataaaaggacaaatttataattattttcgagaaccaatttttttataaaaagaaactaattggttgttacgttttttattaaggttatttaagatatttatccacgaattatgatttatgtattattgtgagcttgaatttttcaacttgtcgaaaaaagtccccgaactattcacaatattgtaaaataattattttatcaagttttatcacacgcaagaatgatggtatagctgtttagacaagttttgggtagaaggcttttcattaaaagaagtgttattgtcaatcttttattacaatctcttaatcaattttatccttgtaattacaatattatccttgtaattttttaaaaaattttaaataacttaggacgtcgaaaatatatttaaaatattttaaacactaaattagaatattaaaaactttattttcagtactatatgttttttagaattttaaaaaatttacacgaataaaattataattataataaatactaaaaaattaatattttaatatgtgatttcgtgaagatgcactaaaaatcgagaatataataagagattctaattaatacgatgttttattactaagagaagccaagtcaacgtaaagccctgtcgaaacttggtttccaagaccaaccagtaataacatctaataaacatggcagagtctccttcatttacagacgcgtgggctgtttcaacattacccaaaccaaactcactttcaaaacgctgtcgtttcatgtatttaatgatcaccattctctctctttctttctttattcattcatttatttatttattagtatattactacttcgagagaaacaaagaagaagatacaaacaatcccattttacaacaattaaatattttcccggaaagttgttttctttcctttcctttccaaccaaactttattacatcgataaccccaaattctctgtttaaccaaataatacagacaaagcatttgtcttttttggttttgtttttcttatttgtttatataaatgcaaaaagtttgagactttgatttgaaaaaaaaaagctcaaagttgaatgtcctttacttggtaataatgatcttgttatttcttctttcctgggttttgattgggaaaatgggttgatcttaaagttttgagctttactgttttgttgtgtttttgaggtgaaaaggtttctgggtcttcctctattttggttaataatgtcttcttctgagtctgaagttaggttagttcgttgccctaagtgtgaaaatctgttaccagaacacccagattactctgtttatcaatgtggtggctgtggtactattctcagaggtatgattcattttattttatgttaaataataatgagaaaattggatataaaatcatgtcttaacagttgtttagaatgttaaagttttcatttttattacttttactttgttttgattatgtaaattgtgagctattcaaggaccattgtagtgatttttgtttcttttggtacacagcaaaaaagaaagtcccggagaataataatgtgttatctgaaaattcagttgaagcaaagggtgaagaggtttttgaggagaaattagagggtttaatggagaaaagggttgagactgaattagggaattctgggattgagattgttaggaggagaaatgagagatttcctaatgtgattagtgttagtgaagagttaaacaatttaaggctagagaagaatgttgaagagaaagaacattgttatggtgatagatatggtagaatgttggaaccccgaatggatcaatggactcgcggaagtaatcaacatatggatatgaacagatctgagtttgtaaactcaagtgtaggagatttgacagcccaagtacataggttagcaggagtggatcgaacgggtttaggaagaggtaggtatgaggggttttatgggaacaatggcgttattgctgagcgtggtagagcatcgaatttgggttatcccggggaggggccatcaatcaacgaggcgtattattttcatggtcgtgaacagcagatgagtagcaatgccccccgtgtcaatgtgcctaatggagttgaaagtttagagaaggagagagctgagcttatcagaaagttggatgagttgaaagatcaaattagcaaatcatatggtgttgcagataaaccagtagagaacaaacctgttgataggacccctcattatcctatgccaagcacttactcgaactatagtcatagaccgccttctttcatgactcgtcgtaacattgatgtccccaacttttattctcatcaaaatcatttcttgaataagattcctgaatatgaagatccaattcagccacaaatgacaagaaatcctcaccttgttccgccccatcagtaccctcatagtcatacatctcgcgattactatacaggacagtatccacatgaaacctatatacaccctcctacatgctcttgtttgagatgctacaatcagaactcaagggttcctccccgagttcctgttacatttgagcggcagagtcatcctccactgcaatctcttgatcctatgctgcaaactagatggcaagttggccgtgattcagacaatgaacatgttagtcatcaaagaaagccggtggaaattaataggattaggcgtttttgccgtcccattataggtggtgctccattcattacatgccataaatgctttgagcttttgaaattgcctagaaagtttagaatgagagacaataataattctcctaaaaggcttcggtgtggttcttgttcgactttaatttcaatttcaattgagaataagaagcttagtacttctgattttgaggaactcaagcagatatctccagatagccctgtaagttcaagttgtttgagtgtcaaaggtgccagcttgtgctctgatgatttcaaaagttctggttacaactttcggttggctgatatgggaaacaattctctggtggaagatgaaaggctgaactttgatgtgtctgagaagacgtggggtcattcttcatcgccttccatctcttcaagggaagaggagaaccgagattgtgtgacttcccttgcttctgagcccgctgagatgcctttaagagatgcatactcgccaacaccaccacgctcacctgtctggcaagagtccaatagtcctaagcgcggtccaagcagatatggcgagcagggaaacaagagcaaaagaacggtgcgtaacaatatggtttttagtaggatgtcctctcaaaacagttctgttaaagatgcagctgaggccaccgaactggatgatgtttcctttaacgaataccaaacccgagactatgaagaaacagacaaagaagatcaactcaagctcagcaaaggcaatgattccttctttgtaggtttcatcaagaagagttttagagatatgtcaagatctaataatcataatggtgagattgagaggcctaaggtttttatcaacgggcagcctatacaagatcgagtggtcaaaaaggctgaaaagatcgccggtccaattcgcccgggggattattggtgagtcttcacattaaaaatcaagtcttttgtataaattcaataacataactctaactcactatgctttttctatcaggtatgactacagatctggattttggggagtcatgggccaaccttgtcttggcataattccagtatgttcaattgattttcggtttataaatttattatgttgtccacactgctgaatattttataacaaagcatttttttcggttgccttcagccgtttattgaagaattcaattatcccatgccaacaaactgtggcgcgggaaacactggtgtctatgtaaatgggagagagcttcatcaaagggatttagaactactctccaatagaggacttccaacgacaagagacaaattttacaacatcgagatttctgggagagttttcgatgaggacactggcaaagaactcgatccccttggcaaactcgctccaacgtaagctcttacaaagcatgctttagttaatgattccaatgtcatattatgtcatgattctgtaaacactaattcggacactttcctaaacagggttgagagaacaaagcagggatttggaatgaaagtgccaaacatggtcttatgatttaaagcttttggttcggtttcagattcttcggtttctcaacaaaggtgatcacctcaaattgtaccatgtttattgtccatttttggttttctttggatctccttaatccaaagctaaaatcctttgattacgatgttgtagtaaaaactactgcgaaatcttttttgcttgttcatatatgttttcgggtagattatgaggctctaactgattcattcttagataatttattatttggtttgtttttgtagatttaagtcaaaattcttttgattgtactattttgtaacaaacagatgaaaaattttatttgaatttacatttttattagttcttgtttttaccatcttcttcaatattcagtaacaatacttgaattcaagtagttgagtctaggcatgtttatacctaatcttcaaagaacaaattaatctgaccaaagagtagggttgaaattttaatgttgtaattgctcataataccataaatatatggtcaatttctatgtaccaaaagcaagaagatgaagactttcttgaaggatgattctttatagagaaatgttaagtgatatgttaaggggctaagcattcttaaggtaaaacatcatatccatgttgttttatatatatatgaaaagtaatggtatgtgcttacactaaaatattagggaatgacataataatttttctcaataaattatgagattatcacttaatttatgctatgttttgtagaaagaaggaagagtaggatggatggagagttttgaaaggatggagatgatagttactcatttttgtgttgtgtggtattagaagtaaagttagaatgatagagaataaaataaatattaaaattattattttattatttttaatataattatatattttattttaaagggtagaaaagttattttatatattgtcctttttttttctttcaatttccctatttctggaaggattaaaaatagggaaagagtctccttccattaatcctgttccttcccttctctcccttgccaaacaagaaaagtcattagttcctctatccttctctctccactcctctcctcccctctgccaaacatagtgttaggataaatggtattttaaattctatattttacaaaaggctaattaggatttttgtctcttaaactttgacatgtaccaaatcatactccctgaacttttttgaccgttaaacattccctttgaactattaagattatcgaatttaaggacttttgtccaacttcattcaattttactaatttagtgattgtttatgtactaaatcatgttccccagactttaatatctaccaaatcatgcccctcgaactttgacatgtaccaaatcatgctccttgaactttcatccatgttggaatttccttaccaaaataagacaaaaatccttaaatctaacaatcctaatagttcaggaaaatttttaacgatcagaaaatttcagagggcatgatttggtaca

SEQ ID NO: 379390 - DNA, 7719 bp, Cannabis indica
gcggtcaattctcatctacatctaccgatgacccaatacaaaaattaaaaaaaaaagttataagtctcctacatctgatacttagtttttgaaattgtctaaaaccgaaagattactaaagaaatcagcacagcgtgatgccttataattggaaggaaaaataaataaataataggaccaaaatgtcataaaaattatttttaaggtattgaatggtctagttcaatgtttagacattttggttcaatacatacaaagtaataatccaaaaaacagaggcaaacttgttgtgaactccacacatgtttacaatgaatgggatgccgatacgtatataagatgagaagctggttacattacattacacatatatctttttgtatgaagttacaaaattgaccattaatactctctcccaacgagattatttacaatagcacaacaacagagataataagaaataataattatactctctaccagccaatcttgatccgtgcactatgccaagtgtcaaaggcatttacgacttcaaggcaatactttttcttttttcttttcttttctttggctcaaaataataataagccagaccacaactcgggtataacactctttaagccattgtaacataatctgaggagaatgtatatgatcaacctctttcaactagaatctcctgtaatgatccctggtaaagaatggatgcctaagggcttcacgagctgttagcctgtgaatagggtcatatctaagcagaccttgcaagaggtcgatgagttccccggccgagtggtctacatgctgcattattagattctgccaatgccaaaaacttgaacatttaagactccaaactcggatacaagaaatgtaaaacaatggtgtgtatagagacaaacctgaagacggggtaacttcaggacggctttgatactttcacgagaggttgctccttctggccagtccaatctaccctttttcacatacttattggcatgatgactgaccaagtagcgatattatgtaacagagatacaaagaaattcattagaaaagatgaactccaggttttcttaaaacatcagtagagatatctaaatggcacatactctgctcttttaagcatatgctgtggtaacgggcctaatgccctctccatcattgctagatgttctaagttctcatgtgtctgaaacaatgcttctccctgcaatcgattataatatttcttttaagttctttcctatggtaatttatatctagcatatagttgatagatgaacattcacaagactccataatattatgcttaccgagcataattctaccaagatacaaccaacactccatatatcacatgggtaattccatccaagtcctgaaaagcatggcgtaaatatgataacaaagatgaaaaagggtagattgaacaagaaaacaacgcagcagttcataccaagaatcacctcaggagcacgatagtgcctagtagagacaatatagttgtgttcttgatgttcataggctgtgctaccaaaatcaataaccttaatagcgctagatcttggcaaccttttatggaagattccttccttgggtgatcgagaagagacctgaaataatacgtaaagagcttattcactgatttttacatacaaagaaataacaaaattaaaatttggaataatgtcaaccaaagagttgcatgactaatatcaaactaaaggacttctgttttttaaatttaagaataagtgaaagctaattagattgggggaaaaaaatcagctatagggaaacataccttgtagtcaggcactttcacatattctgaagacacaaagagtatgttctctggtttcaagtcagtatgaatgagccgcatatcatgcatgactgcaagatttataaatcagagctaaacgtaagtacttatagcactacacaattttatcataaaattcttcagaaagtacagcagtacgcaaacttataatttttttgaaacaaaagcttaatattccgttataatacaacaaaagaaattagaaaaagataataggaacattggaagtaacaactactcacatgctacacattccaacagttgtcgaccaagctcacggacaagatcaactggaaatgggcgataattatttttcctcagaaaatcatataaacttggtccaagcatctcaaatacctgtcaagatcatttacattcaacaaaaactcttaaaacccaaaaaatgataattgtaaagctgggtaatcaagtcaattaaaatcattatatacttacaatacatatatggttgcgatagtcaaaccagttccgtatttgaacacatctgcaaagaataaacccacataacaattaacataaatttcattttgattaaaagcctcagatatactcattcaataaacttaacataccgagtgccagttctatcatattttccaagcaaatgtaaaacatcaatttcaatcattgctgcttcacgatattttttaatacttctcacaacttttattgccaccatctcctttgtctccctatcccagcattccaaaacctgaccaaatgtacctatagaaggaatctatgatgtgaggagaaaataaaaaatcaaatacacatccttacaatactccaaaagagaaatctaaattcagcaacaagcagctcaccttcaccgatttttctgtggattttatctgcacatacataaccaagagtgtaagtttaagcatagacataaaagcttcaaacaaatatagtacttaagaaataaagccatcaagtttagattaaaacaagtagcaaataatggcagagtgtaggcatgttcttaattaaaaaatttgaaaaagatagtatgtcgaaaagaatttgtaaaatataataatacgtaaataaggtgctatttttagtatagatatactttgttactcaattcattttgtgtcttcttcaggggatgagcggaatattattgccatattgtgagagatatttaacaatttcacatataaatttctagtcacacaagagaaataagataacagaatctgacatacatagcttatcagaataaatgactaaacatattcaaacgtttgtgaatcctgcaggcattggatagtgcttaaggtttcccaacccctaacaactaaaaccttataatttcaccaaacatagaaaaccattgagaaagtgaccaaaaatcaaaatgcactgggaatgtggttagtaaatcttcaatagcaacaagaagaacataataaatgcaaataaactcttcaatggtggttgaatttaattacagcgagaagttaaattctctccgagcgcaaacatgtaatgcccatctttgtcgtcttctcgccatgggggagagcttctttgagtcaatcccttaacaaaaagactaggatggtctgggagtacccttgaaggtccaaagcttgtcccatttccaccatcttgtccacaaaacaagtctgactgagcctacacacaaccatttgttcatactctactaaacatatacttataagaaaacttatccctctaccatcaactaccttaataaaaaaatcctcatctttttatcaaatcaagcaagcagaaaaggcaacgcaggtagcaaaccaaaagtactagaattaaccaaaggtatgacaatagattaagaagtttttccaaatttctaatcctcacatgtctataaaatcaaacacggtttaacgacaaccaattattacactgagaaggggtcaagatatagaaaacaagttttgcatatcttttatgtcaatgataatctaaacaaagtttgatgctttatatttaacaattccccaacataatgctccctcctgatctaaaattttcaactttttagatcttcaactaagatttcaattatctggaaccgtgaataaacatagatagatcattaatttataatttaccaaagctataaaggaatagagtcatattctaaataaacagtgcaattttgattactcccccaaagcagtgagatttacatgatattgaaactcaattgtaagaaaattcaattaaaataagcaaatggagagtacaaaaagcgcataggagtatcgattcgagaagctttgaaggaaggaaaaaattggggtacctttgcattagattgggtaacatcccaagcaaacctagccttcttccttggacgacgatctatgtgagagaggggaaattctgtcaagtagtccatctccatcacgtagaccaaaccctaattttagattttgattcagtgattcagattggtcgtacccagagatccatggggtctctgtaccggagagaaatagccctaacctatgttctactatgagctaccatgagtcgttggatgagttgacgaggattaatctggaccgttgttcgttctatttagctctcgtatttcaaccctggttaagttaagttgcctttttctttttcatttctttatttatttttattttccctaattagaatatactattccgatgccttaatccttatcttattacacctcttcttctttttttccttaatgtggaaggaatattacaatttattttttatcctttaattcatttgtattgttattggaccaagtggttttaatttattaaattaaaatattaatattaaattgtactaataatagtatgttaatttttgtagtgtgtagcacattaagatatcccttaaaatttcttaattcatacataccttttttttttgaatgaaattaatctatacttttggctttccaatattgttactagacatcaatgtatgagaacaagtgttactcagtttcgttggggctccgtaataccattttaactatacgacaaaccgactccgtaactgtatttcattgactttaaaagaataaagcgtggagaccatcacaagtaggtgctttcaaatgactcatgtcaaaaaaagttgttttaatttcatcatctgcgacttccttttcgaagcacagaatatcaacatctgtaagattatagacctctcctctacaagcaactgcagtgagggtttggtctgaatctctgccataggtgtcttgcaccacgtagaggtgataatttgaaattggttagtgaaattacataaaaattattatattaaattatatgagacccaatatgtaattgcactagaagtgatatgacactttggaagacgttaggcaccactgatatttttagtatttctctttaattaaccatgtattgtataacaacctaacctctaaggacgccacagtacttttagtttataataataaactaacagtttaattaaatttttttatttaaataaagtttactaaaataaacttttaaaataaaaaagttacatcaataaatatttcgtttcggagatctcttgttacaaaagttttacaaaagatttaatacggaatttatatccaaaatactatacagatacaacgccaaaatattccttgacaactcagctctgcaatccggatagattgaaatgtacatctatcgaagatgaatgctatctcatggctgccctaatttacccttgcccttacttgtattaaaaagtacttgtgagttacaacatctcatcaaaaaaagtaaaagcaataatcacatgctgacaaacaagtaattccaatcaattacatataagtagtataaataatcacatatgtaaaataattcaaagctacacaattatatgtctaataagacaagttataatggttacctcataaagtaaccctatctactgttgcctaatgagacaaccttgataagcctagcagacatccaatatcactacggtctcaatttaaagtaatgactctttgcactgagctttaaacttcacaaaccaaccaatttcaaccaaattctccataatagcctattaacatcaatacaacagataacacaactcaagcaacacaaaactccatctatccaaatctgccattagagctcaagcttgagttctcatgaactcaagttgatctctcaaccaaaacctgcaacaaaacacaacaaacaactctataatacttaaatttaagattgaaaacttactgtaacctattgcaacctaaacaaaaataaatcattgaaaacttgtaaaatttcaaactttaaaccctagacattcaaggagaaactaaaacaaaggttaccttgatcatatcttccacaattctaccttaaactcaactgaaaaccttgaggaaactgatgagagagagagagagagagagagagagagaaatattgtgtttttctttcttcttgattttcctaagtctatcaactaaactaatgcattctaatattatctactagtatcaccaacacaaacatcactactaaagccaaaaaaaacttattaaaataccttttacccactaaattggtacttaagtaaacattaatctaagagtaaattggtcataaccaattaccccgaagaccctgacaaaaccaatactaaccaaacttatcaaaaccaacaaaagcacaagctaatatcgttgtgacatttctggccacctatcaggtctccgcggttattgggcctgataatatttttatttcaccaacaacatatactatactcatatattccaataaaattattgtaattcataagttatgcttatttattcatttatattaaaatttctatttaccacaaaatatgatcaataagatcatatttctacccgttaaactcataacacacttattatctcatatgttgtaaaatatgctctaattattagaatttaatttatgagatattacaactattctcttcttatagaaatttcatcctcaaaatttacctgaacaactcgagataatgctcccgcatccgtgactctaattcccaagttgccttgtcaactttggtgttcctccatagcattttaactagaagatttgtcttgttctgtagcactttttctttcctatccaacacctggacatgttgttcttcataggatgaatccgtctgaagctcaatatcgtcataacttagaacatgtgtcgagtgtgatacatacttccttaacataaagatatgaagcacgttatgaactctagataaagcaagaggtaaagctagccgatagactacttgacctattctttccaggatctcaaagggactaatgaacttagggcttaacttccctttctttctaaatctttgaactcctttcaaaggcgacactcggagaaacacaaagtccctagcctggaactcaatattcctacgcttcggatcagcgtagcttttctgtatactttgtgaggggagcatatgagctgagttcttttcaataatctcactagttctttggatcgtttcaggtccaaaatatcttctttcactggcttgatctcagtaaataggtgactgacactttcttctgtacaacatctcgtagggttccatgccgatagtaaattttccggtgacattgacttttccgatgactatatctgcttcgataactttttcgacgatatttgttattaaaatttttatcaactttatttatagttttttgtttggatttccatattttaaactttatttataatctttttttattattatcccacatactatttttt

SEQ ID NO: 379391 - DNA, 2264 bp, Cannabis indica
tcatgtgaaccatggaacataaaggcaatttctaactttatattaactagtaaatctaattatattgaaatgggttttatttaggacacaaaatctaacacttttctcgtacgcgcgcattaccttagaagctcatcgagtttcctcggcctcacatagatgcttcctgcacgcgactctctttcttgggctgctagccacgcgtgcgtcccttgcttgtcttctgggagcttcagacaaggtgaccagtcaccagtaagttcaaattctagtttttatgtgatttattaattaaaattttgttttttaatctaattattacctaaaaatttttaaaattagttgatttttaattttcaacctaaatatcagttatgaactaataatattttattttttaatagattgttattaattttagaaattttagaagtttaaaattaaatgttattatttctaattggttttaagttatgatttgaatttataatttgttaatttattagttttatttatcatttaatttataaaattagatattttcataattgatatatgttttaattagaataatatattataactatcttatatatgctaattaaatattcataaaatttgaaattaatctagatattttatagatattataaccatagctattcaaatttaaaatttaaatttttaattattattttattattttaataataagttaagaaaaataatagtggaaatatcttagtttggatattttatcatttttgacatattagacatttaaaaatttaaaaatacatactaaaaatacctagatattcagtagaaatttgaagatgcttaaaattaagaaatgtagggttttaaaacactaaattttatggtcccactattttatcaaattttagttaaaatgataatatctaaatctaaactatctaatttttaaatttaatgtattttattattttaatttattaaattataatgggaaatattttaatttttaaaatttacatattatattattttatcttattgattatttcatttattaaaaattattaaaataacctgggcatttgaaagttagttgaacattagttttgaattgagatattttaggatgtggttagattcaacattttaatattatctagacaacctaatttgaaattaaaattataatatttatttttttaaaaaaaaatatatttcaaccatcattaatacacgtgttttgttatatttttgtttattttattttaaataaattgatttattggtaaaatataaattaattatggttaacttgttaatgggtcaaagatctaaattaaccatagttaacttgttaatagattttgccaattaaattaataatttcgataaaatctattatttaattgattcaaatggctataattaacttattaatggatgcgataattagaattaattgttaataaatcaattaaataatttataataaaggtataattttaatatttgtttcatctttgtcataaacttagaaatatgatagggcccatcgaattcaacttgttatatgaactatatgtttgcttttggcatagatgcatatagtggccaatttattttagatatttaaattgctaggttgctagataaaataatcaaattaatgatagattttattttggccaaattaatattggacacattcaatgaataacaattatttaaataaaggttaaattcatcttccactacaagaaagaagacttttgagggcgtaaaattctaccgacataactagggacaacacactggaaaactttttctgacggataaatgtgcccaaaaaacttacccacataactcagttggtaaaacaatttttatcggcgtaatagccaaatgcgctggaaaattagattgtacacgaagtttatgtgccagcaaaaattcaaacacaggtgttaatagatggctaaattcgcccactggcaggtaaaatgacttttaccagtgcataatattttttaaattggtgggtataaattacttacctgccatattttattgatggttaattgtaggggtgtgtagaaagtcatccaatccaatctcaaccgaccgatccaatcccaatcgatccaatagaatcaaatatccaatcataattggatcggatcggatgcaaattttaaaaatccaattggatcggatcggatgttggatgagacatccgatccaatggataaccgaaccgatctaat

SEQ ID NO: 379392 - DNA, 3289 bp, Cannabis indica
gtgatattgcaaatctacaaaccttgttcccatctacattatagaaagatggcattggtgttgctttaaaattgaggctttttcggaatcgtctgatctcagcttctgtcttttcctgcagtaagagtaatataactcagtgagtttatggtatagtaagtagcatcaaaggtaacataaattttaaacacttttcctatattagcagtaatttaatatccaacagattttaaacagaaggtagtaaagtagtaactgcaataacataccaagaatcaaacagtggtctctaatataatgatctagttgggacctaagagcataattggtcaacaattaaactacaaaagcaaatatatatacctgcgtttttgcttggatcttattcatttcaacttccttcgcatgcaatttttcttccaacttcatgtagaactggattgcagaagtgtgacaagcaaatgaaacgagttaagttccgatagcaaaaactttattcagaacatgtaaaaagaaaagaaagcagcatgttgactagcctcttttcttctttgtgctcgttcgtaacatctgaaattaaatcccattgccctttcatccagcattgtttttcttggttgcgcctgcaaaaaggaattagaattataattctcacgctcaagagattaaacaattaatcgacgcttgtttgtgaacttgttaataaacctgtcaggcatttgatgctctgtggcttcatctttcacagaagaaggacgtgacacgctaactttctttttccttgattccttttcacccctgtaaatataagaaattcaatctgagattttccatttctagaacatgacagaattcttcttcaaaaaataagaaagtaccttttattattactattattatcatgaacaaaattgtgattaggatctcttgaatcctgacaagaaaaaatcaattaaaaaaatgagttgaaagagatcaaaagaatgttcaatacatcttatatgcttctcaaaaatatattataacataattattatacatctgatctcgaatgtgctgaaatggcaggatttgattgttggcttgccttttctgtccttcctacatcctttccctttctcctaacatgttttacaggatctttagaaacatctttcgagatgtttctttgaactagtgacagattgttgagtgaaataactttggatttggaaggttttgagtccatttcaggcggcaactacaagttagtgtataataagtattagttttaacatacatttctaacaatctagaaaaaacaatggggcttgaatttttcacaaaccttctggtgagatgatttctgaatttcaaagcaagcttcctctactttcattatttgtggaatcttgacatcagtctcgacagcattaacatcgagcagctgattaatgacttgtcccgaatcattgcttgatgatgtaaacttgtcacagctagtttgggaatgatgtgcttcagaattagcaccaccaacaaagccaaagtcaagcaagacatcactatcattcattgcaggttcagtcaaaggcttcgatagcaataccccagaatcctctccttcgtattctgtaacttcatactcatcgtgattctccgaatccccatgatcagatctttcaaattctttcacttcataatctccatgatcctcctgctcttcctgatcttgtatttcagattgtgttggttcatagccgctaagatatgcttgatcacaaggaacttgtctgtcatattcggtgtttccatagtctccatgatactctgacccttcagggctctcataaaagtgagaataatggccaacttcatttccatattcatattcctctctgcaatcgcttctatctgaaacaccattttcgctgccatgattttctgtaccgctatagtactcaaatgaatctggccttaaaagacctttcttcttaaagtgagcctcaaagtaagctttcttttccctaactgagcctggttttgagcatttctcaacctcctccagatatctattgtgtgagaaagatgacctcctttcccaagacaaggactcgttttcgaaccttccaaatgatacagagcctgagtgtaaagaatctgcctgacaaattggaaaaatagggctgctgagtatgacatttaaactaattattattatgatagtcaaattggcaaccaatttttctttggtttttaattccacttactacatttattttcaggtaatttgaaagacaaaaactctactattaagaccgatcattgaaatcgttttgtcaactgagagagattagggattttgaaagactaactattattactcttcttttccatattattggtagtccaaaatcaagtaacaaagtttagggaaagaaaggcgttttaacattggagtgattgctaaactatgctatatcctatttgtgccatataattgataggctaaaaatcagttcagtacccactaactaaaaaagaaaactatatatataaaaatgcatctacaaattaacaaattcattttggacctaattaaagaaaatccggatctcagtaatactcaaaaattaaactattccatttgaattctattaagcaaagggatcaagaggaaaggtctctacttttctggacgagaattcaagcactattttttctaccaaaagctaaaacgtaccaaaaattaagctaaagagaaaaggataactactaatatagacaagtactaaagatctttaaagagttgatatataaggaataataataaaaaggaagtaggtttacctgaaagctaatgctaaagggctcttcaatctgcccagccattttgtttattttcaatctcttagaattagaagcttcaaggtgaaacaccaacccaattagcacaaaaccttcttcatcttcttcttttaagatataaaaaccattagctatgagaaatgaagtaccttaaaagaggcgaatggatttcacacaaacatatagtaaataaataaataaaaaagaacccactgcattcacatcgaagtattcctccaaattctcttcagctgtagaggatgcaaatctcaaaatgacttgttttggagttcaaagtataaacctttaagcctttggacataattctgaagcaaaattatatcttttcaagatctcatgataagagccaaaaacacatgcttctcttgctccttcagatcttacattatttttttttctttctttttggagagagaaagtg

SEQ ID NO: 379393 - DNA, 2229 bp, Cannabis indica
tttttttttcaaacacatataaaggaagtaaattttgtttttcatatttatcttttaatcaatcaataatatttaaaagtaattgagttgatctaaccataattaatcacttaatcaacaaaagcaaagtgcaatacaatagaaaccaagatcaaaaaattaaaatatgaaatatatttagcacaatgacttttttatataataattcagcctaattttgataattctttgtaaaaatatttttggtctaaaatttaagttatcttcaaaatatataaatcaaacaaatgtaaaattacgtatcaaaatattgtacaagtgaatgaagagactaataatctcaaatatatatagtggggtttttatttttcttttatatattatttaattttgtgaaacataatttatttgtataatttggatttgtaggtaggatcttgaacagggtgaccaactttttagggtcctcaacaatgacgtaggttgagaaatgagaaatgagaaatgataggtgaaaatggctaaatcaatggaaaagttaaggcatatcatcaaagtaaagaggaaatttatataagcagcacacatggggttgataaacatttcttgtacataatcattaccttttcaaataatcatcttaccaatgtttttaactctacagtagtaactaatatatatatatatatatatatattaatagtcaaccaaaaacagaaacgttcgtttttttctttaatttccccactgaaaataagatcttcttaattaatattcttcatttcttcctaaatattttgaggacaaatttttatacatagctataggaactgttagtacacaacctgcttcaattatgaatagtggtaaaggtgggctctatttttaaatttatgtatatattatatatttatatcatgcatgcttaattaatatgtactctccaaagctctaaagtttaaggaattatgtagaagtatttattaaattatattaaaaatttatataatgtgtatgcattgcatatatagtcacatcctcacatatatataatatagggtcatcaatttattggatgtgatgatcataagattcttacccccattttcattaatattagaataaaccaattaagattagtacgtacattaataaacttttttttaaaagtacaattaataaattaattactacagagtaaaataatgagttaaactatcacaatgatacctgccaaataagtttatcatctttacagatcaagaagttaaaatatatgttgaatataaataaatttttttcctatataataggtcatataatagctagaaattgatatataatatgggtagtaattaatgtaaatattctaataagcttagtaatgatgccatgcaaaataacaactaatttatatattagaaaatgtaggtgtcaattagggaggagggggagaccaccatgaaagtcctgtaattatggttaatttaatttaattaagcttcttctttttccttttgctccctttattccttattgaagaggtggcctgatatggattagtaatatatatatgatatataatataaatatatataagaatgagaaaaaggtgtgacaaaaagtagagaagtatgatggttatgatgttaggcacatatcatatcgatatatcttttcttatatataccaacacaacgcaaaatttgaaaaaaggtaattaatgaggtatatatatatataattgtcttattcgatctatatcgatctcatatcatcatcgtaatttctatttggaaaagagaaatgttaaaaggataaaatagggtgtctatagctttgtgaaatgtgtattacaattagtgtaatttattattagatctcacttattttattttaataaatattatatataaaaaaatattaattaattatagagtgatactttatctatcgataagtactgcctcataccaatgttgtttaaaaaagggatattggcggctaaactacctgaactttacggtttataacacttaaccacaaaaaccgaatttttggcggctaaactacctaaactctagttccgttttggtctgcacacctccgtcaaaaaatcacagttaagtgccacagtggactgtccacgtgtacacacttgtacacatggcaagtatttagtggtccacgtaatattagttttaaaaaaaattataaatatttaaaaaa

SEQ ID NO: 379394 - DNA, 3222 bp, Cannabis indica
tgtctaatgtttgtatactgtataccgtaaatgtactatttgtctttcaaggtaattcctaccatatttagatatattttttttgaagtaaagttaattacgttaggctctttatctcatttcatgggaatagaagtggttgttttgtatcatttctgctaccttttgcaggcacttgtgcttcacttcactttaatgagatatgttattaggccaactttccttacctagctctgaacattatttgttttcaggtttttgttggtgcaagattacatgttaccggaggtgttctaaggggagggcgtggagtagaaggtgaagctgctattgcaggtaagctttaagtcaaagctaaccactaatggtgttgtaatattagtgatttgctgtaacatattttctttttaatttacttatcattgctattttgtttatatagtattggacactgctgctggagtttggttggatagaaacggactcgtgacttccccacgcaccagcaaacattctgactatgatccttctttggagcttatgcgccgatgtcgccatgctgcttcatctattggtgttcgtatctatatatatggtggcctaagaggaggtagagcttaaataaagatcacaattttaagattgtaattaaatgtctggaaattttttttccttcttgaggactagatcttccgaaagttgttcaattgcaagtagaacaagcttggccaataccttacttttccagtgttgcgaaaattaactaatctgtagttacattttagaaagcttggtcatttccatacagaagaggaactatgtttgatctgttttgtcttgcaatacagatgctcgtgactagttttttacttgctgttatttatctttaataatgttttcttgtgcagatatcctgttagatgattttctagttgcagaaaattcatcatttcaggctgaaatgaattctcctgttttaacatcggagagatcaacgcctattacaagtcccaaagtacatcacgctaacctatctttctcaacaacacctactcaagacggtgaatctgagagttccacatctggcggcttgaggtattttattgtttatactttgtatccttgctcaaattctgtccatctactttggaacaatttcatacttgtatagttttggtgatcttttttcatctttagcagtatggacaaaaattctatggaaaagctaagggaggcttctgctgctgaagctgaggctgctagtgctgtatggcaagctttgcagtcttcacctgttgctcctgaagaaacatctgtgtccgatgataactcacaagctgcagaaacaatttcagatggtagtgacaatgaggctgatgttcggctccatcctagagctgtaagctctatgcaccgctttcttataaactgatatatgtaactgaaacttcataatttattagtttgtgctgttgcaatgcaggttgtagtagctaaagaggccattggtaacttgggcgggatggtgagacaattatctttggatcaatttgaaaatgaaagcaggcgaatggttcccgtaaataacgacttgtcatatccagccaaaaagttcaccaggcagaggtctcctcagggcttacataagaaggtagttcattatacgtgtaatgcttttatttttccctatttatttgttatgtatccattttttcctatttatttgttatgtatcctgttaagatttctctctgtacagattatatctgcattgctgaggcctcgaaattggaaacctcctgtcaacagaagatttttcttggattcttatgaagtgggggagctttgttatgctgctgaacaaatctttatgcaagagccaacagttcttcagcttaaagcgcctgttaaagtatttggtgatcttcatggacagtttggtgatttgatgcggttgtttgatgaatatggatttccctcgactgcaggagacataacgtaagttcagtgattgttttcactttgctaacatatattgctatttacaagtataccatcttgtgttatgtgaaacgtttgactttattagattcttagtgtcaaaaaatctgattttactagatttttaattgttatgaagtaggaaatggctcttacttaattgggattagtttgtgttttatgactggagactggggactttgttctgccttaaagttcattcctttgctgtgtcagtaacaaattatgtgagcaatgtgtgctggtagtttactctatgattccttttgtaaaagattttagaacaagctgggagggctatttaattagccaatttatttattttcaggtatattgactacttgtttttgggagattatgttgatcgaggacagcacagcttggaaaccataactttgcttcttgcactcaaggcaagctttgcattttaacccttaaaaatttgatatgaagtcttgcctcttaatttcctgttggttttgcagattgagtatccagaaagtgttcacttaatacgaggaaatcatgaggctgctgacataaatgctctttttggttttcgtattgaatgcattgagaggatggtataaacttttgtacatggttatttttttcagatatacatttatgaggattttaacctctatcatttaccacactcacccacacaatcactttgagctagccttcctttttgggattcaaaagtgcttataatgttgtatgtaaacagggagagaatgatggaatttgggcgtggacacgattcaatcaacttttcaactatcttccacttgctgcactcatcgaaaagaaaattatatgtatgcatggtggcatagggaggtctatacattccgtagaacaaatagagaagctcgagagacctataacaatggatgcaggatctattattctaatggaccttttatggtatgctctttttcatatcaacttttcatttgctggtgatcagtgttttagctattttttcttatggtattcatataaacaggtctgatccaacagagaatgatagtgtggaaggattaagaccaaatgctagagggcctggtcttgttacgtttggggtatgcaatatttttatcaattgaaagtagaattcttgtattcacgattatactgtctttagaaaaaaaaaaccatattattgtttgtgtgcaactttttttttttttt

SEQ ID NO: 379395 - DNA, 3658 bp, Cannabis indica
aattcagatccaggattccatacaagacgtgtaatattaccatccttttggctcagaaccttggcaaagagattgtccttgtcatccatagtgacagcagaatcgggaatttgcaatgccctgtgccaagatgttgacgcaacatattcctccttaacattttgaaaagaatcagactcatctgcatagcggtcaagccagtagctcgaatgcaactcagttgtcaacttgtgtactaaccaatcaaccctccgtagtgctccaagatgcgaatcatcaaacagtttcatcttaagtttcacatggtaggcttcaatggcaccagatgcttcttggctcgcaagtggaagacttttcatagttgaaagccacatttctattaaaaagaaacaaataattagattatagttatacacacacatatacatatatataaaaacatatcatatagaaagacaaaaatctaaccaattttaggaacccatgatcctctaaaatattccatgaaagcagtttgatcaacaaaatcctccgttagttcttccaaggcgcgggaggtatcaactcctccccaaatgctgtaaactattttacccaaacgtttaaaaatttccctttgaacttcaatgttactacatttctttacaacattcctcagccatgatatacgaattctccagagagagaataggacaggacagcaaaatatatccctgaaaatgtataacagtaatgagaaagcactttcttaaaagtacaatcaaaacaaggaattaaaaaagaaaaaaaaaaaaccacatcttgcctgataggatcaatctctgtagcagcatcgtcaattaagaaaccactgatcttccatccaggctcaacactacgagctcgatcaagcagggctttcatccatttggttacatctggctttgcagagctaggtgtgatgacccacgcaacaggtagtgcatgttgtctcgaatcaaacacaagaagtgtgcacaaaggatactggcattatgcatattaagcatatgaataaatatcttttccagtaaaaattctcaccaaattctctcaaatcagattttaaccttcaagaaagaataataaacataatggttaccttaagactctttatgccaaatgttgaatcagctgcaatgagactgtgatgaccaaaacgaatcatctgttgtaactgccattcagtttgaatacccagaataaaagaatctgtttcggaagaatcctgataaaagaatatggatttcttgttatttcgttgaacccacatgcgaatacttgcttgatcatccagatccaattcatgggttgatctttttattatcatccccattttgtggacatactgggaagcaagactattgactcttgcatttgaaccacaatatcgttgaataccctcaatgtgcttctctaaaacattctcttcaggaattccaaggtagatcattgacatagtttgctgctgaatctcattacaaatatatggaactttcttggctccaggtccaatggcatctctgtcaagtggtccatggcaaacaaaaccagatttatttacatgacgcctctcatgatatattataagtgcaagcgaaggacgagcatatagcctcttcactacaaaattgcacgtacagcctcgcattgactgaggtctagcagcacgatttctggtattaagacgatatcttctgctaggcaatatactgccaccttcaccataattctcaggaccaaaggaacaccaataccttcacattgaaaggaaaattaatacagtatttaagcacatctgggaaaagttgcagtgacaaaatggcaagcatataaaaaataacattgagagtgcttatcatcaataaggccaatattcaatataactacacagtttaaaatttccatttacaagtggttccctcattcttaagttctggtatgtttatctcccatgccatcccatctttaaaagtaatgatcaagcagatactgtaatcttcctttcctccccaattattagccttctgaagacaatttagccctgaaagaatatgatttcatagtattttttttcagtatacccatttatatagaaaacccaactccgaaaacaaatttagctgttactctttcctttaaagcccattttcactataagtataatgataaaaaatatatttgggaagtgcttccatatgtactacacgattattacagattagtaaacacaattgtaatcatcaaatggaatgcctcgcatactgttctcatgacagtgcaataccgaaagaaaaagatagtaaccttcgaaagcgtttagaagtgcttccttatttcatttaccactgttatgaattagtaaacatagttttaattatcaaaagtattgactttaagatattataatgacacacaacacaataacaaaagacacagacatagcaaaaaggaaattaagtttctataaagtttaactcacaatctgtattccaaatactcgtcttctttgtattccttcaagctgcccatggagcgttttctgcccctttcaatatgaaatcgagtagggcattctatattagagcattcaccaataatgaagtcatcaacacgttcataaggaataagggccacgacatcatggtgctcagaagttcctaatttggtccaagtcaggtcagcagaagagaaatcctcctctggggggtcttgaatttgaatgtcaagtatggattcaacaaaatccattggaactttgacacaattgaaggtttatctgaactacacacagaagaaagatatcaccgtaggttaattaaaagtagagctgtgaagggtccagtcagttgagtggaggcaaacatgtatttttcaacagccagtgaattgtgatttaattaaggagaaattaaagcaaataaaaaatcctaccattcctttgggaagtcttgggtacccaatactatacagtacactaaccgtaaccggtactacatttctagaatttattggaaaacgcatacaaacaaatggaaagatgaatcaaaacatagatagaaatgaaatttatatacatatatatatatatatatgtgtgtgtgtgtgtgtttgtatgtatatatacctgatagcgatgaagggtggatgtatgagaaaaagtgaaatggcaagaagacccaaccggagcggcgggagagtagagtgagagaggaaagagtttagggttgttaaagagaaagaaagaatgagtagagaataggaagaggaagcagtggctttggcctcaccgagaccgagcgcgattgttgaaagaaagggaaaacaataaacaggagacttttaagttttgttttgagggagggagggacggccagcatagaatacatcgtcttgatagtacatattttaaaaaaaaaaaaacattaaaccctcgaaacacctaataatttgatttaaatgtaattcaacatgatttcaaacaaagaacaaataaataataattcaacatgattactagcatttggtaactattttttgtttttaaaattttttaatcaacaaaaataaaagtgtaaatttttatttttaaaattttagttttaaaaaaaaaaaaatgttctataatcacttttatttt

SEQ ID NO: 379396 - DNA, 6402 bp, Cannabis indica
taaaaataattttatttataaaatagaatatatttccaaatatatgttagtataatattgataaagcattacaagtcagtactcctagactcatacctctttcgaagcagttttagcacacacaaaaatgatatagctagctctcagcatcaattgaccttttgacttattcaatttattgattaatcatcaggaaacagatgaagcagaactactactccctgcatcacccaatggtgatgaacatgatcacaatcatcgagaggtagttgcgaaaaccaacaacactagcagtaatattggtactgctactactgctgatgaaattataaaccaacaaaaagacagaatcgcagagattacgagaaccaaggatttgatttccttaacccaaattggaggtctcaaaggagtcgcagaggctctcaatactgatttagaggctggaatccctggccaccaagaagatctaaataggcgaacaagtactaatttagatatccccaacaatacaggacacgcaagtactgaagctataacttctccaagcttcttcagaatcatcctaaatcactgcaacaatatccccatcatgattctcttcattgctgcagggttgtcttttggattgggaatgaagttagatggccccgagacaggttggtacgaagggtgttttataatggtttccattataatactcgtctttgcccctgcatttcgtgacctctgggaaattaaacgctcacgtaggaatcgaccaatgcctatcttgaagcagaattcggtgtttgtttacagaggaaacatcaaacaacaagtgtatgtctctcaactcgtccaaggagatgtcttgttgttggagaccgggtgtgttgttcccgcagatggtttatttattagaggtgagtttctagtggtgcatgacggatcggagtccactgttgatgaagatgatccctttttgtttcatggtttcatggtgactcatggaagtggacgtatgctggttacaactgtgggcgcagacaccgaatttagcaagcttatgagttttgaagcctctagtggtcaaaccccggacagaatagctcggtggcctgctcagcttgattggttgtgtaaagttacacgcattatagggctttcattttctgtgatcattctggtggttattttagttcgtgttatgttggacaaacattttgattctgacactgatcttcctcagttcaaggggaagccaactaaaagctacgaaatcatggatgttatagagagggttttcacgagacaaaaaggaaatatatgttcaagtatagtagctttacttgtagcaatggtgggagttgtggaaggaataccctttattattacttttgtatccattttaaggataaagaagatgttgcctaaagaagcctattcagatttaggactgttgagttctgtgacagtgggatctggtacagtcatttgcactgataaagctccattgaacccaattgatgttcctatgtgtttcattggtgctgaagaggtcatcaacactacaagctccaatcttgctaaggtatcaacacctattcttgaaactctagggaaaggtatctgtgcgccctttgtgttaccattgagtcttcggaaggaagaggatccacttcgtacatgggcttgcttaaatttgaagataaagtttgacactctggggcaaagttggaaaattatgaagatcaagagattgagctcagatgaggaaggaagtgcagttttgataaaggggaacaacagtactgagaaagagaatatatctttgcatttcaaaggacctgcatcaacaatattgggaaagtgctccagctattatgacaggaatggacatatcaaggaattggatgtcatcaagagagaaattttcaacaaacatattgaagagatgcaattgagagatctaaataccattgcatatgcttgcaagcggaaatatgatccaattgtattggaaaaggaggatcatgacttaaccttaatagcaatggttggtatgaagaagtacacctgttgcgcagagctgaaaaaaacactgaaagagtttaaagatgctcaggtgaagttcatattggtctcagaagatgatacgtcagagcttagaaggatagctattccttgtgaaattctttccctgggtggaatggtaattacaggtgaagattttcaaaggtacaacgagcaagagaggatcgataatgcaaataagatttgtgtaatgggtaactctcttccatgtcacagagtacttctaatgaaatacttggaagggaaaagagaagttgttgtagcgctcggaagtagaacaaacgatattctcttgcaaagacaagcaaatattggtgttacaatggggcgatggagctgccaaatggttagagagagttctcacctagaagtttttgatggaaggttgaaatccttgcttaaagttactaagtgcggaagatgtacttatcacaacgttcagaagtacattcaactggaattcgtcaccaacattgctggaacattgatagcatccattaccacaatgtggttgggatcaaactcaatcactggcattcaactgttgtggactaatttcgtcacaacttttgtcattggtcctgttctactgatggaacaacctaatattgagttgatgcggaggggtccaatcagaccaaacaagtttgtcatttcaaaacacatgtggagaaatatgatcattcagactatgtatcagactactatcttgatcacttttcaagtcaaagggcaccatctactgaaattcttcaaggttcatcataagtggcagcatcatgtgagtaagcccatgattttcaacagttttgttttctgccaaatttttaatatggtgaattcaagagagctagagaaggtaaatgtgatgatggggattcatcaaaatctatggtttcccttggctgtggttttggtactaggattacaagtcactttcattgaggtggcccatgccgccaacaaggatgagagtttgagtttggctcagtggggggtctgtttcatcataggacttgtttcatgtccagttgatgcagctgcaaagagcatatggaacctcaccaagaagctattttccaggtttcatgctataccatgacacactattcactaatgattggaactcactagccgagtcatgtagctgcactgcatgggattggtcgggaacctgcataaactactactactagacatagaataatgaccaattctgtggagctatgtgactaggattatgagttttatcattgttcattctagaatgtccgcttatgagtaggcttgaaaattctacataagctccatcgtaattagaacatcttttgctattgttataattatttgaccattaaattgctatgtatatatattcacactatcacgacctaagatttttttttttttatattgctaagtaagagactttcttcaaaattatgctaacgctatttgtgttgtgtaatattagattagcgtctagaataaccagttcagttaattgttttttgataccaaaaaatgcaaaaatagaatgagaaagtaaataattcaattaaaactactgccagcatcatatatcattctagaagagtaaaattatgtaaaacttacctgagactgaggtgaggtgatgatgctacgaagtgaaaggttgagatgggcattggttctgggaagaagaacatagtaatgggaggctggagcagagtctctgaagtgaaggttgacttctctagtcaactgcagataatgaataatatataccagcaccatggtccacaaggcactactactgtttctataagacttttcctcacacctagctaaccaaacgcaattgattatttgtctttttcttttgttacactatccttaatcctttacctaacttatatcttacaaccttacccaaaaaaaaatatatcttataatattgacacgaatatataactcttattgatttttttcttcatataattcatatatattattagtatttcttattctactcataaccgacccaaaacctgctatacccaacaatccacatataatgattattgaggactgttttcccaagcgggactccaagaaacggtattggaccgtttggggaatttggtacaccaattgggtaattttaagaactcaatttttgtgttttttcgatatttaaagtattttcacgctatttaccaatagaaaaacttctagttttgattttaaatctttaagagtgatttagcgagtcacgatttttgtgattgtgacttaggaccactaatcgtccagcaaaagtttccactcaggttgaccaacacacttgattgaagaattgccaatccccagcaccactaaggatattgcccgtcgcgacaggcttcaccagaaaagagattgatattttttctcaacctttttgcatcttttgttctctattcttgtgaatacttcctttaaatattcaaggacctaaaacaagagaatcaagcgtaaaatagtcctaaaactaaaagtgaagatcgaaatctaccctaaaaaacgactcgaaacttaaactaaaattagtctaacatgaattaaggtaagataagtataatagatgcacatatgtacatgctcagtatgcatttttcagtagccatcaaattagcatatccgagtattggcaaggtgtacttaaagtttcattaccgacatatatatgctaggctttcagaaagtacaaactaataatgataccaagtatgcctagagtattgagtgtgtgtggtattatagttagttgtacattaaaaacagtctaatcataaattatgagagtatgtatgtacatttttagagctattttgtatgtttaatactaataaattgaatttaaagtagcttagtgttattaaataataagtctttgtacttgacagacctaggattttattgtatgagagtttaattgttataaaaaatatttatatttacttttaagtaaaaactataattattttgtggattttttttcatttattattttgttgtataattatttaattaaaaggaaaatatttaatttttttaaatgtaatttttttagcggggctacatgcgtttgtccctatgcttgtactgcaattaacctgatatcctcattttcgccacctgacgtggcactgatacgtgtcctaatttagctaacactaagcataatgtgggacatctgggcaggtacatgcctgacagatcccacataagcctgatattaatgaagtactcaactttccatgaagacctaaccggaccttcaacataccgatcaaggtgaaaacaaatataccagcccgaagagaaaagaccaacataccatgcgaaactgcatcatgggtaaccttcttaaaaatacaagtctttagaggaacctggccgggttttcaacatgccggccagggtaaatgatcttagaagggctagatagggtgaatgggtcttgatttcttcttcagcaaactctacgaatatctctaccagcaccctacaaatgcgaattcgactatttagcccaaaattataggagtttcaaacagattgtaatgctccaaaaaagagagatttttatgtagctgttacatttcaaatatttaaatatacttccctacttcctataaataatgaacgtattcacaaggaaatggacaaataatcattatctcgactctcattctagaaagagcacttcaatgaacaagattctctgtaagcatcttgagagctatagctagaatttactttgtctaccttagtgatctgcatagcattaactaattaaaagggaaataggtcattactaatatttaaggggccaaacctctatagcttctggtgatctttctatttttatttattttttattatttctgggtgatcaatttatttatcagactctagtcagctgacaaagttttaagtcaacaataccgtaagttatagccacatgaataatttttttttaaaaaaacgagtgcgcgatttacatagtttggagggggggaattttgcacactacaagaaatgtcacttttcccagcacatttttgtgctggcaaaagttggtattacgttggtaaaatagaatttatccatgctgtgttggcaaaagggggttggcaaatcaatgttagtattagaacttttggcagcataaaatgaaaagctctggcaaaaaagacttttcccagcgcgtaaatgtgctggtaaaagttagattttagccactgcaaatgtacgctggtaaaactttgatctttttgccagcgcagtttacgaaat

SEQ ID NO: 379397 - DNA, 4209 bp, Cannabis indica
tatatatatatatatatagtatggggcatatatggattagaaacataggcacatgatgactcatgagcacatcatgacatttaatgaaaagaatcgaaattattttgtgatgctaagaaccgtcctttgttgaaatgtttgttttatattctagctctaataattattctcatctacacattaatatatttgacattcccattaatattggtgatcattttcatgtcatatattatgggtaaaacatcaaatatttcatgtgatcattttcatgtaaatagttaataggtcaaattatatagaacaaaacattactaaatgaaaactcagtgtttattcgaacaactaagaatgtcttctataattattttaatttttttttctatttttaacaattataaaataaaaatattctcaaaaaatatgtttcgtgaaactttcaatttttgtttcttaaaatgagagccagaattttgaaaattttgaaaataaaaaatcatttcaaaatttgtttaaacatttttttttcttatttatagtctaactatttgtattttttcatcaatattttgaattttgatcttaattgaaccccgactcctgacccatggcctagacccgaatctggaccccagcccagacttggagccaaactcgcactcgaaccctaaatctaaacccaaatctcagatctagagaccccgaatttaaatccggaccccaaccgatctcgcttggtatactccataaagatatctattagttttatggtctaatcacttagtcttagtcttatacactttgcatcacttcattaatttgttaaataaatttagttagttaagttggttagcatataaatgtccaaccgagcaactgtattaactaatcatccattttcatttagttttcaatttctcttagcttagtgcttggttgttatagtgttagaaggagatgtgctgatcatcttgtacatactgttcttatatatagctagctcttgttataaagctctcaagctgattgattaagaagtgaaataaaggctgagccatttttttgcaagtactctttctcttcattattttcttgtttttattttttggtttaaattcgaattggttcttgctactgttgtgttgttgatgcttgatgttttatgttcttgatcctccagtgtctgattgttaatcacaataatatcatccttacaagtttagtgcagctaaagatttgaaataagtaaaacaacaatattacctagtgtgggaaaattatgattaaaaatacaaaataaaatcaactaaactttaaacaatcaaacgattggcaataacaagattatcaaatctaaaacaaaaatcaaatgaaaaattaattggttgtgtaatttcaacaaacacttgttttgtatataaaagggtgatcttaccaattagttgaatttttgttgtctctgaccgattgaaccactataattttaattgtctcttttatatatatttctttttatattttgtctattttgtagcctaaattttgagtactcgcaattttaagtgaatactcgcataactaacggtaattgttcttatctaaacttgaatactcacccttcttagtgttgccaaaaattcatccgacaaaagaatatgtataatagaacttaattatattctttattatataaaacagtacatgttagtagacactttgcatattagaagaatccacacgttgatataatgatcaatattagaaaggaaaaaaaaaccctagcagcccttatattataccctaataaagtgctttagtagtgtgaccaatttgcattgattcaaataaaataaaaatgggtaggttctttatttacatatagtctatgatgagtactataccatcacgtggatatatatgcatttccaccatgatcgatgtatataattattaattagggtaagagagaatgaaataatattatctttaaaatttgtaagccagcatctttctttaattatattcatttttcttcctgaataaattaatattatttatgtgtatatatatatatatattttcttctcttgttgaactgaactagatgcgaatcttttctcatctatatggataatcccaacttgcaacttcgttctcaggattggcagatgctcaaaatattttgattaggtcagcagcagtttgttttgttgtgacatttcaaagaatccaaccaaatagaaagcataatccagtaattaacttaatattaattataataagatctaaattaaattacaaaagttaatcaatcaaattatttgacctaataatgtctacactagattattttattcgtaaaaaaaggaaaattattaaaacgatagattcatatttaaagtagtcattaagtcatgtttttctgattcaaggcaagaaataatatattaataatctacttaagctaattattattatactctagaatagtatgtacgaagagatttttttattttttattattttttttaaaaaaaaagtgaaaagaatgagattatatatattgtagctaattatgtatgtatagtattgccttataagctaattaatgacaacaataatataaagtattgcactataagctaatgacaacaatattcacctttgattgacctataacaaaattaatacataagttttgaatttattgttgctttaattttattcatcgttccagtttggagtataatttaaaaataatatttgtattaatgatagtttaaaaattataatctaatttttataaaaaaaaatatttaatataaaataaatttaaaaataacatgttttgttttatttcaagactataattgtttaaaaatttgtcagtaattaactatagtatgagaatacgaaactatatgtattatataatattattaaaaaaaattatgcaaaaggatgatttatatatcttctactattaggcctaatgttaaacttgatcaactctaggggtgagagcaaaagacgaaagataaaatccatatatatatacaaaatgatgggtgaataatgaggttggttatgattacatatctgccaaaaaagagggtcaaaatcaaagtaatcataaaagagtagtagttttggaatattcccaactttctatctttggaacattttcattcctttggccgggggggccaatagtcatcattatcctatactctgcattaaattaaattcccaccataccatatagctagtgtaaaccagctcatatattgtttaattactctataaaaacaccttcatattcaacacaatttcctcatactatagctaataatcaatataactatgggcagtggtagtactattgagaggttggtaggtgagaagccagtggttatattcagcaagctatcttgttcaatgtgccactcagtgaagtctttgataaaaaattatggggcaaacgtgacagtgtacgagatcgatgagatttccaatggtcagcaaattgaaagggagttattacttaagttggggggttgtcagcccagtgttccagctgtttacataggccaaaaactcattggtggtgctgatatcatctttactctccaactcaagaacgagcttgttccactcctcattcaagccagagctatatggatataactacacaaaaaccatcatccattattattaattaataatcttcaataagtctatatatatatagaacgtttttgcttctttttttgttgttgggtcttcatcataatctgaaatgatcatcattaataagaataatgcactgagttatgtatagttatatatgatgatctactaattaattaatagagtacgtacttcttgtattggcaaaggtggccaacaacgttaacgtacgtatatatatatatagcttatttttaatttggaaagccttgagtttactttttgtattctcgtttaaaccatgtgatgaataaagctatccaatggttgagtacgtattataacatatgtatatatatgtatatgtatgtgtgtgtttgtacaaagaatctatgttgtgcgacggtatataatatatttaaactgacttataaccctttgctatatagaagctattaagttttgtttgccctagtcatgacttagagattgtcttctttcttttttcaattttttttt

SEQ ID NO: 379398 - DNA, 3961 bp, Cannabis indica
gaatgatgtgtatttaactttaaccacaaataattttaaggatagacattcacttttgtttgtatgtttatgttagaatttggggataagatgaatgaggttccatctcaaaactaattggcaatagaataattggcaatagaaggagtagtccattcatcttatatatgacaatttatttccactcattagcaatgtgagacttactctaatacaccctcctcacgtttggggtctgaaaagtgcgggtataacgaacgacctttaagagaccacagggccgaacgtcacatttgaaagaatcccacaaggccaaatatcgagaaatttgtgggtgtacacgtcgagaaatttgtggatttttgaaacaggtcaaagaccgaacattggaaactggcacacataggccggaaggtcccaaatggaggttaaaagggagatagtgaaagtatctatttggaccagcagcactttggctcacaacggatcacaaatatctttttggaccaatggcactttgggctcacaatggatcacaagtggctctttcttcagggctcaacacatcattaaaatcatctaaaactatccaaggaatagtaattcccttagctagctcttttaaatcttgccataatggttccctccctatgacttgttaaaatcgtagacaaaggtaatcaagaacgtattacctctacctctagctttaacctcttagtgaatcatttgactagagtaataacgaatattgatttagaacatattcaaattccaactaatcaagatacgaccacctttatgccaagcactataggtataaaaacaccaatctgagaacatcctaaggtataaggaccccaaattttgaggccttacccttgtttccaagagacccacaagccccactctcattttcccagtcattcttttaacttccatttgctttttagacttgttgagccctcagacgttccaattcatgattctatccattcactaatggaggatctccccctccactagtgttatctttcctcccttgttctgccataatttccatgactgttgagctttccccagcttcaccaagcacgtcaaaattattagtaaccacagtaggaactagataaaacttagggactttccccctttcttgaccactcgaaaaccatctttatctggtggaatttctatctttggtgctttcccctatttcttcaatactcattcagctttggttgaaggcttcactacattcctctttcaacattcttcagtttcgtgtccctatcctttacaataggaacataaaattggcttccattcaaagtgtaaagtaatagtttgttcctcatcccatttatcgaaaaactttatccgctcaggaaactcttgggccaattctacttcaatcataactcttgcaaagtttagtctcaccttattttttgtgaaatcatccaacatcaatggtttttcaacttgtctgatgatcttgaataaaacacgttcactctaatacttgaaattcaaatcatgaatttaaactcaaattggagcaaccaacccactcttttcttaaaatccaccaaggggtcccaagccttcataactactggtttcttatcaaagaaaatgaaaccattagatagtatattgttttttatttcctcatttaaaagtctaacaataaacaccccataagtaatcagccccaccttatctaccttctctttccaaagtctttgaacaaacccttcaaaaacccccccattggaagattagatcctagaacgtagcacatcattactaagttccaaaattggatctcttcctcaatatcttctatctcaattttgacaatatttcctttcttcctatcctctactaaggacttctcaaatttgtcatccaaattctgaaacacattttcatatctgagaatagggggaaggaattttacctaagttcatagcttgctcgcatctctttgttgcactgagaaaataagagaaatccttcttgatctcctcttacttttgaatcagtctaagagatgaacgaggagaaagtatattctcatgtgcattattcacgttttcatcttctgagtctggatatgagaagtcaatcagagcccctccaagtaactcctccatggatttcatcttcttcccccacagtgaggtatgcccttctttttcactattagagcggcaacattccttggtctccctttcttcctcgtgccaccttgtaccatagttccaattaaaagctgagagagaaacaaagaggagagagacactttttgagtgtcataattattactccttaaaaatatacattaatttataatattttattttagtctaattattactggtacactttcataccaacttatatttctaccttggtcactataatagtatatgtattagtgaagagaaatatagttagtcagagttagttagtgagtttgttacacttacagctggtgtcagctactctaattatttttcagttatattgtaatcttgcttttctgtctatatataatgaatatcaagagctgtgttacttaacacacaagctcatcttcattctcttttctcaacttggtatcagagtttcttggttcttttttttcatttctttctcgatattaatcttgaagttttcatccatggcatcttcttcagctgctggtttcagacctgaggcttcatcttcttctacaacattgaatctaccttctgctgctgctgctcaagtgattccaaatcacatagttccccttaatcttcgtcttgatcggagtaactatctgtattggcaatgtcaggtgctgtccacagttcgtgctcatcaattggaagaatttctcactggtgcacgcgcaagacctccagctaccattattgatccctcagatgaatcacgatccattccaaatccagaattggccgactggttaagccttgatcaatttctcatgagctggttattcaactccatctccgaaagaatgcttggacatgttactagatgtgcttcctctactaaactctggaatgttctcattcaacattttacaaacacttatcgagcacaaattctacaccttcgtggattacttcaatcgacaaagaaaggatcaaccacaattgaggagtacattctcaagatgcgttgtcttggagacgcatcaatggctgctggccaacaaataacagatgatgagcttatcttgtacattcttggcggtcttggcaatgagtatgaccttgctatagtcactctcacctccaaagaatcagtcactttgcaagatgttcaattcttacttcaaactcaggaaatgagaatcgatcaacagacatcgattgcaaccttggatcttcataatccaactgcaaattatgcagctgcaaacaagaaaaacccctcctctacatccaccaatggtcctaatagtcgtggatgtcgtagttccaccagaggataaggaggtcgaaaccttaacaatcgtgctgctaattgcccaatttgtcaagtgtgtggtcgtgttggacacacagcactcaagtgctatcacaggtttgacctgagctatcaaggtgaaaacaactctgcctctactgaaaaccccacagatgagcctatagcattgcgtactactgcttcaacagttgttgatccacagtggttcctcgatagtggagcttcacaccatatagtgtccaatgcacaaagtctcacagacaaagttgactacaaaggcaaaggcaaacttactgtaggtaatggtgcttctcttcctatttttgctattggcaattcttgcattttgtcatctaaaccttttgttaacgcggattttctttaaccaaaatttgagtctgaatggtaaacttgcacaaaaaaataaagacggtaaagaaaaggaaaatat

SEQ ID NO: 379399 - DNA, 4888 bp, Cannabis indica
gtagatatccctttcaaaaaaaagaagaaaaaattttaggtgtggatagaaaaaatttcttcttattctttccataaatagctattattgatgataaagtaatgtgtactttatgtattactcgttattattattattattatttatttaacaaactatatttacatgaacaattaaattaagcaagcgtttaataatatcacgtgaaagcaattatgaaactgtatgattcatattttcatgtaataattttattagcttaaaaaaatacaagtgataatgcaactattaattaatgttaaaattacccaaatataaattaataataaaagaatctgaaaatgttaatatatatataatatttaagaaaaataatgagatattaaaaaacgaacaaagagggaagagaacttattagggattcatttgatgacgatgcatggaaaatgacacgtatggctgggaaagaaggaaggagggcaggaaggaagtacttactcctctacttgttcacattgagaatcagaatcagattattaggatcaaatcgggtctatgccattgctgcaacttgtttcaaagtttgtctgacttgagactggaaacccatgtgatcttttcacccaattttcaaacccataaatgtatctctgacatcagtcattcgacacatctctgttactctcacacatattatatacatacatttatatatatttatgaaataattgttaagacttttatttgtagtttatattaaagtttcaaatgattaattaaaatatgatcttggattaatatttcttttatcgttttacttggtatagtgagtgatttataattaatcggcttatatgtagtctagttgaactctattatagtacactaaaacttttgatgagcgtgtcaatttaattaggattctttctttcttaattgtattggtgtacattatctcattacaattatattttgtttatattgattttaaaaatctcagaagctaggaagactatttagtagattagtattgatttaccaacctgtattacatctccattatctgtatgggacaatcaactatgtcttctatattatttaattactcatagtgatacatatattttgtgtgcaaatatgaaatattaatctttaattagtaaaactgtaaatggggtaggtaggcctcctaattggtgcatgtcacctcatttataatttagaagcatgttgggtcagacttaagtgggtcaaacctgatcctatttttttttctttttattttttaccattttaaattaagacttcaatttttattttattagttttgcataatgattaacgtaaattgtaaaataggtttgagacagaagaaagggaggtgtaggctattcgaatccgaagagtggatttgagatagagaaagaaaaaggtttgaaccttcccccgtcgtatctcctcatttccgtctcaaagatagaagaagcttgcactacaaataataggtatcattaggctatttctaagccaaagatcttaccattctaaagaaactggagtaacatctctattttatcttcatttaagagttcttatgtgttttcacgctcctttgagaccttaaaaaatggacaaattccttttcttttcttaagaacacatacaagatttgtcactacagaaaagataatggtaatcccaccattaactacttcttttatgcatttcatagtaatagatatacatgtcctaatgtaggactggtgcctgaattcatgagaatggtctataggattcataactactcctcttactacaggtcacttacctagaatcctcttcttttctataaggatcaattagaaagcaggttgttttgaatgcacatacagaaaagttgacgtaccccgtacttgtacgctcttccttctcttcgtgatcgaacatcaattgcaacgattcgataaatgggtcattgggatagatgtagataaaaaataccccccccccgagaaacgtatacgaagttttctcctcgtacggctcaagaaaattcaagttatgtttatgtagagaattctaatgtcaaatatattcataaaaaaattaaatcaattagaccaagaactgtctttctttatagttaaatacttggttattattctttccccaacaaaaaaattattcgtatttgtaatttgaactctcataactcaagttgtataactcgcaaaggaaatcctttaaacagtttatttaggcacacttgttaagatttgttagttagttattagttgtttgagctatcagtagttggttgcaccaagttgtaggttgttacattcttcgctggttttttgtattcttttactgagcagtatatatatgctcattgttattgtattgcttactactgagaatgaataataaaagtactctattttttccttctttccttttctctcttttgttgagtctcgcttatgtctcgcatgcctcatgggctcaggcttgcgaaatgcaatcctgtttcatctgcgagaaatacattttcacgaatttcattcaactcggtgtatattgaataaatcaagatatacttgtcgtgctttttctgtttatttttatttttagatgattcttttggatcatcttttctttttgtgtttgaaccactaggattatcctcattagttgagattgtacttggtgttgcagtactcgtgctgcgtttatttctcgagctagccttcaccagcttcatctcgtttctagcttcttctttgcacacaaatatgtgcgctctttcaataaattcattactgttcctcactgggcgaccctgtaggtcatcccacaatttgtctctagccgtggatagatcagttgtaatccctgcctgaagagcagtaagctgaatactgtcatacagatttctaacctttgcagcagctgtgctaaagcgactcaggtaagccttaagtcactcgcctggttgctattttatgttggttaaggatgatgcttcaggtcacttgtctctagcagcttaaaattattttttaaagtccttggacagttgttcccaagacgctatagaatgatgagtaaatttgttagacaagctactcgcagctccagtcaagaatgtcgggaataagatgcaacacaaattatgtgagacattactggctcgcattatagtattaaagttgttcaagtgagcgactgaatccttagttccatcgtattgcaaaacatgtgggttttttaatccctagggaaatttagaattcaaaatatcaggatgaaatggctcggtctcttcatccaaatcgtaaccaggcattttccatgttctccatcctgatactttctgaacttatcctctagttcaattattcgcaattggataggatctatttgctgctgattagcattaagttgatggcacaaattaagtgcatttcggtgtaatcgctcgcaaagatcgggctgtcttttattcaagtgctcgcgatgatctaactgtcttcgctcataattactcacagaccttgtctctaaataactctcgaattgatagcttcgtgtactgctcatgctttctttgtcagcataacatcaaggcctacttccctctcgcatttgcctacctgatcgactgtgtccttaagaccttaagtgtcctaaactagaacttgcttcatcttgtatcagccttctccttggaaagaggttagatacactccctctatttagatacgtgtatgcatcctccctttctgatcgagaaggatgttgagggtgtcttagaggtagcccacttgtcctggattggtttttagggtttatctctcgtcgccacgagagattctctgatccctaggtcaaggttatctcgcgtcctcattcctgcgagaagcttctggtatatatatcattttgttcgttcccttagttcgtaaatccttaggatccttgaggaacgtctcactgttactcttgattatttatttgattatccattggaacatcccttgtacgcctaggttgctcttcctgggtgttttggagatttacctagtttgtttcctgtctcttggttctagaacctcgaggtctgcctcatggtcttcttatcgtaggatcaggttgatcctgaggatttgttccttgtgctgccgtggtcgttgtagcctctctttccaactaagcgtttcgtcggttagattcggctaagtgttgttggagttgtctattttataattccactaatggtacatacctagttggttcataccctttctcacttgtaggtacatatctggtagaattataggtatcttcattccttctttctgaattttgatcaccaccaccatcgtttctccttgaacgtgatgttccagtggtatggggtctttgagatcccatggcgacgtgtagtttttttagaacaatttccatcgttttgtgtaacaccctactagtttaggcgtgttaacgtgattttttaacttaattgcgcagctcgatgctaatcaacgagttttattgaaaaccgtgaataattaaaagtttatttaattatttaaagatgccaaaataataacgtatgtatcaaactgggatcccgtttacaaaatgtttacaaaactttcatagagcataatatagaagttatcaccaagtgactgtaaaaaatacgctcaactgtcccaaagaccgtacgctccaggcctaaccgtcccaacatgtacaatatttatccgctcgctctcactgctgctcaacctaaccttttgcccttacctacacatggaaacaataactgtgagtcaacagactcagtaagaaaagcataatcataaacataaaaatatat

SEQ ID NO: 379400 - DNA, 1092 bp, Cannabis indica
atcccaaaatttaacttcaacaacatatatttatttatatgggtgagagagataaacacgatgtcaaaaatttaagatgatttttcttttaagattaaaattttagaataatgcttataatttttttgagtgattacaataatgcttataaaaatatagaaagttgattagataacaatataatatagaaggaagcacatactacatagtaactaaaaaacaaaaaaggaagaaaaacaggaagcttagctcggaatgtcagttattttttataattgggtattgattgcttccattccatgaagtcaggtatgtatgtatgggttatgcttccttccttccttccttatacaattcaatggaaatagcacaaatcttcactcactgacgctgaccttttattctctctctgtaatttttgctgtggctcagaactcagatctaaatctgccccctctctcgtgtgacgtaaaactaaaatctccacataaaaaaatcctcctttttggtaaaaccgaaaagctcgctttgaatctacttctactacaatggcggtctaggaggaagaggacgcagtgatgatgatgaaccggagagactcttttatcggaggaaggaataatattcctttgttggcgcagcaccggcgaggtcaaagtttaaatctcgctggaaataaggcggacgccgtcgatgaaaacttagatctgttctcaaagaaccggcggagtctctccgtcacatcctctgatgaatcctcagatggtacattttttttatgctcttttagtggatcgaaatgccccttctgtactggactgtctttacttgtctttttcttgtcaatcgtgaggctgttcaatgcttaaggacaaacatggaaactaaactatattatacagattaattttgtcggcatgtataactacgacttgtggctgatttttttgatttatattttctttttggaatggcattttccggtgattagacatgttttggataataaaaacgagacagtggaaatcgatgtctccattctcaatttcgtgtttttttttttttagattttttgatcatatgagtgttttt

SEQ ID NO: 379401 - DNA, 3346 bp, Cannabis indica
ttacttaaatgtcacgcttcatcataattgtgctaacgagtcaacgatctgtaaagcgcgaagccctaagtggcccaacgagacaaacagaagttaagctctgttatggagaaacactcttgaaatcgaagctttcttctccgactccgatccaatccaatctcagctgctaatggaggacgcctatgctagatctgtaactgaagtcttagatttcttcggtgtggaaccgaccaaaggcctcaccgacgttcaggtcgctcaacatgccagagattacggcagaaacgttctgccggaagagagaagagttccattcttgaaattggtattgaaacagtttgatgatttacttgttaagattctaattgttgcagcaattgtttcattcgttttggctttgattaatggagaaaccggtttaactgcatttctagagccttctgttattctgatgattttggctgcaaatgccacagtaggagtaattacagaaacaaatgccgaaaaggctcttgttgaattacgtgcatatcaagctgatgttgcgactgtgcttcgaaacggttgcttctctataattccagctacagagcttgttccgggagatgtagttgaaatttctgtgggttgcaaaattccagctgatatgagaatgatagagatgcttagtaatgaattacgtgttgatcaggcgattctaactggtgagagttgttctgtagagaaagaactcgagtcggcgattacaacgaaggctgtgtatcaagacaagactaatattcttttctcgggtactgttgtggtttgtgggagggctagagctgttgttgtaggtgttggtactaacactgccatgggtagcataagggattcgatgcttcaaacggaagatgaagcaacgccattgaagaagaagctggatgagtttggtacttttcttgcaaaagttattgctgggatttgtgtattggtttggattgtaaacattggtcactttcgtgacccttctcacggtgggttcttgcaaggagcaattcactacttcaagattgcagttgcgcttgctgttgcagctatccccgaagggcttccagctgttgtaacgacgtgtttggctctagggacaaagcgaatggcgcgattgaacgccattgttaggtctttgccatctgttgagaccttgggctgtactactgtgatttgtagtgataaaacgggtactctgacaaccaatatgatgtctgtttcgaaggtttgtgttgttcagtctgtgaatcgtggccctcttattgatgaatacagtgttagtgggacaacttacgcaccccaaggaactatctttgacagtaatggcacgccaattgaccttccagctcagttgccttgtcttcttcacttagcaatgtgttcagctctttgcaatgattccatcttacagtataatccagacaaagggaactatgaaaaaattggggagtcaactgaagtggctcttcgtgtactggcggagaaggttggtcttccgggctatgactccatgccttcttctctgaatatgttgagcaagcatgagcgtgcatcatactgcaatcactattgggaggatcagttgaaaaagatctccgtggtagaatttactcgagatagaaaaatgatgagtgttctttgtagccgaaatcaactgcaaattatgtttttgaaaggtgctcctgagagtatcatttctaggtgcacaagtgttctgtgcaatgaggatggttctactgctcctcttacagctagtacaagagccgagctggaactgaggttacagagttttgctggaaaggaaacattaagatgcttggctatggccttgaagatgatgcctgtgggtcaacagactctctcctatgatgatgagagggacctcacatttattgggttggttggtatgcttgatccaccaagagaagaagtgagaaatgctatgctttcttgtatgaatgctggcatacgtgttattgttgtcacaggggataacaagtcaacagctgaatcgctttaccgcaagattggagcttttgacgacatggtagactttgctggacgctcttacactgcttctgagtttgaagaattaccgccattacagcaaactatggcattgcaacgtatggcactcttcactagggttgaaccttctcataaaaagatgttggttgaggccttacaacaccagaatgaagtagttgcaatgactggtgatggtgtcaacgatgcacccgcactaaaaaaggctgatattggaattgcgatgggttctggaactgctgtggcaaagagtgcttcagatatggttttggctgatgacaattttgctacaattgttgcggctgttgctgaaggaagagctatatacaacaacacaaagcaattcattaggtacatgatctcttctaatattggtgaagtggtctgtatttttgtggctgctgtacttggaatacctgatacacttgcccctgtacaactgctatgggttaacttagtcactgatggattgcctgctactgctattggctttaacaagcaagattctgatgtaatgaaggccaaaccacgcaaagtgaatgaagcagtagtcaccggatggttgttctttcgttacatggtaattggagcttatgttggccttgccacaattgcaggatttatatggtggtttttgtactccgaaaacggtcctaaacttccatacagcgagctcatgaacttcgactcatgttcaacaagggagacatactacccatgtagtattttcgatgacaggcatccatcaaccgtgtccatgactgtacttgttgttgttgaaatgttcaatgcattgaataatctaagcgaaaaccaatcactgcttgtcatcccaccttggagtaatttgtggcttcttggttcaatcatcctaaccatgctccttcacatactgattttgtatgtgcacccactctcaattcttttctctgtgacaccattgtcttggtctgattgggctgcagtcctatacctttcttttccggtcataatcatcgatgaggtgctaaagttcttctcaagaaagtccagcagtggtgtgagattagcttttagattcagaaggcctgatttacttccaaaaagggaagttcgtgataagtagtggtaatcaatggagctgtgactcacccaaatttatctcacttgcatattctgcaacaataggtacgaatatgatgatgaacagtgcattaaaaatgctctttttctctttatctacattgatgcacaccaccatgaaccaagtcatcatatatatatatatata

SEQ ID NO: 379402 - DNA, 3190 bp, Cannabis indica
  modified_base (3161)..(3161): a, c, t, g, unknown or other
cacatattttggtcctaaaattgtttcccgtaccgccggagcgaccgccaccgccgccgcccccaccaccacctccgccgtgatggttcttcatgtgatttgcagccatagatgacccgacatttacgatgagctcgtgaaccattgtactagcttgcttaatctggtcgaaggttccctcgagctcaatattcctcaagtgaggatctgtttcgtgctctcttattgcaagttttgctcctgtggctcggcatatttgttttgagttcactccatttttcccgatgatggctccggcaagagaagaatcgacactaattttggctgtggatgataatccgaaactggctgcaggaccgtgagaagatggaggcggttccatcctaccacccatcctgccgccgcggtgatcatcgtatgatggtaatgttggcttgccaagctcccattccccgtgagcgaaatggcatttttcaccgaatttacagccttctcctgagctaaacttgttgcacaaacgggtcttgacagctggaggagaggcgccatctgggtaagatgggggaactacagggttcctattgggtggagggagggctgggctgccaccagcattgattagttgtgacacaaccttcaaaccgccaggaacgtaatgcaagaaatggcaattttcaccaaaagggcacccggaagtactgcatagaagtattaatcaaatgtgtcagttcaaaagttgcaaataaataacagtgagaaatggaacgatttggaagaaaaaaaaataagaaaatctatgtaatttgtatcatctctattatctgccaaaaacaagaaaattgaaactatgaatctgttagatatcatgaggtccttttatttgaagagtttataatcttaatccatataaataaatagggcatataaacaaaacagcaggagtttaataaatgttaaaaggactggttgattaacttgtacaactttattaaatgttttcttgaaccccatgcagccaagtaaaaaattagtacaagtgaaacagttttgttgctggtaatccaaacgaacacgcattaaatcattgcaacaaagtcaatgtaaagacgggaaatcataattgacttttcctacttcattccaactaaaaagattctaagcttacttaacaaaaagattcagaacatactctgcacccatgaggaaagaaaagagctcaatagaaaaatcaaatgattaagaaaacaactgaaatagcttaacctaaaccaaaatgcatggcgcaactagtcgtgaccttggagttaaaaaacaatgcggaaatgcatagttcacattgttattcatcacataacatgagaaaacaagagaaaggaaaaggaatacacaccaaggcgaaacagcataacaaaacacagagaatgctaatgaaacaaatgtaacactaagttgcacacaaatcttatgttcctttaatatgctgaaattgcagatttatactccaaataatgcaaaacaacacagcatatcgtgtaattattctttctccttttttagcctttccactggttccataattgacgatatatgcaacaattttaaatcacacaacagagagcttagtaggaaaaaaaaaatctttccatcccgattgaaacagcctcccaagcaacgtgaagctatgggattggtcagcagccttgcaggcctgctcaccaatcccgagccccacatggctcaggaggccgctcatggtcgggatgaaaagcaggattctataataggccactacgctttttactagaaaataagtttctgcatttcattcaactgcattaaaatttagatatattccagcaagtagttatgaactacatcttgtcattcaaccgtaatctgttcatagtctttgttatcatatgattagaacagagagtacaacaacctgtatcacagctttacatgctaattccattagtccacatcataatattttagttctaaatataaaagattttacttaaattaaattggtatgaatttatcatcaatagggaaaaatcacattagactacttatattttagataagtttaagatttgaacctgaaaaactttgtgcatggcttcgatttgcttcctataccaggtgtaaaggtctccatttctgttgagagcattaattatttccctcagttacttattaatcttcacaatttttacaaatatttaacaccaccatcttattcttattcttattattacaaagttcaactagaataacccttattaaaataaaatcatttctgaagtattttagggtttttgagatttaatcttcctctctcattcactccatttcatcagtattttacaccaattcaaagttctatcttcactctaaaatcaagccaattttcaccaaacaaaaaaatcgaaaactagactccaatactcaaattcataattaaactaataaaaactcacttatccaaaaaacacctagtttactcagatcgaataacagagagaattcaagtacatatatatatataaaaagaagtagaacccggcttagattccttgaaacaaaccccattaacgattatataccaatatataactaaaataaagccacaattttcaccaaacaaaaaatcgaaaaacagactccaatactcaaattcataattaaactaataaaaattcaagtaaacatatataaaagaagacgaacctggcttagatttcttgaaaccgccgccattgccatgaaaagaagtatcaaatctcgctctcttgcgaccaccttcatactccatcttatagctaaattcaaagactccaagccacaaatacgaagaagacgagtacaaccaagagtgagagtgtaacaaaaatggcggaatctgagaagagagagagagagagagaggtgtacgtagagatgtacctagagattagctagggttcgaagtagaatattaagagagagagagagaaagtaagaaagagcggaactgaaaattagtatttaaatagtggttcatttattattttgacgtaacgtaacgtaatattaatatatgattctttaaggtgaggtcaggttgggggtcacgtgctctgcgtgtgacgttacttctttttattttttttaanattggaattttggaatagtatggaatatc

SEQ ID NO: 379403 - DNA, 3036 bp, Cannabis indica
taatttgattaaaaaaactctttagtttgctgaaacagataagaagtttaccgaaacattctggatgcagtttagacttaccctattatttttaaccataatttaatattaaaattaaaaaaacaaaattcaggtagcaaaggagtggagatgggatttgggaaggcttgaatttaagcaacaatatcctatactaatggcatcacaatcacaaaggacacttagtgatgcaacagaagagcagagaaatcttgctctaaatgttgccgtggcaacagcagccgcagccgaggctgcggttgctgctgcacaggctgctgccgagattgtgcggctcactagtggtggcggtggtgcttcggaaagggttcatctttacaggaaattagaccctaacttggctgctataaagattcaaagtgtttacagagcacatctagtgagcaattcttctctcattatttttttttcttttgtttaagggtattagtttgttgcttttgatgattaaaaatactttgataattgtcataatctgatttctagccattaatttggttgactagtacatgtcccaacacattacatacttccaaaaattcatgtgggttgggctcagttcttctatcttattgggtcatcactttataaattttgtgtaataatatagtttttttcaaaaaagttattatatgagaaaatttaaagaaaaaattaaaaaaaaattgggaaaattagatacgagtaatcggtactattagagtaaccatataggtaaccagttattgcttgtttttttcttcatatttttacaaacttatactttaaaaactataaaaataataattattatttacattaatatgatattgtacgttttagttctaacttaccgttttaatttgcttcccaaaaggcctaaaactagtagagttagtcgaacaatgtgtaattgaataataattacaaaagatgatttgaatttaaaattaagtattaatataaaaaatgacagaaattccaatacatttagtttgcaaatctcaaatatttgtttgaagataacaaaattcttaagactttgtttgaatcttagattttaccagagaaaaatagtagagaaaagatggtggaaaacatatatttgtaattgttttaagtttcataaatttatactatgctcaagttttagttctttttaaagtagaattcttagtttattgactcaatccaaacatgaaaaaaaaaatataatcttttttatttccttgtccaaacaaggccttaatgaaactataattgaaaaaaggaaaagaaaagaaaagaagaatggaaagattttgagtttatctctttaattgttaacttctttgtgtttgtttcatcttgtttataataagacataatgtttttgagaaataagcatgtctttataaactctacacaaaaaaataggcaaggaaagcattaagagcattgaaaggattagtgagacttcaagccattgttcgcggccgagctgtgagacggcgccaaacaatttcggccttgaagaatgtacattccaataggaagaggcggcccgaggtccccgaaaggatcattcttgctgcagacaaatgtgtcaataatgatggttttaacacaatatctttgaaaccaaaagacttagaagaaaaagaacttgaggtaaaatacaagattttgttaacttacaaaatgtaatcattttttttggttcttgatcacttatgattttaattttcacagcatcatgatcaacatgaagatatgattcaaggagagtggaattgcagtgtactttcgaaaaatgacatagaaactatcattttaagaagacaagaagcgcgaatgaagagagatcgaataaagaaatactcatactcacatagggtaacttttaattttttacccaaaacatcgaaatcacattttttttttacttttttacggatttaatttttgacttttttacatatattttttcaaatattttatttacttatattttttgagaaaagaatgttatttttacgtgccggatacataatataatgtagcagtaacgtaaaaacaatattaaaacaaccgtccgtgtttctgtaaaaaaaatacatgattcgtaaaaaatattaaaaatactgtagattcgtatttttatattttttttttgtcatttttgggtaattgtgaataatcccaaaaaatctaatctttctagctatatttctttgttaacattttgagagatggttcatttttgttatttattaggagagaaggaatagtttcatgctgcaagattcattagaaccttgggaaaaacaggcgatttttcgtcgaagagataatgatttgaatggaatggttcatattaaatcgaaaaattcaaaacaaagagagtttggattgagtacagagttacccctttcgatgaggaattcatttagccaagatagaaggaattcatttggtgatgatggaagttgtattatgatgttgaattcttctccatcttttccaacttatatggctacaaccgaatctgcaaaggcgaagacaagatcgatgagcataccaaaacaacgagttggattttgggacggttgcttagatcatgaaaaccgtcaacacaagaacaagctctctctttgttcatcttatgatggcgaatcaatttggcgcaattgaatgaaaccatttttatcaaaaagacagccttaagactacaaagttagtttgttgttttgtttttatttgttctaactcttgaggctgaagtttaatcatcatagtgattctgaaaagtcattttctttcattactttgattaagaaaattgtgagtgttgtttttttgagtcaataatttctacaaatttgagtaatgtaaatagttgggtttgctcttttcatagttgtaattatttgtataatgaaacaacacataattatatttagttatttaagtaaagtttgtttggtaatatttttttaattaattttctgtttttaa

SEQ ID NO: 379404 - DNA, 3346 bp, Cannabis indica
aaaaaaaaaaaattggatgctgatccccccattccacaaattaatttactgtcaaaattatttgcagtcaaatataaattttgattaaaaaagaataaattaatctcatttacacctcatttatgctcaagacgactcgtatatatatgtatatatacaaaaataaattgatgtacaccgaatcattggacgtaaagaaaataaggtactttgaaatcaccaacgaaagaaaacatgagtcagtagtggtttaaaaggttgcaaaagaaagtgatcccaatgggataaattattcctttaaaaactcaaatcgtatacaatatatatacatgccaaattttaatctttgtaaatatatattggtatgaattcaacgatggcaccaaagttatgaaaataggggtttgatgcgggtctcgatatatgtactcatatatattatatatatttactttatatgtagcttgtataaatgatcctggcaaaagaatatttgagatacacaaggtagccgtaatggccaaaaaattttataatgaatatatgtgcttcaagtatatagatacgcaaattctcctatcgtaaggatctgttcagtcaattaaattaaactctcttcctataaatatatgtgtgcgtgctatatgaagggttaagaaattttgtgaaaatttagtgacaagcattgatctgtatatatacttatgatgtgtaagggctattctctctgcacctttgcatatcctcctaatcaacaagcatgctttctacccagatttcttcatcatcttcatcaaactttcagagtaatgatgaatcctctgatttatttttacccgaaaactcttttccacccttctcctgtcgtggtggttcaacattaatgacgattgacagtcaaccgtccctccattaccaactgtgatcagaatcgacatccctgctgacgatttggaggcagacgtaccaatccattaatgcgttccttacatgtttgatccccttcctgaacaaatctcatgatgatccctacttgatcttgattattgctgtcctttccatttctaatagggtttatagtcttaattcttgtgtctacctacctagtcaggggctggatttggataatctcccgcttgattcggtattaatttttcaccttttgttattcctgagatactcgagtgtacttcgagatatggaatttgtctctgcactcatcttaattgttgtaacaccattttcctatttaagaaaagatttagggttccttctgcttgccatttttgtgctcacgaaatctttaccttctttgtttattccaattttgccaaatatggaagacttagcacgctctttttctgcagcccttcatcttactgacactgaaaatactatacactcccttgctgatcatgcaaacccaaatgagggacttccaccagccccacctcagttccacctcatggccaccctgtatactacaaagaactttaaccataatgccctgaagaatttcctggagaagtactgaaagggacggtttccagttagtgttaaggaaagagccccaaactcaaacctttatcttgctgccttccactgtgatggggataggcgtaaagccatcttgaatcaaccttagattttttataagtgccttgttttattggaaatacccgaccttgattctactctatccccagaatctatgaggaaaatcccattttgggtctaggtctataatatccctttctctcgaaggccagtctctcttgctaaattgttgggtcaaattactggcactctccttgagattcaccaaccctcgctgttagaaacttggggatcctacctttcggttaggatcatgtttgatgtcaccaaactgctcccccggggcattcccatccttttccccggaattgcctccccaacttggcttgaattgaaatataaggatatacccgatcactgctattactgtggccgtctaggacactcatattcctcttgcactgaatacatgagagcctgagatgaatccaaccaaccaccacccctcccttacgagaatgtcctgcgtggtactgcccgtccaaactctagtccttttgggctcctcccaaacccgttcctccatcaacccagatcaccaattccacactccactgccccagctctgagccccaataatcgcaacctcatcccagttaaccacccccgtggtcaagtcctccagcaagattttacattccataacaatctaggacactacactgatattgcgggtctattcctttccccctaaccgaacttgagcactcctcttgttccagaaggtgtcactagctccactctccaaaatacccatgtcaactcccaaatccatgctcctcacggccctaattttgtggctctcttgtctcttgccagtggggggaatctatcatgttctgtttccccacaatagccatcaaccccgggctctcgaagctcatcttctccatcctccagtcaacttaatgccccactgatgatctcatccccgctcaaccaaattgaaccccatccaacgacctcctttgttgagctccctacttctatggcatttgtaataggcagtaatgaagggccaccccgtcgtgcagctccaagaaagaaccaatctactagttcaactagcttcaagagacaactggccactattggcaatgagcagaggaaaatgctgaaaaagacacaggccacaaccaggtcaggaagtggtggaagtggtgtccagtgaagaggtaggccctgtagattcataggcctgccaggagagatgaatctcatcagctggaatgcttgaggactgcggagtgatcgagcattccgaaatctctccctgcttgttagaacgtataagccttctctgttttttgttattgaaactaagctttgtaagaactctgtcgattggtttaggcttaagttagggtttaattttggttttgaggtcccccgtgttggccttagtgggggactttttcttttttggaactctgatattgatgtaactattactcatttctcttctaatcatcatcactgttttatctcgtctgctttaccgctttttatggtgctcctaaccttgaaaatcggatgcacacttagaggatcctttccaggattgtcttgtcttgtttttctcttccttggtttgtcaagggcgactttaacgactttttaacttgaaatgacaaatctaatggtaactctaggaatggaccctcaaactttttttgccaactcatggataattttcagttggaggctttaagtgttggaaattatttta

SEQ ID NO: 379405 - DNA, 6639 bp, Cannabis indica
atcccatacttagtcaccaatcttatacttagtatttagcagataagaatattcttataagcaagtggccaactagcatgatctcactctaattcctgaagtaagtaattgtgttccacaaaaatatcaaaatttctaggaattagatacaatcacttgggtgtcgaattatataccaccaattaatcccatacttagtcgatgtgagatcctaacaacaatacaccctccttttagagtcgatgcccatggcagtctactctacggtggcccactctagccttttcccatcggttgcccctcccacaacatcagtcccaattgagggtgcatggctctgataccatttgttacattcacttgaatagaactcagtcccaaaagttatcctaagagaggagggtgcccaaatacttatatactagctaatcccatacttagtcaccaatctcatacttagtagatgtgggatcctaagaatattcttataatcaaggggccaactagctaattcctgaagtaacaatcgactactattctgccagcaagccaatcgtgagtattgctattcctagacttgcaaagcttgagtcataatttgcagggaatgtaatattgaacaagaagctaaaagcagattggttaaaaacataatcattgaaaagaaaaatcacctggtagcctccaatgaccaagagagtggagtagcttggatggaatacacaggactggaacatattcccactggaattgagctcatgaatgcactctcctgaacttaatgaccagactctgacagcatcttgactgacagatgccaaaagatctccatttgtatcccaacaaagagaatgtacctcagttgtgtgcccctagagataaaagaaagattgtctagtttaattacaaagtaaatacggaaaaaccatgattgactggggactatgaaagaatttgctcgcaccggtaatgagtgggtctgtctgtcactctcaacatcaaatacagagataacgtttcctgctgctgcagccatatagtgtccagttcttggctgaaacctcacttgtgctgaacctccctgcaacattaaatacaatatttagagcaaatactaaactatataacactattgcagcctcataaactaataagagagaaagaagaatatcaatactggccttggaaacacgagtgctgctatattgactgagattccaatagcgaatctcactattcgcatcacaagagcacataaggtcggtctttttaggatggaaatcaagtgacagcacatgtgaggtatgccctgaatacgtacgcatggaatagtttggctgcagcaataaactacaataattaacaaaattggctaacctaaaacaaagctcattgttaccaaactctatatgttaatattcaaaagcagattaaatatatgttcattgaattagacaaaactaaatgtaaaaatgccgatagaggaaacaaagacacaaacaaatacttcgttacatcatgtagtaggtttaacttaaagtcagaaaagtagaacaagttactttccgaaaaatcaaccagtgtgcttgggttcatgtaccagccagaacaaaacatagttatttaagaacattttatcagcatatagtttcaaattgtcttgtaaaaatgatttcagttaaaaagtatctatccaaaaaatacttgaaaaggacaaacattgaggatgaatttgatcgacaaagtacaaatgaaaagcaacaaaaagtattttacaagtctagattttgctattgtgattattttgacaaaacataataaataagtaaatagaaagaaacagaaaatttacatctgcagcatcccaaagtcgcactgttgtatcaaatgaagaggttgccagttgagtggtatttggtctaaatcgaacatctgttattatcaaagtgtgttcctcaggagtgctatcagtttgcagtgtatccatattccagagaacaacctaatgatataaaaaagaaaagaaaaaacaaaacggtttaagcatcctcgtaacttcattttactttcatttcctctagattatttatgttccatatataccttcactacttttctttttttcttcatatatactttcactactaacaagatatctgctgaaaatcttaaaatttgtcacatccaagtttattttcttgcctccaagaggcagctaagctgatattaacaaaagatgaaaataataactatccaagacaccaaacatgcaattaatttcactaaatttaatagactaacatattttctatactatgcttacacacaatcgtgatatactaaacaattacctttttgtcatgcccagcgctggctaatattttaccatcagaagagaaatggcaacagacaactttactgctacttttacgtattgaacttacttcattgaatgaaaaacctgagatggataaaactatgtcatactgcatttgattaattcaactatatattattgctcaaaccttgaggctataaattaccctttgatggctctgttgcgtgttcaggattccttttcaatgtgccaaacatatctcttccatctccatcgtcatgtgataaaaaagaatccacattgtcttctaacgagccaacatcaccgaattgatccatgtcttcctgtaattaaaattgtcaaaagagttcaatacgagtaatcaagttgtcgagttgtagtaggccatcatgacacatttaaaaaattcaaggcctaacaaattaagaatgctgctaaaagtatactaataaaatacaatctttaaatttgtgatcaagtttacgacccttcaaatcaactgatcatcacttgttccaagtctttaaaaaatacgagacggattcaagtactttacaagcacagtaatccatttgtttaaattagtccaccaggggtttgaaccccgacctcttatgtggcttgattttctgaccgattgagctcaataagtggttggtctatgttccaagtggaattctgagtacagtccatcttcagtacttgaagacgttaactggtcatctttttatttttctcccctctaatacaatttttgtttcttctcgaaaaataaaataaaaaagggtggtctgtgaacaacccaatcaaatttaccttcaagatattataacataaaatatataaaaagcaaatgtaccagctggtttgttgaggatgcaagacctccggttccatctgcaccatacatcatcacactttttgacatgttattaacattctgcaaattatgtgccatggcaactccatcaccaggggtatgagttgatggagttgatggttgagagttgggggaaggaccgactgtatttccagtaccagtgctgttagcagctccagaagaagtagggcctttcctttttcggttattctataatgtaataaaagccactggtcaatatattcagaaagacagctttgaatcattacatatcaattaaaacttcagttaaatagtgtttcatcactatatcaagagaaaagtgaaaaaacctgctgtacttgctggggttgcaaaggatcttgttgttgttgttgagaggaagagtgttgcatgtttatctgcttcatgaaaaagaattaaatgatttactattgtaggctcttaataaagttgcaacaataacactgacaagcatctatgttgaccaactaaaccaaatgtaatacacatggcaaatcttacatacaccagaaaactatcctcaattctccagatttagtttcttctaaagcccattcaattaactaaacccaacattttcatgaaactagaatcaagaactacaagatagctgcttcagccgctgcaatggctataataaaaatggagaagatatttccttttaattggcgggtttaaaaaaatccataaatgttacaaacttcatattaaccacattcagtataagttcaagacacatataagctctaaccatatttcagccagtgatcaatcaatcattaccaatagaaaataagtaggagctcaaaacaagtacatgttccttaatggggttcacattacacatgaatgtgaggtttctaggggaaggaaaactttctggtagttccaagaatcaatgcatacctttgatgaagttgattgcattggagagcctatagaaccatcagttgcaatcgtctggccatcttttgcatttaaaggtcccctaggtaatcctctaagcctttgagcatccatatcaccaccgtacatagtagtactagtaagatttccctggccctgcacatgtgataagatttgctgttgctgttgttgtggcagaagctgaaattgatttgtgttttgaaggaaaggcttttgaacttgtgcccctaaaccaggccggatttggtcgataccctggggaaaataccatgtcattactcactgatatatattgtctctcatatagacaaagtgatagatagacttacggttaaaggccacccctttaaaggtagaccactgactcctgggttgagacctgttaaaggtagaaaagagtttcagaggtgtttgcagcatggtttaataatttatgatcacagactggtgtaagcaataattgtattcatgtcataaagaaactgaagtaattattcagatatccaaactaaaatttgtttggataatttgaaattaaagcttgtatctattgttcaaaacatgcaacaattccatgtactgaaagaattagtcttgtgttgccctttggcttcatgaaagggttttaaaggatttccattctgtagtattttgtaatgattgccattgtttatatgtattacattatgttgctgtgatacctatgattttttccacacctatgttgtgatacccatgcaacgaatcttttcaactaatacaaggaagttttgctttaaaaagaaaaaacaaaaacaattccatctgcgtaatagttttctgaatgtgatacagtattaacagaccgaacatcgctcaattttagttatttacagccaaaaccttgctcctagcaccaattcattcgtttcaaagatgaaaaatatgacagaaaacattaaaatacattatagtaaaaagaaaaggggtaaaaacattattttaacagtttctctctgaaaagggatgggaaatttgaacctattcatgatttggtaatgataagttaatcaatcaattattctctttcaaaatctataaccctactcttcagcttgtaaaacctaccatgctttcagggtaacttctttggtggtttaccatgttgaaattcaaaagataacctttatccatccaccattcatgccatacacaatacaaaggcaccttaatccaatctacagtaacctttataatcaaaatttgtaatataatatgcatcctaggcattgtttggttctagtcgtgaatagaatgcaatagaagggaatgaagaactaatgcagtaaactataatttagcaaaaattaccccacttgttgaaataatatatggtttaagtcaggaaaatgagggagagcaagtggtaagaaagaaaatatctagaaaaagtacagagggagaagaaagaaagtgtagagaatcagatagtgtgaggagagacaaagtacacatagggagaagggagaaaaggataaagaaaatggtgagaggagggaggagagagaaaattagataggcagtatttgataaaaattgaagaacagcgaaggaaattagaaactatggaatgaaataatcattcctcgatgtaaggaatgacaattctactaaaaacgcgaagtcattgcaacaatagaatcactaatccaacgtgttaagaccaacaaaccaaagaaatgagaccattttcattccattcatttttccaacattcagtacttgcatgcatgcaattagaagcttctttcttaatagttaatccaaacttgtatttcagtggatgtgggtcccacacaatctgattggtaccaagacaaatactgcttacttttagcccataataggtatatttatatattgatttttgaaacgaaattgaagtggagttgtgatccacgttattccagttatcctggtttaaaattagctaatgctattttctgcactttgttttcttgctccttttaaggtagtatttctgttttctttatattttatttctccctaatttggcaaacagaaaatgtacaatacctgcattccccattcctggttttgactgcatcattccctgtccatacattgaaggatccattggcaaagatctctgagcattggccatgttaacttcaggtttgatgtcctattatacaacattacaaaaaatcgatgacaaattagattgagcaatgaaaggatgagaacccgggaaaattgaactgtgcaggtactcacagggttctgctgggtccgagcctgtatttgctgtaaggctgcattcacactactatggttccctgggaccagctgactgtatcaggaaaagccaagataaattatctacccactaagacatctatcaaaaatatagttatacagtagaacctctatttaagaatactctatt

SEQ ID NO: 379406 - DNA, 2220 bp, Cannabis indica
ataataataataaaagaataatatacagtaataataccttcttgactggttgaaacatgatcatcaggatcatcctgataaaaatcagatttccaaggtctgaattcaaggcggtgaagcaaggaagtgaaatcgaagatcttgggaaaatgaatattaggatgatgatgatgagtagtagtagaagtagtcttcttgttctgttgtttactattgttgttattattatagtaattggtagtactactggttgaaccgcctctaaccgatgaatatgagcgtcgactactactacggcggccttgatttgaagccaagattagaagcttctcattcaaacaaagtggacaaatccctactacaacttctcttgggtggaaatagcagtacgatgagctttcttcattcatgattaaagaaaaaaaaagaataagaagaagaagaagaagaggaagaatgtatattattattattatagaattgatcagagaagtgagtatcgaaatgtgtgtgtatttatatggtgtggaaaatattggagcattgctattaggcaccagtggtgcctagcacctttgtgatatgtcgcgttgcgattggctagcgatactctctaaaaactattatattaaattatatgagacccgatacttagttgtaccaatagcgatattgacacataggaagatgctaagtaccactggtctcctttagcatttttcaaaatattgcaatggaagttattgaaaaatgaagtatatgcaacattctataagggctggtactcaattatcttgggccccacccacatgtatatatatatatttatatattttctgaaaaatgtacttttaatggttaaacttttgtaaacttggatacatttacatatggggttttgtaatatgtatacatatacattagtacactactagtttcaaggttttccaaccagctgattagttttatattctctcttttctctttctctattgtttatatgttctaagatgagactaagtcaagtcaaaaacataactttagaaattgatcataacccaatgtttctttttcttacattatttttctttttgacatataaatgtggtcctgtagctagacaaaagcttaacatgcaccagcttgggaaattgaaaattctctatttattagagtttgtatttttttattagggtataataaataatttttttttggtgatatacaagcgagcattgctattagacatcagtagtgcctaacaccttctcaatatgtcgcattgcgattgggtagcgataatttttaaaaattattatattaaattatacgtgatttgatacttaattgtactaataacaatattaatacgtaagaaggtatttaccatttctgaatataagccctagcattacttattcagtatatataggtgagaagtcattaatgcatggaaagaactagatacctattttatttaattaatttggggtggaattggtcatgtgatgtgcatatgttttcgttatgtcaaaatttgcgacttccacttgatcatgatttctactttgtgaggacatttattatcttgtctctgaaaataaataaataaattgccgaagacaatggacaagataattccaaaattaaaaataataataaagaaaaaacatgggttctagagagaagaaaatagggatgggaaagaagaatacacacatgtcttggaacttgtgacaataaagacctctacgtctttgtttttcaaaaattaattacaaaattaaatatctcttcttttcattttgttttacttttttatgttttttcattaaatgaagaatttactaattaaaacggagcacatacacaaactatatatagcaccttataatctaaacttctaaactgcagataatattacaaataaaatcaaaacttgttggtaatctcttgcagactttcctcttaaccacaagtaaatctagtatttaatgctactctaatcaatctatctacttcacaaatcataaatatttttttctcaaaaatagaagttcaccaaataaagtatactgctgtttgcacaagcagctgcaacaaccttataaatcaagttgcgatatctttcgtatttaaacacagcaactaattgcaaccccagtaagtaagggtgggcatccgattcaatccaatctttttttcttcatctgatccaat

SEQ ID NO: 379407 - DNA, 3091 bp, Cannabis indica
tttttatcctactttcccacagaagacctaaaagacaactgtatcatgcagttgaaatgtggttcattgacataataagcgatttatattaatattaacataataagagagaataatatacaatattagagcagaggcacctcaaacattgtctctcgtccaaattatcattcttggtttttaaataagaaacagaagcagaacaaaaaaaagaatatagaatttaaaatagtaaaccaaatatgcaattaaaaaaaatatcaagtgactgtatctctttaccctacaagtgaatgtggcaatctgggaatattcatttgatgccttttagacactttagcatttccatcattttgttgcagagttgctgcgggatgtcaaacaaaagtttaaaaatagggataagaaataagatcaaaaacttcacttatttcacccaccctttcttcatatctattttctcttctcaactaaactaaacaaataacaatatagaaacagccacttggagatatgagcaattatgatatgacaacacaaaataaataacataaaagaaatatccaactatatctaacaagctatatcatattataaaatattcataattactaaaaagatagaagtacctttccagatgttgaaatactcctcattgacagatgaaccagccaagtctttgatgacttcaccaagcaggccaaccggtgcagtcttcaattcttgtatgatgctataaataggtctcccattatccaaatagatgtgattattagggtgtcgagtcttgacaccagcatgctgctcaaactcgtacgcactgagaacctgttaataacgatcattgagtcatatgcagacattcagaagacactaaacaattaacatagctatctaagagacatacacttgtgaagcggcagaacgagcaaccacacaaatacccaccaccacttatagtcccctctagctgtttctgccaaccagtaagcaaaagcatcacataagaataatccttacagcaaaaaagaaacaataaaagaagaaaaattgaagtctaacctcagaggagctcgatatatacttgaccctcgcaccatcaagaataccagttgataatagttttttcacatttgtagggtagctgcttggcagtaccttcttagacattttcaattccaaattaggagcgcataactgagcattgctagtgtcagcatagcctctgcgttcagaacattcaggcatctcatacgaagatgatactgtatctaagccactggttcgttggtggtgttgtggagtcaataaacaagagtccttccttttattcagagtaaatgtgatttttcgaattccagacaaagcagcatgctcaggaatctccaatacaatacgagatgtagtaacaacatcattttcattcccacaagtttcgccgccactgccactacggctaccaccgctggcacaaggctcttcgctcaatgtctcctcagaaatggaattccccgaacaggtggaagtgatttcgccgcactcaacagcaagagcagcatcattatcattattatcagctggcaacagagctggttggctagttatatcatgaaacgtagaatgattggaagcgatgattggattagtgacctcggaacgtatatcgtcattggaaacctctttggcttgtttcttgtatggaaattgatccgattcgggatcttgttcttcaagaagacattctcggtgacgcttcagttccaatttagagacgtggtcctcgtgggcgttcccatctgtaatcgcaagcaaacaagatggaggtagaggaggaggcagtggtggcggcggaggcggaggtggtggtggtgatgaatcttgttcagtttccacttcctctacatctacttcctccatttttcataaggaatatacatatatatatatcctaacaataataataataaagaatcccaaaattcgttgaagatcgaatccttgccaccattaatcagctaaagaaagaacacgcatgcataccagtaaatacatatatatatatacatacatatatatattaattgaattacaagaagcaaaaaggtacctgatgagatgattggggatatgaaatacagatctggattggatttgattggattggatgtggtttagggtttgagtttggggaaatgaaaaggaaaatggtgaacgagagattcaactctttctttctctctcttttctggtttgggtttgggatgggagaagagagacaggtggataaaccttattatgtgtcccactatttctaacctattatcgtttgccacgtgtcatcacttcgctacatgtacggaactagaggcggttaacttaacggatgctcccatttccgtttcccacttctttcttacgtgtattttaattattattaataaaataaaactgttttaaatacatatttttatcaatagatttaatttaattaatatttatgtataatttcaaaaaaataattatattaaaatttggagtgtgagagagtagtgaatactgaatggtgatagtagtgtgcggagggcatctttggcgccaatttttaggcgggatgaaaaggaatgggagacctcattctcattctattttcatttatttattgagttttttttttatgttttaattttttacaaaattattttattgttaaacaatttatattcattttgtgttagttaaatattattgttaaatactaattgaaattaatatttaacagtaatattttactagatgattcaatttgcaaaaaaaaataacttaaggaatttaacaataatattttactagaggatttaatttgcaaaagaaaagataaagagaactaaggtagcgtttggtcggagataatgaaataaaataaaatggaattgaaataattttcattcttttgattgcattttaaaatattggaatgatattccaataatgctcttttcaccattttagtggaataactattccattttaaaaatgaaggaaagaccattcaatgtaacaagaaaaaaaaattaatgatttttttatcaat

SEQ ID NO: 379408 - DNA, 4050 bp, Cannabis indica
agaaagaatggatgacttgtcttgctacacatttgtcccgacacgtctcatactctggatacaattcttcacacaatttgcagcctgcacactagctcggacacatatcattgtgtcgtcggcgaacatgaggtcgggaaataggggtaacacccctggctattgagatgcctttaatatctccattatcctcggccctaagaagaaggcgggataacacatcatgacacaagaggaaaagaaagggagagatgggatctccttggcgtagccccctcgacggcctacacttcttaagaggctttccgtttagaagaactgcataagaaacacttgtgacacatatcataatcctctttacagactcctccgagaaaccatgggcatttaggaccacccgaagaaagttccactccatacgatcataggctttgtgcatatccatcttaatagccatcaagccccctttgcttttatttctcctcaccgtgccaattacttcctggcccaacagcgaagagtcggctatccaacggcccggaatgaaggccgcttgataaggggagataaggctatccagaatacctttgattctttgagagagaatccgagaaataatcttgtagacaaagttacacaaactaatagggcgaaaaagatcaaccctttccgcattctgcaccttgggaattaggcaaatatagttgaaattgagatcctcatccaaggaacctgatcggaagaactcctgcacacaatccgtcactttcgttcccacggtgtcccaacaattcctgaagaacgttcccgacatgccatcaagtcccggagctttgagaggatgcatttggaacacttgattcttaatctcatcagctgtggggatggcacacaaagagaggttctcctcattcgtaaccgagggggagattaatctgtccaggccctccgggatacaaggggccgaagattgaaacaagtctgagaaaaaatcgttgaggatacggcctttgtcattctcactatcccttctcttgttatcaccatcatacaaggcccagatatgtttgggagtatcggaaaagcttatataatgatagacaatgttagtgtatttattttatattatagaaatttatgtagaatacttttttttagataatcgttccggtagaattttaatctatttccatatttagaaaaaatatttattttaatttattttataatgtgtaaatttataattatttgagataatttataaattttataaaatttatattatagaaattagaaatttatgtagaacacctattctcagataatcattcggccggtagaattttaatctatatttcgatatttaaaaaaaagtatttaattaattttttttatataatcatgtaaattataattatttgagataatttataaattttttaataatttactatgttaaaaataaactttaatcaattaattactacacgtataattagaaaaaacagttttttttttagatgtataatcataactaaatactcaaataaaataacaaaattagaacaaaaaccagttcaattggtcacaagagggaccaactcctctgctgcaataaaaccagaaaaacaatgtctaaacgcccactttgagagcttatgggctacctgatttcgagaacgaggcagccaaactacctccacttaagggagatcatccaacagctccaacatgctccaaaagacactcgtgagccgccaatccggggccctccaaaacagttaatgtatatttttgatattataaactactaaatttttttttttttgaaaatttaccgctacaaaaaatgttacttttagtgacaactactttttagtcacaatataaatttttataattaaatgtgaattttagtcacaacaaaaaattatttgtgactaaaacatagtgacacaagttgtcactaattttattttatcacaacaagtattgtggctaaaaatatatttatagtcataacaaattgtaatttttgtaactaatacttttacctacggacattttaatcactaggaataataatttataattactcacaactttttttaaataaaattttttgtagtatactaataatcttaaataaatatataacatacaccattataaaaataattaaactaaaaatcatttttaaatactaaaatagataggaatctccctaaatactattttagtgggtgtactatattatatagtagaatattttagaaggagagaggcaagttattttatagtggatttatattatatattatatattacacattttgtataaatttggcaaataatagtgcaaaaggttagatcgatcgatgttgactaaatggggtagcaattaattatatatgtaaataattattttagtggcatgagtataaactttttatctcgaaataattaatattgcacactttcacttctcattatattttatttatatatttattaattaatgttacttttaatcaacggggtttaactgcctaccttatatttcttcttcaaataattaaagaaaggtcatattgacaaatgaaacaagagcacatgtttgatttttaattatcaatctatcccttttaatgaattaatggcatatgatcttttgtattttgtagataccaaccaaaccaaacctaatttccacttaaagcaataaaactcatacaaggaatcctaaatttgaaatttgatatcaaaagaatgtattagacaaattaaacgatatatatatatctatatatcatctacatatacatcagtctcttggtgtgacaaactcaaaaattttaatttgttaattgttataaaaaacagaataatattagtatatttactctttaaatttttaatactacttacttaatcttgtctttgaaaatataccgcttttaaaaattttctctaaaatcatatttcttttattaagttctgtttttttaccattaaaaattagtattctaacccccattaactttcaattaatttgtaatttttctttcttttattttattaaaaaaattaattttaaaattataattttttattaatgctaaaaaaattaaattaaattattaaaaacttgataaaagtattaaataataaaaaaatatatattaaatttacttaaaaaaattcaaatcattccaaaaaaaaaaaatattttttattattaaatataaatatattaacatatatataaaaaaataaaaccaaaatttttaaaattctaaataatttaaacaaactaagattttatgaagctatcagagttaaggaagtgttgagttggttaaaagaaacagggtggcataatatggtggaatcagacaatttggtcacgattcgagttatccgaaattcgttagacatgacttttgtttttcggttatgcatttcaaagtgcagacgaattatttctagtttaaataatatttttttgatttttatcaagcgatctgctaatcgtgttactcaccatttgactagagcttcgtggttaaatgttggttgaatctattcagattctacaattttgagtagtttacgtgatgttcttttgaatgatttgggttgataaaattacaattctattaagaaaaaagtagaaattcaataaaaatataaaattatttttaaaaaattaaaatttaaattaaaattttttaaaaaaattaaaatttaaattaaaaaatattatgtttacttaaacaaatctaaattctatgggtcaagtgggttcatgttgtgtacctagaataaaaaaggtggagtgaatatgaaacacctacaaagtacatatagctagtattggaaaagtggtgaaagtaaaagagaaatttaaggtaatatctaggggtgggcatcatccaatccaatccaattgaatcgaaccaatccaatccaatctaattacaaaaagttggatatccaattacaattggattggattggatgttaaaagttggattctaattggattgg

SEQ ID NO: 379409 - DNA, 7052 bp, Cannabis indica
gaactgcaccaacaccaatggtaataaacaaaataaagctgaaggaaaacaattgtaacaatttttattattgaaaggtattttttttaaaaaaaagaataaattttaagaaaaaaaaattacaagaatcatcatgcaaaaaagcatatttattcatttttaagggaagcctagatgtctatattttaagtgtgaccgattatcacttcaaaattattgggctccttgtaaaagaagaattaaaaaaaagggacatctgttcaaatttctaataataatgatgttcaattgtgagaacaccctttaatatttattaaactttaaaataaaataaaaaaaaaaagcaaaatataaattacaattttttttccttcccattagagaatctgaagactgatggcttactaaatctattaaattggaaatacaatgttgtaataacatggtcaattatatatacaacaaataaataatcatcacaagctttaatcccacaaggactttacatgtctgaaaaaactaagtatagaaagcaagaacactagcaaaccaatccaaccaaacacctaaaaaattatcacttttctttttcacctgtagctaacttgtgaggatgatggggagatgagtttgatcaaccactgtacaggtctcaacatttgcgccctcttcttgcgccaaaaccaaatggcggcgttgtattgttcgttacgtataattcgagttgctgctttccagtcatacttctccatttcttgacgtgcagctatgcccatggtttccctcagttcatggttgtacaacagaggcttcaattttgataagcaatcttcgaggtctccgggattgtagagatacccaatctttccttcctgatctgggggaattatatctggcactccacctgcccgagcacccaccacgggaatcccagaagacatagcctctagaacaacgagccccagtgtttctgattccgagggcatcacaaatacatctccgctggcgtatgcctgggagagctcttcaccacctagcattccagtgaatactgctggcatgcctgagaacaatttctcaagctcctctctgccaaagacagattaattagtcaaatgaattgcagatatccaacatttacggttttaagatgcaaatgctctcttccaacatcttaaacctcgggccacgagagtttcacagtcaaacagctgtaagaaaattatacctgtaaggtccatctccgataaaagcaattcgtgcttcgggaagactatccatgacactgttaagaaaaatgttactaatgtcaaaatctgtaaactgatatcagattaaaacacaaatgtataaaagctcataatggcagcacactgagctggtaatcagaaccatgctgatgactttcatttgtatcattatgtttaagaaagattggagattaaattttgtgatttgccattttgttcaaaaatctcttcttatttacattattaatctattttcatattgaaagattaaattagcattacctcttgaggaaatccaaacttttctcaactccaatccgtccgacatgaactatcaatggcttctcaggttcgccattgctgtttaagacaacattggatgtaaaaattcatggaaggtccagtccaaccctcaaaaaatgatatcaaattgacaagctgattaccagtctctaacctcgtgattaggtttgagatgtggatttattcggcctctagaattagataaaaaagtttgataagctcactaaagctcttacctcaatcttatccgcatttcatgagagcggaaacgtggatggaagctttcagaatccacacccttgttccaaagacgaatcttattatctgcatattagcgaaaaaatatcagcaacttctatcaaattatagattactgacatcataagcataatgtagatgaatgaagttaagtgtggaagaggaaaatgaagcaacacaaagatacaagaaagaaaattggtcaaatacatgactttaattaatatgttaaatcggaatctgattagttattatacaaatttgaaactgcctataaatacgcttgtaaatggcagtcaatggatcattagagattaattattctaactctctttctccacatggtatcatataactcttcttcctaaataatggccaaaactagtgacccaacaaaggagctgatagctcttttcttttacctcataatatttgaatggtctcagttttctacagtggtcacaattggtgaccttctacctccgcgaaaaacctgggatacctcattggaaaaattaaagctcttgattccagctatacagcttattccaaatgggataatgaaaagtcaatgatcataacttaacttaaaagactaaatcaaatgaggttatactatgataataaatcagccataaagggttgtctagtggtaactggtaaggagtcttggaaagtgctgggaggcatttgtttaaaggttcgaatctccacaagctcaaaaaaacctcggggctttttttgaccaaaaattcaaataataataattatagaacaagcacgtggaggtagatcatcacttcattaagcaatgacaacaagaaaaaatcaggagagttgtatgtggtctatgtacaaagcagttagcaaactacagatattctcactaagtgcttgtctattagaggagcatagattaagagactatgaaactcaagcgttggagagagttaacattaccatcaattaaacttaaaaagaaagacccactggtcataaattaattaaccaaacatgggctgagtttgacattcccattcccatcaagtttaacccacataccaaaagccccataattgttatgaagggacaatttgagagtttggcatgtggaaccagtatgcaccaacttgagtgggggttgaaatatatgtattttattatatgtaaatacacagaaatatatgtatttttgctaatatgtggttccttatttataggattagttgcaaatctgcctataaatgagcttgtgtatgcagttcataaattagtaggagattaattattctaattccttttccacaaaaatttacacaaggatttcaaatatacaagacttgatattcacctgctgctactctttctgcttgtagatccttctgaatggcagcagatggcaccagcgtaaggtcagccgctctgtgcagaaattctggtaagagagtccaaaatgttaatatcaaaggcggatattagttatcagaagagcaagaaaccaaaatacacccccgaaaaaaaaagttgacatacttataaccaaccacatcggcctcaccagccaactaaatgtgtatcttgggatgtatctgcaggatccaagaaagagtaaatcttagtttgtatgtgtcagtgagaaatatgatttactatctaagaattcgaaagttactgttggcgttcccagatattcaactagacaatgtctgcatgaaataaagtttttaaagaaagcaagaaaaaaatcaaactcacactggaacatgagtatgataggacatcacaataggaacgcataacagcttagcgataataagagcaccaaatacctgagaaaaaaaaaagttgttcaacattattctatcttataaaacacacggcatagaccaagaacaggtaggaggaataaagtacttgccattattccaggtgacgaggcatgtattatgtcaggcttaaaccgagcaacctctgaaatgattctaggactcagtgcaagggacaggggtaccttctgatacaaggggcatgggaaactgagagagtaaaaaataaataattaaggatttacaattgataattgtatttgaaacttgaagggtcataactcaaaagttcaggcgtaagagcaacctccgggatccaatcaattttgcaccataaaattcctcaggtactccttcgtgtgttgttacaaccatcacctatatagtatatcataatcagcaactgaagctctagataaattatgaaagctttaaaaaattacaatctcagaaagcaaacctacaggcctaagaacaaaatcaaagcttatatccgatacaacaaggaagaacaagtacatgaatgaactcgagttcaagctggaataatattatcattttaaatgaaacctctattacaaataattttgttatgctgcaccaactttaaacatagtattaaatacagaatcaagattgacatacctcatcacccatttcgcgtaagtatctaataaaattctggaaccgatttttatatcctgatacatatctgaaaagtagagagaaaaaaaattgctcttagaaaacaccctacatcagaaaacaaagcacaccactaggtatgttataaaatctatcttggtatcagaaaaataaatagaaatgggaggcattgtagttcataatatacatttaaagtttcagtccaaacatacccagtgggcctatattcaaaactagggcttctcacctaggcctacaaacaataaactacagcaatagctatgatgcccagtaataattcgaacctcaggacacaagatcaaaccacaaacttgatcattataatcctctagagtcaaggttgatgatatattactgatcaagaactctaaacgatttggatcaactgacattttccttgaaaattttaatcttcaattcaaaatagtattttttgtaaaaagagaaagaggcctttctagttctcctaaaaggcaatttaaaggacacaagatgacggaaaaatcaacctaactcatccaatgatcaggagtatgactgttgataaacatttgatcgcagcaattcaacagatcaattacatgagcatcacaaactatgagtaattctgattaatttaaaggcaagtatcacacaaaggattgatctcaagttccaaacacaattaaattgttgatgctgcctgctacaataagttaaccaatccagtcttcaatgagcaactgtcacaattgatatggaactaatatttcacattggaaagcacactgttgaagattgtatctatttagtcatttacaatcttttaaatcattcatcaaatgaattgtagtgtgagaagagtcttcttattggagtggagagaattgttgggcttggttctttgaagtgttcaactaagttgataatgcctatagttttttttgaacgtgttaagtttgtgagttgagtgtttcagttaacatatttccatggattttgtctgtgctgtttctctttgttagtaacaagttctcatcgaggagcccccactaactaaatgcaggacactgattggtccaaatcaatattgaagttagtgtttttcatgttctgttgacattaattttccaaaactaacatctcattcaaaacaagttacagtttatccagctggattttcaagcaactcactcttgatgagagttagttattttctgtcatttcttgctcattagaataagtgctctataactatgtataaataccagctcggtttcatttagaattaactttagcttttgtaattagagtgaaagaagatcaaagtgagtttttgagagcacaagagagaagttgtagttgggaatggtttaaagggtactggatgcaagtacttgtgaatccgagaagctttgatctttgactgtgttgagaattgtaacagctattattatagtggattgttggggatgatgctcaaactggaagtaggcagtgcaatgaacttggaattctaaggtggcgtttggtttgaggtaatgaaatggaatggaaaggacacaacttttattccatttctttgtttggtttcattttaaagtattagaatgtcattcttattctagttatgttttccttccttccaaccaaatgtcacctaatggcgtgtttcatacgtgagtttgagttggagagagtagagtcagggagtagagttggagggaatatgaaacctaagtgttggaggggattaacattaccaccattttaatttaaaaagtaggatccacttggaaacacaaaccacttattattaaaatttaatttagtttgacattcccattcatatcaagtctgaaccttgtactaaacgccccattgtgttttgtatttatctttctttcaagtctactcttgttgctttgttgctggttttccaactttgtttgtagaaatttgagtttgttgttattcccaacattttctttgtgtgattgttttaccattgtagattgtctttgagttttcttggttctaaaataaggttattacaacacagtaatcataatgaccaacactcaagtactcaacaatgtgttttgaaataaaaagtaaggtaaaaaggagtaaatctaggatcattaaccaacaatgccaatcatgatatgcttagaattcactaaaagtcaagaaacagaaaccccaagctaggtcaataatagctaaaatacacataacaaaccagtgaaatacaaagcttgactacccagaaaaggcaatccaaaagctgaaaacatcacagcccaaatgccactaaatctcaaattcccataacttgacttaaataataagcatcagcatcaactaactcgaagtaataacatttgggcaaaaatgggtttcacataataataacaataatagggcaaatattgaactcaaaaaaagaagaagcaagaaagtagaaaagaagacttacgcaaaaggtgaaggctcaacaaagagagcaattcgacgaggccttgaattgttctcaggatccaataaaggaggatactcttcctcttcttctggcctaatctcagtgatggtcatatcttttgctttaattccaaagttagtccttttcctcactctcttgggtccctcaaagtagctaaaccgtgttcctctcacaaaaggacaagtgggttttgttcttaaggcaacaaaaacaggaactgaagaagaaaaggaagaagaagaa

SEQ ID NO: 379410 - DNA, 1722 bp, Cannabis indica
gttggaccatcaaccaatcaataattcattttgctgactagattcattgctgttagtcatatcatagaccaaaaaaaataaattaaaaattgggaaataatggtataaaacaagagagaatgaattggaattatttatttatgtataaacaaaaatgactaaatacaaactgaataaactgaaatggggaaatgggaactgaataaatttaatataaaaaaaaatatcaatataattttattaaattaggtgagactgggaattgaaatcaacaaatgtaattaaatatatataattaataaaattatctctttaaattttaaatattataattgaaacaaaattacattaaataatctatttcaattcctcaactcataataatagactcataataaactaggattatgaagaaaacaaagcaactttggatttaaaaattattatagtttattttagaagctgaattagaatttaaatgtaaatgaattcaatcctttgtatctttaattttttttgtttgtaaccaaaatattcccttatgtttttattcaatgagtatgcacataataaattaaattctcagaaaaccaatatgaacattgtttgcacataaaagatgaatacgtacaaaagaattggtttgaattaataattacaaaacatttaaaaataatacaaccaatcatgcaataaaaggacaaaagtagttcagggtcacttttgtcttttcaccttccactattgggaagggagagtaaataacacgcgctggaaatgcaagtgagctagactcgttagttttaactaaatatatttagtagtacgtgtactacaactccaaaacccacggtttcactttttcccaccttgtccctcactccaaaaccccacatgacgtcatcacctgttgggtcccacaaccctttttcccaaattcttttgtcgttttcttacatcgaaagttaaaaaaataaatataaataaataaataaagttgctccaactccattggcggtccccacctccccaaaaccatcgaaaggtgggcccaaccaataggggcccatgattatgatgatgggccagtggggtcattttaaggccttttaatattctctcgtggtgggctcttgttccgaggattttgttccctctactcactgcgggcaggtgcttgggcagatggggcaggatgactgaccgggatttgattattcaccaccactgtacacgtgtggtaaagtccatgaaccaacgatgcacctttgattgtgagttaacgccacgtggtgcagtaacggacaaaaaagttaacgctctctgacacagctgattatactgtttagcttcttctgaaactttcttttaaatcataacgtgacgttacgtctgttagatggtatgacttcttcagtctacccataattggtatcaatagcttgggcggcaactttaaccctttctctttttattttactttactaaattagtaataaaaatggttctatttttttacatcaatttttaccgctacaaacaatatctcaaattcaagtaaatataaatatatattttttttttacccaaactaagacatcgtagtgatttgactattttgggtaaaaaatgatgttataaatatttggctaattagtatttttgtctcctgaactttgacatatactaaattatgattctgaacttttaaagccattgaaa

SEQ ID NO: 379411 - DNA, 3921 bp, Cannabis indica
gcatttacctttaaaaagatatattgatacatctttttaccacggtatttagaagtaaatttttagtttaattttttttcatatacgtgtacgttatattttaaaaaaatttggaataaatttaaaatataaaaagtagtgctcaaacagtctatttcacacgtgtataaaataaaatagtcactcgtataatacaatgtttgaaccgtgtttttgccgtgttaaatttttaatagtaaatttcttaaaaatttttacaaagatatcttaaataactataatgtacatgaccataagaaaaaatttgaactaaaaaattattttggataccaaaatagataaaggtacatcggtgcatctcttttaaaaaagtgtattgtagaattttctaaaaatatatattaatttaattaggcttgtttgaactttgaattatgtttggattgaatcaaaaaataaattaagaggttattacttttacagtacattcccaaaaataagtgtattgatgcactttcatgtgtttttaatactgagtaattataattttacttttttttagtgtaaattgtagttatttaaaatattttatcaaactctaagaaattaagaatattttacaatataaaaagtaaagttcaaacaagtatacaaaacaaaagaagtacacataacaaattatttaaactttgttttccgcgtatagtattttatcttaaataactacgttataaactattatacaaaaaaaaaaaaatagatgtcaaaaacatgaaaaggtgtcttagtgtaccactttttgatggtgagcagtgaaatttcctaataatattttctgttaaaaaaaatacaattactttgtatcttcatcttgaagagatccataccattttgaaaataaaaatgagaaacaaaagttaactagtgaagcttttaagtcaagaatgtttgggagtgacaattgtctatttcttaatttgtcaataattattaaacttggcatatctttctaattatgggtataaaaaaccataaagcctcaaatttccatttggtaaaacagagatgcaactaggctaaactgaaataccatataatacaaaacttggataacaaaaaataaaataacaaaaaatgttggaaagtgaagactgatcaacgcttgacccattggtagctctttcttgcttttgcctttcctggttttttcctttccaccattcgagggtccctcgtcaagaaaccggctgttcatacaaaccaactagtttagccaaaaacccttaaagaagcaatacaaggatcaaggaaagaaaagaaaagtcgagcagaaaaatgtggtcaactaatcgatactgtatttcgataatgctattgtgatgtgatctctaatcaagaaccccagaaatttttttagatgcaaatactagagatgcctttttttgtgtccataacgaaaagatacctaaaatcaaattgcatatccttaacactagaaatcaacaatcctcaaacaatcccatatttcactcaaaacctcttcagtagtcagtacccattttctaggccatggcccatactacagcatgcatatcatataagggagaatgaaatgtaccatctcttagcggagggcgcaaatctggttcccagttttgcagcgccctactgatccccaaaagaacagctccaacttggcctgtcatcaaacattatagattttcctatgattagaaaatagtgcaatcaaactaatgaatggacatctgagaactcgtaccatcagcatagtcagaaattaaattataatccgtgacagcaccacatacaaaagaaaaaaccaaagaacttacccttcaaagctaagaaggtatatagtgctcaaaccatgacaaataagcaaataagatttaattttgtgcttcctaattgtgcggctcagccctcatttctttaaactaacacatttctattgctaacatgataaagtaatcaagcatgtgaaaccagagcagaattagaccaacctgttgtaccacctcctttgacagtacaagtaacatcccaaagccccaaagtttttgtctcagagaaaggccgaaggagggcagcacgatgatcgagcattggaaaatagacatcaaattctttttcattaacaaggaatttaccatcaccaggttcaatccaaacacgggcaacactgcatttccttcttcctgtaccataagaccttcctttgtcatctacttgcctgactctagctttagcagcttcctcctgcttctgacgctctatttctgctcttgaagatttccttgtagttttctcatatcgcaaatcttctagttcacttaaagggggcaatccctcaactccttccaaatcctttagagcaatcaaactgtcaagcatgtcatcggtgatcccagatgcagcaataagatcgccaaaagcacgatttggacctgtaattaagcatattgaatcagtatacaatctaatgataactagtaagacttacataaggacactaaggtggtgtttggttggaggtaaaaaaaggaaaggaaaaaaaattaatttttatttcattcttttgtgcgattacaattttaaagtatcggaatgatttttccatcattttagtggaatgactattccattttgaaatcgaaggaaagaccattcccgtataagatattttagttttgattccattccatttcctttcctattttaatgttttcattcccttcaaccaagtgccaccacttgggaggaatgaaaacacaaaaataggaatggaattgaataaaatttaaaatgtattaaaaaaaatatcatcctgcatagaaataatctttctttacattttaaaatggaataccaaaatgataaaaaagtcactccaatgaaatgacattctaaaactttaaaatgcaatcaaacactgaaatagaatgaaaactgattgatttctattccattccatttcttactcccaaccaaacgcagccttaagaaaatgcaaagttttattggtataattaatcataacccatattcttatgaagttagaaactgaattccaaacacagaattctcaacaaaaacttacaacatgcttgtttgtatttgtaaggttttgtttccattaaattactatactaacaagtccaataagccaaatcaagtacattttcatagaaagttcatgaatttggagaaaaattacaatattcaacacaaatatcctggtttaaagaaaattcaatggcaatacctttgattataacagagagttgttgttcctcttcttgaagcatctgcaactcttcatctctatccttctcattactaacctcaatctcagcttcaccaacactactcacataatccccagtatcaaacaaatcggttttctcctcttcctctaagctccacggcttatacccttccgcagtttcccactcaccgtccccggttttcaaccacgaatcagcctctccgggttcaattccgacggtcttagaattatcttcaaacaaagggtcgaactttccttcagtttcctgagaaagcttccagacattggtctcggattgatccccgccattgttgttgcgattggaggatgaggaggagaagaatctgggagtggaaatgaaagttggggttttggaattggatggagatgatgagatttgaggtttgagatgagaagtgaagtttgaggaaattagggttagggttcgaagatgagagggtttagggagaagacgggaaagcatggtggtgaatctgagaaagccaagccccaaattctggtctgggattctaaaacccttgccaaattatgccaaaaacgatgtcgttttccaaaccctgatgtcgttttccaaaccctgatgtcgtttt

SEQ ID NO: 379412 - DNA, 2027 bp, Cannabis indica
tatagtaattaataattattattatatatatagttttttattttaaaattaaaaattcaattatgattcttatagagtttttatccttattagtttttattattataaaaattccctgagattataaatcgttacaaatatatctccctataattacattatctttattttttcaaaaaaagaatttactttatgtgactatatataagctacatgtatatatagttgcattgcaaaaagttatttaacaactttaaattatttaaaattcagtttgttaacattaaaacaaacaactctaaaaatgcaaatagtacatattttcataatttagaatgttattaatttatgtatttaattttttttgggtaattaaatcaattttattccaatcagtactatattgtacataagaacttcaatacgtcaaacctcaaattctattaaccagataacaataatctcacaaattcttattaaatcctttaacttaaattctcaaaccatattctatctttttcttctattttcaatatgtttaagactatatattctagcaattacaatatgtttaacagattgaacaaaattgatcgttatttgcattttttttgtccaaatttaggtattttatttttagttcttcaaatcataaacacgatattgtgaactaaaatgtaaattctttttcgcagcttgctatgttggcatctacaaatccatttcaagacccccaaaaatttatattagttggtactaatgccaatctaataaaaaatttctaaaagactacttatattattgtatatgttatgcatttagtttttgtttagacttttgaatttggatacattaatgtcattagtgttacatcttatttattaaaaataaattaaacctttagtttaagaattgatattttctaaaattacttacaaaaagaaagaaagaaaagaattatgtaatgtatagttgtaaatttaatttattaattttccataatgttatcttatctatatattcacggctgttgggtgcggtcacatcatacacaccctaatttagaagtctttatttggtggtgggtcttactcttatcctatgtggcttagttggttggcacatacaaaattttaattaacaaattattaattaagactaagatatggactcacactcactcactcactagtagtaatatatagtattctctatttacacaaattaaaagcctttggagacacatccttcattcctcataatataaggactatagatcataccaaaactaatttacttcataatataaggactatagatcataccaaaactaatttacttcataatatatatgaattcaaaatcgaatattctttcaattggcaaaagaagtactagaagtagaacaaacaaataaggaaagactagagagtgtgtagcctttgaacttgtttgccaacaatgttacggatatggtagagatatttactatacttattaatatcttttgtaatggctatgagatctaacttcaattttatttatagatgtataatttaaaaaaaaaaagaaaagcctttgaacttgtgaaaatttattaatttttctaacaatctcccacatgaataaaactaaccaaccttaaacctttgaagtgtccctagctagatgatgatatatcgatcatgacacaattatcttctctagcacagttcatgagttctcctagttctattcaatttcgccatgaacatttgcatggttatgtgagaagctttagctagatgattgtgtaagagtaatcctccattattccaattaaactttggatgagttagactcattaagagttaaggtttaacctaattactgttagacttttatttgggcttacattaaattttattggttttattaaaacttgggttgattagatagttctttgctgtgttagcccatgttgttggtgattaattgttaatgggcttagcatctgtgtgtaaagtctaggtgaagcagaagtgtgg

SEQ ID NO: 379413 - DNA, 1460 bp, Cannabis indica
aaacccaacaggtgatataatgcttaattatgtgttgtacaagcacttatttgtatatggtagaattgtgtgctatgcattgttatgctatctcgtattattcgctgtttgtgattacttgctttcttaccgagtctttgtgacgcacgggtgcttcgtggtgcaggtaaagggaaggaaaaagtggattagtcatgaatcagaggtctcccagtgatgtacatatcaactgcggtgtctcggctgccagtggacaagatccatccttttgattatattttagaaatgtaaccctattttaaaaatatgattttgaatcaagttgtgaaagtttataaatagaggatccccttacttagtggtattttgtataaaaaaaattattttttagtttaattagaaagtttttaattaaaccgtacttttattaaactaatagattaactataaattagtttgtaaaagcacacatgtagcgtccctatgagttacggcgttacacatatttgaaacacacttttcaattttttattataaaacatatagatattgactaaagatgaccaataaataaacatagatgaaaaaaaaaatgaaataaggatgaagaagaacaagaacttttattcacaatatttttcttaaagtgaatgaatcattgttaaaaattagcttgaagctttatatttaatttttcatcacaaacagagtatgatgagcattcaacacataaattttttcacccattgtatctgacaaactctaaaatccattaaattcatattatttagtatgttttctctcaattcaactcttatgatgtacttgaccattaaacaagaagaaaataaacttgagattgaacaataaaatataaaaactactaaaaacacatactaacggaaaaattaatctatttttgccatcgagtaaagactgacactaacctcacaatactagaaaacttaaaaatacaaataatatgaactaatgaattaagtcaacaatagtaaattagcctcaatttctgaaaaatttcatacgaattccaaaattccaattagcaaagataatccaaaattttaattaactacatcaaaaatatatttcgatccaaaaatacctattcaataataatcacaaaaattactcaactgaattttatatatgcatataagaacttaccatcgaactcttaatccatatgtgatacatttttcattactctccactcatgtagacaaaaatatactcgagaataaataggactttagactcatagcaaagcttaggaaatgggtaggtataagtcatttaggctccaaattcccataagcatatgaactcaaaaaatctagaatcaacctgaacaactttcaaaaagaacccaatatgaaacaaaataaagtttgagaaaagaacttagaacttatttacttgatcgaattgtcttttttttt

SEQ ID NO: 379414 - DNA, 4058 bp, Cannabis indica
tttctatatagaattccgtaaaactgtaaaaaaaaattgttttaaaatataaaaatgaaaaaacccctaaataaaattatcttttattggtttagtaggaatactatgaaatcaaaactaagaacttttttatatatataattttctgataatattagaacaatgtacaaatcaatcaaaatacttctcttataaaatctatacttatgtgacaagttacttttactctcactactactaaacaaccacacaatgaaatccatataataatcctctcctcaccttgccttcctcagttcctctacccagcagacgcaagtaatgactttatattcaagaaaacagatcaataaatagccatatgtaatagagaattatctatatatcttcatagcaccaaagtgatctttgattaataaaaatataattatgtgataaataaacaaaacaaaattgggactatccacgtatacaccatttgtgctgatttttcttttctttctttcttcaaaataaatagagcattgagaaaataagcactgttcatccagaaaacaaaattgagtacaacattacaaattggtaatctcctaaatcagttgaaagcatttgggccaaggaaactaaggtgaccctccgtccatccgcttcatcccatctcgtcaaattcaacactggacaagtaaccaagacaaaaacatcagtctctgcacaaaaatacatgactatgtcacataatgtcagtaaatttctgaagcaaaaatattgcagaatagtaaatgctattatcttttaatttcaaaatcaacattttattccctcatgatccacaaaacaaggagcgaagaatttagttttctgttcttcattggttattcactcaacgatgctagaatagtagaataaaatttaaaaatgatggaagttattctgaagtggtttctagagtttgttactctggtttacataccttttaacaatttttgtgttaaaaactagataaggcatgcactttatgagaatcatttagagataatctatggactggtcctgtaatgagcttttgcagaacagcagcatgtgaagaactaacacaatcattaaaaaccaagcggcgagcgttcccagataaagattttgtaatagctgcaatactatcaacatagccgtttctgcaatgggcttctagtccatcgataacctattttaaataaaaataataatagttagttagatgctctcttgctacaatctgatagtgttttgaaataacgataatcaaagtcatacttcaaaggaatctgttaatgtaattatgtcatgattaaaacaaaacggtgtaatttcagatattctacatttccactttaatttacgattatttatgtgtcctttctgtttatttaaaatgctaagcgtacagtgattgagctattttcacataaagggaaaatgataagaaacaagagcaggagccaggaatagtaatataaccacttaaaatatttaaagagctctattctaaaattgaaaaaaagatatataaacgagtcatctaaaaatgttaatatcactgaaatgcattctgaaaatatatttagaaacaaagatgtggttaaagcaattctagtaattgattatgatgtacaagtttcaagcaacactacatgattttattcactacctctttatttcaagcacttcagtaatattagagttaaaacaaaacaagaagagagtacaaaataaatacacagatcattaccagtaaagaaaccccggaaatatcaacagcctttaaagaaataagctccaaaagtctctcgggggttgaaattagaaactcgggttcacaattcttcaaactgtagatgagaaacaagaaataaatttaacaaaaatgtgattgtattacactaaagaataagcatgttaggtcattaatcaagcagatacatacaaaaagatagatacatgaattcatgccaaaatgtccctggaaataatcacaatttttgttacctaactaaatatatgcataggtaaactaacaaaatacaccattcacaaaatttgtgtattaacactaaatttgcaagatcgaccctgacaaacccgtctggaattgcctaaaagaattgaatgctctatagtcaatatgtacctacccttggatctggtgatctaaggaagcaccaggatggatactcactgtatgtatcccgtgaactttcaaaggtttgcacactgatcgcacctgatgagcgatgatcaggaaagaagagaaaaatagttaataaaagaaataacatcacaaattattaaaccaaacatgattatttttcatcacaaagaaacgacagtatctgatacaaaaaagtttgcactgaaactggaataaacttagcaactttgaccaccctatggactttcatataaaggtgataagaacacatttatgaaaccaaaagtgtcccaaactgctgagtgaaagacagaacatatagcacaaaccttcgtggctttctcttgggatggaacaagaaacaagagaaaagggctggcatacgatacaccttcttcctccttcttagaaatggtgtctgcagcactgctaacaatccaagcaattttctctacggtagaagaagttccactagtctctagtacatcttttccagctaaataacatctccaaaactcaattccccaagtactagcaaaaaaaggcttatcctcatcaacaatgtcagtgccatcatgacgcaatgcactttctatttcattcaagcacataatgtgatacttagaaggacaacctgaagatgcctttccttggtgattatgaacactaccatttctattaagtcgagtctttgaatttgtagctttaacttctccatttaaatcattaccagcttccttcttcttcttactaagaattggtttacaagaagcatctttatattcctttgaagaaaccttcttaccggttatgtgagaaatatctttcttgcttccctttctgtctcgatcctttttaccatgcttgtctttggaggagggttcatctaaagtaggaggactgaaacacattccctataatttcatgttagaagatataaaagaagttagcttgatgcttttttcccctttgtcatggaagaattgtttatataacatttttatgcaaataaatactacgtattacgtaatacagtgtaattatgtccttaattcaataaccttacaataacataaaccacactcacaacaggggtaaaagacgcaaatcatatcaaataaatcttaacaataatgcctcatatacagctccttcaggaatttcaacaagcaaccacattttatatgttttatcacccacacccgcacacacacagacacacacacacacatatatatatatatcataaaaaagatatgtagaaatttgctcgtaaaaatatataaaaataatagtcagagaaagagaagaagcaaagaaaataaaggacatgaagtttggtaaaaagtacctggcattgtctgcgttttccggacttgcggcgcttcttagaggcgatgatggcggcgacgcgtgcggaaacggaagaggacgaatccttgcgattcagcttctttcgattggccttgttcttcttcctcctctctatatcttctcctttcaccatggcaatcagagaaagaggtcttggaagttcgagaatgaagtcggcggtttatgtgttcagcagcactactctcttctctagtctttcctttagttagattgtgtagaacgaaccgatggtaacgatgtaaattgagatatttgacaggggtttatcagtcttttcacctttctcatacgagaaaattgggcttattttcgtttgtattccaaagagttcagcccaaaaaacgtagcaaacccaccctcaaatttaaaggcccaatataaaggcctctctatctcgtgatgaaaaaatggaggaaattacactctatactttttttatatggtccttttttattttactctcttttttaaaatctat

SEQ ID NO: 379415 - DNA, 3624 bp, Cannabis indica
taatgttgttaatgtttccctaaaagatgtctgacataggaggctaggacatccctccacctatgctttagatagagttcttaagttgtctaatgtaagcataaaatcaaatgaaatacaatcattttgcgatgcatgccaattaaagtcacgtgccttacctttcaaaatatctactagtcatgcttttgttgtccttaacttaatacatactgatctatggggaccagcatccatagtctgtcaaaaaaactataaatactataaccattttgctgatgagtacacaagatatacatggctatatcatttgaaaaacgaatctaaatctcttgaagctttcacacagtttaaactaatggtggaaaacaagtttaacacaaaaataaaacagttgagaatagactggggtggtgagtaccaatgcttttctcaattagtcgtgaccagtggaattattttttaccattcttgttcttacttctaaacaaaatggcagagctgagcacaagcataggcacattgttgagatggggctaactttgcttgcacaagcgcacatgcctctaaagtactggctgaagctttacagtcagttgtatatctaattaatcggttacctaccccaattctccatggaaaatcacctttttaagctttgtttcacaaagttccagattaaaattttttgaaattatttgtggtggcttgtttttcgtgtcttagaacgtatcaaacacataagcttcagttccatactgttaaatgtgtcaacctttgttgtagcattgtacacaaagggtacaagtgccttagctccattggtcgtatatacttttctggcatgttgttttcaatgaaaagaaatttccctttgctactggttttttgaataattaccagtcacctcagaatctcaccatgacagcacctcacaccttgcttaatcttccactaagtgtcccatcttctacttctactgagcatactcacagtgatgttccaccatctgattcctcacattttactgctgaactacctactaattcagatcatggatgtcctcttactgtagcatctcctctccaacctgcctccaacacaacttcaaattcgagtactagttcagcctcagctgccctaactgaattttgtcaaatacatctattgtgccacatgatctcacatccgtggctaactctactactactggcatcactccaaagacaacttctcagcctattcatcctatgactactcgtgctaagactaggatttttaaacttcaacttttccttggtacagcttttggtgtccctatatactgtgaacgagactctgctgctagtgcgcttcatgaggggtggaataatgcgatgtctgctgagtttgcagctttacaaaagaatggtacctggattctagtgcgttttactcctgatatgaatgttgtaggctgtaaatgggtgtttaaagtgaattcaatagagattgtagctttcaatgacttaaagctcgactcgtggcaaaggggtttcaccaaaggccaggggtagactttggtgaaacttttagtcccgttattaaagcttcaacggtttggattgttctcacaatggctgtagcaaatgattgggatgttagacagttggatatcaataatttctttctaaatggcacccttgaggaagatgtatacaaggtaagacctcaaggttttgaagaccatgacaagccccaacatgtctgcaaacttctcaaattgatctatgacctgaagcaagcacctcgagcatggtatgatcggttgagaaacactcttataagctggaatttttaaaactccaatgcagacacttgttttttcacgctgaaacacactagttatgttataatggtcctaatatatgtggatgatattgtggtcatgggtaacaattcaaaggagttggagatttttattgcaagactcaacaacgtcttttccctaacggatctaggatccctacactatttcttgggaatagaagttttcagagacacaatatggatatacttatcacaaggcaaatacattcaggagttgctaaaaaggtttaacatggaaagtgttaaaccaggtcctaccccgatgacagcagggaagacactatccttaaatgatggtcaaccactgtacaatgctactgaatacagaagtctgataggtgcactccaatatatgagtcatacactgcatgatatttcttctgtcgtgaccaaaatcagtcagtttcttaaaggtcctaccacagtacattggagtgcagctaagacgattttgagatatctcaaatatataatgcatcatggaattcatgtagctcctagtgatcgccttgttctaattggtttttgtgatgcgaatttggcatcatgtctagatgattgacgatctgtagctggctattgcctatttcatggggagacactaatatcttggtcatcaaagaaataaattgttgtttcttagtccagtaccaaatcagagtaccgtgcacttgttcaactgacaattgagattacttgggttcaaggcttattgtaggaaatgaaaattagaataccagttgctcttatcatatggtgtgataacatgagtgcaagtgcgttagcttctaatcctgtgcttcatgctcgaacaaaacacatcgagctagatgtctattttattcgagataaggttttaaagaaggacatcaaaatttgatatgtcccaacacatgatcagacagccaactatctaaccaagtctctgtctcacacaagatttcaattcttagttgacaaactcagagtgatgccctcacccattcgtttgaggggtggtgtgaaaataattgaataacagaattctctggcgggcttcttcagcctctgcccggcccagattactcccaagggcattaagtatttgtccgctctcttcgtcctctatgcttcccagggatgggatgctccttctcccccacgaggtcacttggttcttcgacctgaagtctacccccaagcaaggcaggtcggggtatttttacttctctcagccaggcttcaagtggttgagcgggacagaccacatggccatcaacaaaatagggcgtgttgttgatgagtacttcatggtgaaggatccgaacatcacccggactcggtttcagcagatcccgacatatcaccgttctcccctcactcttgctcttagggatagagctcaaaaacttgcccggttgccggcggaagacagggatatcatccagctgaccttcgacagaacagtacgggctttacccagaggatttttctcctagatccgttgtggggaggaaggggaaatctgatgctgcccggctcaaacgagctaataaggaggatgagctcattcaacttaagcgtgaagctaagttgaagggaggtgcccgggcaaagcagtatgctcaggagctcatgaatcctgaagatgaagccgaggctgaggctgaggctgagcaggtgaccccattgaagaggaagaagaaactcccggccacgcccaggcccgttgaacatgccattcgcataagggagtaccaaaattaattatttaaa

SEQ ID NO: 379416 - DNA, 5947 bp, Cannabis indica
cgttccaaacgagcccttaatctattatattataattgaatggaatgtttacaattcagcatttttaaagtaaaagtaatttgtggtataaatatttaagttttaatttttagttgtaattaaatatctaagtttattttttagaagtaataatacttaacttatatttttggaactccgtaagttcccgacaatttaatatcaaatcattatctatttgtcttattggtatatttaaattatttttttaaaataataaaaatttaatgacttaaaataattaaagattatcacgcaacaatttacttaacacttatatatttatgcggtaaattattcttcaaatactttaaaattactcatctcatgaaagaatatagtaataacttttagagatttttttcttacaaaaaaatcttataccaccaaacaaaaagaaaaggtgaaaaattaccattcccataaaaatattactacaattcttctagttataattaaccttaacacgtattaagtaaacttaatcctaattatcaatttacattaacggtttctttcatctttacataatcttaacggctacttattctttatataattacaataataatcacaatttcattttctttatttctaatttccatttatataaatcttcaacctttcttccttcttattattcttttcgttgaccagaaatgttgaccaaccgagttacaatcacagccttcattctgactcagttcatctcaatttccttctcttctgacattacagctttactgagtttcaaagcctcatcagaccgttccaactcgctctcttcctgggttaactcgtccgacccttgctccgaccactggcttggagtcacctgcgattccaactcaggacgagtcacaagactcgttcttgaaaatcttcaactcattgggtcaactcggtcactcggtgaactcaccgagctaagactcttgagccttaaacagaatcttctcacttcttctaatctcaatctctcttcatggccgaatctcaaacatctttacctttcccacaaccgtttcgccggtaaattccccgccggaatatcaaccctccgtcgtctccgccgtatcgacttatcccacaacgagttcaggggaaaaattccgtttaacgagttaaatcggttgactcacttgttaactctccgactcgagtttaactcgttcgactcagaactcgccgccgctgccggcgccggagacacccactctttcccttccaccgtttccgacttcaacgtttcgaacaacaatctctccggggaaatacccatttggctatcgcattttccggcatcgtctttcgccggaaacagccttctctgcggccaccctttgtcgtcacaatgtccaaagaatgatccaacggcgcaaaaccaatctcacattctactaattacgatcataaccgttgcttcggtggcaatcttgggcgttatagcatttgtcttaattaacacgtggcgtaaaaagagagtcacgtgccaatcacgtgagcactcttacaatggcggcggcggcagtagtggcggtccggtgttggtgacgtttgaagggtgtagtaagggaattgggggagtggaagatttgttgagagcttcggcggttatgttgggaaaaggaagtgtggggaccacttatagagtggcggtggatggtggagatagggcggccgaagtggtggtgaagagggttagaaagggttgttgtggcggtggcagtggcagtggcggtggcgggaaagaagtggattggtggttgagacaagtgttgggaaatttgaggcactctaatattgttagcctaagagcttattgctattcaaatagtgaagatttgcttcttttagtttatgattttcttcctaatgggacacttcattctcttcttcatggttagtttactactttaccctccttatatatacattaatattatatttttatttattaataggatggaattttcaaagtttggagaagaaaaaatataaaaatatataacacgtgatgtgtggtatagtggtagtgatgcttttataacgagtattttttttttatgaaaatattcaagtaagaccggtgctgagattgggtgggccttaaaaaataaaaattgttgggtcttttatttaaaatttatatagtaattttgaaaattactgaaaaaatatgtatatttttaaagaaaaaatatttttttagactctaggctgagtgtgggttgggttttaggcgtggccctactccgtcttaatccaagtctgaccctgtatgcgagttacttcttttgatgtactcaaaattatttaaaatcgaaggtgtgagaaacactagtaatctcatttatgttaagaaaagaaaaacatattaaggtaaatttatatattattttgttacaatttcctactaatcaacaatttatgtaacaaagttcaattttgatacaaaatattattacaggcaatagaggaccaggaagaaccccattaggttggtcaacaaggctaaaaatagcctccgattcatcgaaagccattgctttccttcacaacaataacaacaaatatgccgacatcaacctctttcacggtcacataacatccacaaacatcatactcgatcgctcaagcaatgcttgcatcaccgacgtctgtctccaccaacttctacgcctccaaccaccccataacgcctacgccgcacccgagctcaccactactactagccctagtaaatacactcaaaagtgcgatgtttatagctttggagttgttctaatcgagattctgagtgggaaaatagtcgaaaaagaagaggatgaagaagaggacgaagaagaaaatattgttatgattattaagaagattaatgatatgaattttatggaagttttggactatgaattgtttgtgtttaaagatgttatggaggaagaaatcattggtcttatggagattgctaggctttgtttggctcctttgcctaaagatcgtcctgacatgaatgttgtgtatagaatgattgaagatataaggaaaaagagagttgataaaaatactagtagagaccatgaaacgacatctataatggatgaacttatactcaaaacgacatgaattgttgggtgttaaatagtacaattcttatataatataaagggatttttttaaagagaacatttactgaataaaaatttatactttttctgagtttgtactggttttgcagagatattattattaccttaataattttgaaattattgaatgatttttttaatgtgaaatgattgtgcttgttataagaaaacaaaagacaagtgaaacatttatttatttttcattcaaagaaaagaaaagaaaatctatgtttggtttttaagaaatgagaaacattaaaatatatattatatgactaaaacacaaattcaacatctattattaaatcatagaaaaaaatctacaatatctcaaaatctcaattgagacataccaaattcttgaaaaagtaaattaaaattcaaacaaactggaaagtacattactttacatgaaaaagtagttgaaatcttctcaaaaaccaaaatatctataataataataagaatttacatctctcaaaaacagttctttgaacatcatataggttcaaaaacacagagaaatgaacacactatccatgagtattgacagcttcccaaaccaagttcttcggaacaggattagtaagatcgcgagcctgcaaagccgcggtcttaagagtattcactgtcattacattagcttcccaaaacgaagcacaattgtaaggcaaattatgcttcttacacagttcataaacaaagggagaaattttcctcagttgtgatttgggcaatcttggaaacaaatggtgttcaatctgaaactgcaaaccgccatgaaaccaatccatccaagaaggacaaaggatattaagtgtcccttttgtttgcttctcaaaccaatcataactacttggcaaaccaacataaacattagctgagaaatggttcaaacaaaattgaacatgttggataccagttactgaaaaacttgccatgacaaacataaccctttcactccaatttggtaaatatgaaaccaaaagtggataccaaatccaaaacacaagtaacccaagaatctcttgacctctattatgaacttttctcttagataataacaaagcaaatgattgagcgaagagattaagcctagctaaacacatgacagggtaaaatgtccaatgttggtaactaactaaggatcttgtgattgaatcaaaactcaattttctgccatagaaatgtgacgtgagtgaatcaaagaattttgatgatacaacaaagaatggcatgtgttgaagatcaggatcaaattcaagactattacaagctaaatgatgagcattgtgattccatttccaccaagcaatactaatcccagctaaacaattcccagttaagatctgaacaaatctgttataaaattgattagtcatgatttgataatgacctgaatcatgacctaaccaaccactttgaatccataaaaaccctaataaacatccagaacagaaatgaaccaaaatactatcagaacacagaacaccataaacactgagtataaaaaacaatgtaatgaagaagaatgagaagcaaaccccatgtcctttcttctcaaacaaacccattttggtaaattcattgacgagttttctgtaatcctttgaaacctcggtaaaggagtgatctttgagatgaaacccagtaaagaattggtccatgtattgccatgccgaccttggatggtaagctatgaaagcttctgtcacgtcttgaccggcgagatttagtaatgggtgttcgccgccgggatggtctttggcccaatctgagacgttgtagattttgccttggattgagatccatagatctccatgtttgttgtgttgtttaagctcttcttgggtaatgtattttgttgaatccgccattgatgaatgataataatgtctctgagtttgagctttgatgaagaagatgatgatatatatacatatatttatatgaagttatgaaccgaagaagcgccacaaaattggttttttttaagatattatttggtttttcaaaacgacattaattgttaacacagttttattgtcgttttttcagtattgtgaagggaagggtagtttagtaattatgtgtaatataattggtgctagtggttcacacaacacgtgtattctttgtttttgttcacaaaattggcgtttttttaagatattattatggttcttaaaacgacattaattgtgaaagtagttttgttgtcgttttccagttttgtgaaggaaaagggtactttggtaatttcgtgtgatttcagcttttgtttctcttgtagcaaaacaaacttggtttttttgaagatattttcgtttttgaaacgacattaattgtgaacacagttctgcgtcgttttccatttttttgttttgattttgcccgcaggtgatggaaagggtaatttggtaattttgtgtactataattggtgtaagtgatttgactactcacacgtgtaaactttgttcctcatgcagcaaaacaaacttgtaattgtgaacacagttttattgtcgtttttttcagttttgggatagatttttgtttttttttgcctttgctagcatgtgatggaaagggtagtttggtagttttaagtaataatataagggaaatttgatcttttatgcttcaaaataacacatggtgttattttgacccaaaaaattacacattgtgtaaatatgcctattttgtcatgggaaccccaaaatgcctccccatctaacagcctccccttctctc

SEQ ID NO: 379417 - DNA, 1280 bp, Cannabis indica
catcatcatcatcatcaatcatgatctccattagctaccaccacaaaaacccaaacaaaacagaaaatctcaaccattgatcacaatgatcataaccaagaacacatctttaaatcaaaattaccagaaatacccatactcaaacaacatcccactccactcctacatcttccaaaacctccggaaaaaatcaaaccggccatgtctaatcaccggaacaaccacccaaacaacctactcctattcccaaactcaccacattgccaaaaaaatagccaaaggtttaactaaactaaacataaacaagaatgacgtcatcatgattctcctccccaactgcccagaattcatcttctctttcttcggagcttccatgatcggagcagccataaccaccgcaaacccattttacacatcgccggagattttcaaacaacttcaaatctccaaagcacagcttgtaataacccaaacccaattcgtatcaaagctcattgacttcccagaaaaagtcatcggccgagatttcaccgtcgtcaccgtcgacggagacgaaaacccttcgccggaaaattgcttacctttctctattctcaccggagaagacgaaacagaagaaatctctatcgacccaaatgacccaattgcgattccattctcctccggcacgacggggcttccaaaaggggtggtgctaacccacaagaatttaataacaagcgtagctcaacaagtcgacggcgataatcccaacatgtatttgagatcagacgatgttgtgctctgtgttcttcctctgtttcacatttattcactcaacagtgttttgctctgtgctttgagagttggagcttcggttttgctcgtgccgaaattcgagatcggaactttacttgagttgattcagaagcaccgtgtgacggttgctccggtggttcctccgttggttttgggtttggctaagaatccagtggtgagtgagtttgatttgagctcgattaggatggttctttccggagcggcgccgttgggtatggagcttgaagatgctctccggcgacgagttcctcaggcggttattggacaggtttggacattgctattatttgaatttatttaaaaatagagtaatagataaataataattcggaaacttacaaaaatactgtaattttgattaacttttacaaaaatactgtcacacggaaatctttttaaaaatactgtgtttttataaaacaccagcaaaacacaaagcagaataactcaaaacaccagta

SEQ ID NO: 379418 - DNA, 4835 bp, Cannabis indica
agagagagagagaggcaaaaactttaaccaagtgggtggaacaaatttgggtaatggaatgaaaatacagcacaaatggcctaacctgaattagatgagatgaagtgatatacaaagggtacatgtgaaatcaatccctctcttagagaaaaatagaaaacagaagaagaaaaatatgaatgatcacacacacctttctctacctaactcttcaaaactcatgttgcaactaaatattaaagactaagcataagagaagaagaaaaaatactcaaaggttaagaaaaaaaagtgaataaatcatcgcgcttaactcgccaatacaaatgcaatcgaaaccactactacaagaagaaaattgataacaaagaagaagattgtcagctctaaatagacagtttctttttttcagttattgagtcctcactctcacctctattatgcttaaaagaatctttgctcttgttatttttccaaagctacaagctttctcttatattgtctgtagttgggaaaaggagatgcggataattgacccgccaagcgagctagcatgcttggtgacgagagcctcagttgccagctcctcactttcgaacattaccagagcctgtttcttaccgttcatctcaaagagctttgtgttgacgatgggactgtgttcctctaggtggttcacaatctcttcctcggtgacatcctgggggagagaggatagatggataatctttgttggggagcagcagtagcggtagttcttggctgcgttgcggttaaagcggttgagattagagttcatgtactcgtgggtgtcggcaccctgtgttatgtttggatgctttgagaagttgacttccaaacgctttccgaacagcattgcaccctgatattataggattacaaagccatcagtaccaaagaaaagagaaagctcccgttacacaatttttgactaaatccatggaatcgaatcataagttgtataacatatgacaattttaaggaaagcaaaccttcaagaaatgcactgccagttctgcctggaagccatcacccatctgaacgagggcatgatctggtttgttgcggagaagtttgatccttacaatgtttccgtagatggagaacaggttaaaaagcttatcctcgtctattctctgaaatggaaaccttgttatgtaagaaaaccagaaacaccaactctcgaaaatagaagtaacaaacgaatgacttacatcgggatttaggttggagacaagaactgtacacctgtcatttgtcccgcttatacctggaggcaaacctccaccaaaagcggcagcaattgcagccgcgtttgccatctaaattttaagaaaatgaaccagaggtaagttttcaattactagaaaagacagagttagacatacaacgacaattggggaaaatcccaaggccgaccatccaaatggaaatgtccaagtttccatcttagctcaataaatcatctatggagcattaatgaagcaaagaaaagaacagaaaagaaagaataagcataagcttgaggaatgttgcaccaatcgcgtaacatcactactggaaaagggatttcgaggagcttgaatatacatatatttctcaaaagtgcacacataagataacctccatcttgaaacaattcaagtcctacacacaatttaaaatagccagcaaaaccaacctgcggaaatggaactgaaacaaaggaacaaaaaaagttcatcagcaaatgacatttagagcaccgagtgcaaaaaacaaacaaagaacagaaaccatattaaacccaaaacaaaaacaaattcaatacctccccttgttccagaaggttgcatgccatacatgcctcctgcatcaccatacccaggctgtaacacaagaaacagaaaaggtttacagtttgcttaaactatacatagttcgatgtatgaatatggaggggagtgggacagaggagaataagaagacaatggaatatacttgtgagggtcttcctttctgttctgaaggaagattagggttcgtaaaatccctagacaaagaaaaaaaacagaagttaattttagtagccgaaataaaggtcattactgcagtttaatattaagttcatgacagcaactcaccttgaacgctcattattgtaattcacttgtaactcgtcaaggctggaatataaatacaagactcgtgaattcgattacataatatcatgaaacaataatggaaacaactatcatccacaaacaaacaattgtgaattataatgaaaactataaaaggttaagaagcctacttggagaactgaatatcgagttggcaacaaccatcataaatattgcgtccctatagagtgcaaaaatattaaaacttgttttaagtaactaagaacaacagtttaaaacaatccaagttaaagaatacctgcagcgtggtcctagctgctacagcactttggcgtgattgatactgaatgagggcctgaaaacctacatagtcgcacagaagatggaaaatgtataacaaaccaattaagagaaccacaaagaaattacgttagataaaagcgtggacttttcccaaaagtgcaattgcaacgtcacactcccacttgtgtatatataataatgtgaacctcttgaatttcagaagttgtttagaaggactacaaagcaggaaaacaaaagtgcgtcgataaacataactttttttttctttccaaaatgcatgcacaaatgtttgagtttaaccaaaaaagcagagaagagaaagagatagagggagaaaactccaagaagctgaccagctgacttctgaaatgtgacaatcttctccacaaatccgtgggggaaaaacacttgatgcagcacttccaccgttataggatatagcatgtgatgaattgtaactaagaggattcggtttggctaagcatccacacagccacaaacagcagaccaacacagagaaagagggaagaagagaataaataggaagtacagaaataggaaggaagcaattaaataatatacttatgcatatataagaaaagaaaaaagaaagttatcgcgagaaacagaaagaagtttggaaaaactaggttggtgatttcacactattgcttttattgctaatcttatattgcaaacaattattattatctaaccatgttacacaacataacactataatacaacatattatatgcctacaaaacaaagtgccaacctcatctcctcgtccttgagcgttttgatccattgttgtcaattctggatgggatgagaattggacataaacatttctccccctataataaacaaagaccagctaaatacacatgataaatttcaaacatataaatataaaataaaagagagaaaaaagaagaaaagggatgttaacatcggccatgagccatcaccacacagtgttctacaacaaagtttcataccttatggctggttgaacatttgcatagtattggagcgcattaaccgcagaagcaacatcttgcatttggataagagccttttgcacatagaagattttccatagcatatcagatccaaacttaaggtaaaagctaagtaaaacacatttatagaacatttgaatgacaggaagtacctgatttttcgcccgaagcatcacaagcttagttataaccccaaatggctgaaataactgaagcaaatcattctgccacagaatatgtcgaatgcataagaaaatataaaataaaagatgacagagtacctagattaaaacaagtaacctgcaatgttaaatgaattacaaaatgtgatcctcctcctaggaaataggtaacttattttggatattttggaagtcaatacttaaaatttatgacaatatcaatcagccttcaaatcttaatctaacattctttaatacatagggaagaaaaaaaaatgattgaaaagtaaatcaagagaaggataagattaaatttatgcataattgaccacaaagaaagatagctcaaatgttcaagcctatggttttctcctgttcctcaaaaattatagaattaggccaaaacatatcaataattgtttgaaagcagaatacaaactgattaacaatgtcactattcaacttaattcccattatttctttcttatatagcttgaattcattcacaacataaattctgattaaaaacaaagagagaagaacatacttctgatatttcatgcccaacattcctgacgtggatgactttggaaggttctgccattgttaagcaagctgtaacaccaacattaactatgtttaaaacattttcacttaggattataagaaaatcagtacactttctcaattcaaacgtcatatacttacacccacacacacccaaaaaactaacaaattggttttaattgcaactgtataaattgaacataatcaaaacagttttgatgcaaagccattaagaaaaaacctcatcaaaaaacccaccaagaaacagaggacaaaaataaatcataaccaaaatttccaaagggaatttctcttccatcagaacaaaagaaaaaaaaaaaccccctttttttaacggacactaaactaattaccaattaccatcaaataaagcatcaacaacacaaaaccctaaaaccccatttcgattttacgagaaatcaaaaacagggtaacaacccagatggagaaatgaattcccacacaagagggaaggggttaatttttgtttttgttttttttttgttaagctaattcttggcttcaacagcattcatcgaaaggagaaagaagatcaataatgagagaga

SEQ ID NO: 379419 - DNA, 1948 bp, Cannabis indica
agtccatgaactccaatcatcttggtcaaaagggtcttcaatggacacaatggggaaatctttaacaaacttcttgtagagatctcctaggctctgagcagaaagtacatgagctccatcatttggttgtttcttaaagttaagatcatacttgccatctttcgtgagaaactctgaagctgcaacgtccattcctattttgatctgtagcattgtttgttttgagtccacatacagataaaagtataaactaataaccatatagagcaatgaattaaaccaatgagtcctaccttgccagtgtaaccagccttttcaattgcgtcaatcagtaaaacaagtccctccctattatcctggacatttggtgcaaaacccccttcatctcccacattgcaagcatcttgtccatatttcgttttgataatgcccttcaaaatatgatacactgtttcaacaagaaaaaaagcagagtacgttacaacattataacagaacaactaacaatatttgattaacaaaaataacttaaccaaccttcactgcccatacgaagtgcctcagaaaatgagcttgcacctacaggcaatatcatgaactcctgcatagccagattgttccccgcatggctaccaccattgataacattaaaagctggaacggcataacaagctccttcgttccggaaatttcctgaatgtgcctgtacaagggtattccctttgctcccgcacccgctctacacacgctcagagacactcccaatattgcattagccccaagtttcgacttgttcggagtcccatcaatatccagcataatcgcatccacatcagcttgatttcttaaatgccagaaatggagaaacaatcataattagaataaagaacatccacttatcaacaaacttcaagaacttaataattatcatcaaggtcaacaaatatataaatgaaagacgatggataacgtaaagggcacagatcattgatagatttgtgaaagaaaaaaatatcattataatattttgatgagttttaagttacatcgtttcttactgcctacaacactaagaaaaaacaaatgagtattggaaatattaacgaaacgaacctgacatcaacgccaataagcttgggagcgataatctcgttgatattctgaacagctttaagcacacctttacctccataaacgcttttatccccatctctgagctccagagcctcatagatcccagtagaggcgccactaggcacagccgatcggtagagattatcagtgatcagatcaacttcaacggtcggattccctctactatcaatgatctgacgggccttgacagacttcacagcgtgctccttagtaaccttggcagtcgccgacggcgcagcggtgacggagcatcgtacggaatgggaaggacggggagattggaaagaagggatggaagtgaccaaatggggtttggagaaaagtttggtagaaaggaatggtttttggagaagaatgttgttagtggagggatgagaagccatagccatgcttctctaagttggtaatatgatggttttgttgatttgaaagagaaataaaaggaaatggtgtttgatattaaaagggagggaaagtgtgggaaagtccgccaaggaggcgatgaaagcaagcagtgcagtgtgtatattagaagagagattaggtggcgttattagggtgggttggtgaggcttacagagagagccgtcttttgaacctttggacaagcgaagactgggaaaggtggctgcgttaggtgagtgagtctgttagtgcatggttttttattatctatttattatttttctttttatgtttttgtttcttttgtattattttcgtgtaggccactacaattgcctaagttacacatttcactatctaataatccaataataacaataataataat

SEQ ID NO: 379420 - DNA, 2143 bp, Cannabis indica
gaaaataaaataagttaaataactgctcaaaaactgattataatttaattaataataataattaagaatcgatactaaccacctcttcaacaaataaaaataaaattgaaacaataattaaaaaatagtatatataactatcatcaatttttaacggagttgataggagtaaaactcagaaaataacaaaataaaaaaattgcagaaaagtccaaatttgaggaacggaactaatcagcaaaaggaagataaaattaagggtttcaatatgaatcgaataacaaaacgaaagggtatttcatcgagtaccaccgacgaaaacaagggttagatgattattttgtaaaaataaaaattataatttgatgaattcccacaaaaccataaaatcaaaagtgaagaaaaaatgacataaacgaaaaattctttttttcaaaatcgtatatatagaaaaaataaataaataaagatatattactgcacgttttaaaaggtaaaaaaataacatataaatacaattatttaaaaggaaattaccctacgtacttgtttttttttaactttttgtcatattaatatttattcatgaaaagttaagcctaggtaaatgtataatcataatagcaataataatatattttatttaattatatgcatatatatcattatttatgatagatttgagattattctaatgttaaaactagtagacactcacaaaaagattattccaatgtttaatagggtgattgttatctttttttcaaaaaatttatcacttaggtaagtgaatacttaaccctaattaagaataataatgacaactatagataagatatagcgatgactacaagtgagatacgctgatgacaatagttttaaaatcgtatgataaattttctatagatttattaattattattttgtcagatctctctttttcttttcgagaattgttcaattaaaaatattttcttcattataatgtttgtataaagtgagtaattaattcaatattgtttaattaatttattttatgtataacaaatttaatgaggataatagtgagtactacaagtgaaatacaatgatgtgactataagggagatacaatgataatttttataaatttatttattattttttaaatttttgtataacgctctatgccatatatgatttataaaaaataaaagttaaagattaaataagttaattaaatatatctacaacatactgttatttgaatttaaatttgattaaaatacaaccctatttttatttttattattaactaatggatttttttggtgcattttcttttaaaaaaatatcaaatttaatataattttattttgtaattatcactaaacaaaatacattaaccgcacgcgaagcgcggttaattttctagtatatataaaggaaaaatataaagtggtgacgtgtcactctaaaatcatttcaaatacttatatttgttctctcctttatttttttacttttttaattttctattaaataaattaattaatatgatcggtgggatagcaattataataattaaacaaaaaaaatattcaaaaaaaaatcagatgaaaaatcatttatcataagtgtaactacttcatttatttttttatgttatttaatctatttattctaaaaaattaataacttatttaaatgttttatacccaaccttaatctattcgttctttttatttttctactcatatatattctcatatgatattctctcttataattcaatctctctatattgttatattctttatcattatggagaagaccatgtaaatagtatcgtgtgattacataatcttaatatatttttgtaacgccatgatacttaggcgctctacaataatttactaattattgtgtcattaattttgttaattaaacgggttttcttaaaaatcgtgcccaattaattttttagataaaactttaaattttataaatatatatacatacaaccgggatcttgtatttaaacttttacaattacttttaaaataatttattactaaaatatcgcacaacgaagacaaaatacatctcaagttatcccgagaccaaaaactccaggtcgcaccatctcgacatgtacaatcat

SEQ ID NO: 379421 - DNA, 2612 bp, Cannabis indica
agagagagagagaaaaccaaaattcccattcttaatactggtgaatgtctgatccttttgacaccattctcaactaccttcttcaaacgagtcgttggatattcaagcaggtgtggacaggattcttgcttgggcataaaatttttaggccattcaccaccgcacttttccaacccgacactcttattcttcaagtaatttttccctattttcgaactatttgatttctctaatttttggaactgcatgctcaagttttgaataggaatgattaagtgcatgcaagtatgaggtttgaatacatagtgtctgggctttttaaaagtttcagacatgttaggattaaaatcttgggattttagttcgtgattctttttttgcattggtcgagtttgaactgtgtttgaatagaaccaaccttaaatttttctgcttggagctcttatggctttagatgaaatttctgtattttttttcgttttattctttgagttttggatttgattcgtccggaagtattgttatgtgaaggctttgctttctgatgaccagtacaaagggggcctctccaagaagctttaggagaggaatttcccgtactcttcctatttttttttggtgtgggtattaattgcttggattttttttgttttgtttttagtcacaaacatcatgccggaggagtttgaccttgaagcaatagctctggttgaagggcaagtagaacttgtgaaattggcggaggagtaagcttcagccccattagtggtttatgattcttccatatgttaaatggacccaataagtttagaagctacgatatgttgtagagatatgctgataattgtggagttagcaaagttttgggtctttgctgacatagacttttcctcttaggggaatcgctagctaagtgcattggaggctttgaggcgtggagttaggtgcacatcctctatagagctaaccttccactaggaagttacttcacgaacttctgcggggctgtggggattgtgccttttcaacttatcccgtaatcttacaagcttttgaccagatggtatattctctataagatccgatagataaaagttccaggcccaaaagagatactatatttttatacaattaaatcgcagcccatgcggaacaacaagtccaaaattaggttctacaggttggagaagcactctacaataacttgtccttctagcaacaccaagtatgttgcaaacttcaggactactggttcttcacaacaggtttcccgttaaagaggcttccaactctatcccttgatttctccactccaggtattcatttttaatcctttctttctttttaattttttttgtttgttgtgttcactttcctaacgaaagatgttccacccttgcagctaatgttagactgacacccctatctaactttttggtgaccagggaggcggattatcgaaagattttacctgacgtactacaagtggaggatttagtcaccatgtggactctccagaagtatattgagacataaccgtgagagctatcgtaatttgcctacggttaaagaggaaatagatgcgatgggtgatgcgggaggccattaagctagataaaaaatggttggccaactaggagcagatctattcgaatccaatttgtaatatcttggaaacctaattatgaataggattattatatattatgggttaattagagagtaacgagcaggattatgatcttagtaatttaattcagtgtaaattatgaattgtgctataagtgaataaataagcataatttattatgaagatttatttggaatatctagatatacctggaaaaatacatttcagagcaagaagtcgaaatgaacgtctaagagaggatacactagatttttaaaattagaaatcttataaacacaagagtgcgccatcaaaatttaaagatgaaatcatggaatcaacaaaccattaattgaaaaatgagcggttcccaacactccactgtcaaatcacatagaccgtcattacacggaaatctcatatattttaaattaaaccagacaacaactgacacaaaactatacaaaaatgatgacaaaatcaaccctactatttggatcaggacctaaatatgcataagtataaattgaactggggaatagtatttgggagaaaaagtgagaaaattaaaataaataaatacagtttgaaaatgataaggcccaataggccgaacaaaattaaagtccaaaaagacataaagataataggaaatataataataaaactgagaaaagtctacacaccaataaaaacaaacaagattttcttgctgagataggcctaagacgacatcatactgagatgggcctaaggtggcattataccgagataggcctaagacagttcatgtcgagataagccaaggaaatttctattcgaggtaggccaagagtagcttcttgacgggataggcctaggacggtctcgagaagagacaggccgagcacggttctacaccaagattggccaagaacggcttcatgctgaggtaggccaaggactgtaacaccctaactaccttaggcgtattacgtgattt

SEQ ID NO: 379422 - DNA, 3046 bp, Cannabis indica
taccataccaccatcgaaatgagtagtcttaacaaacaatgcaacatcaacattgacattgatttgattctcttctggcttcatccaaactctagcaccatcttatgcctcaccacttgccagtggtgtataattatccgtactttgagcatttgtccattgttcaagatacgaatttactgaagtaaccacattattcatgctaggaattttctaattctaaacaaactcattccgagctctccaaatagcacaacaaacctccgtgacctcactttgattctccttccctacttgagcgaaccagctagaaaatttatcaaccgcagcagttggcgaaccaaccctaatagtaacactgaccaagtattgagctgcaaacgggcaaagcactaggatatggaaaattatctcatttgagtgcaaaaaagaagataatgtctttgagctggtacatgttttaggctaagttgatacattgtagggagataccaagtacatgcgcgccaaagaatacctttggaggaattttaaattgtcacaagttttgccagaactcgtcagagcattatcccaatgccccttaaaatatttctacaattgataagcactcttaactgtataaaacatgaagcctccttattccaataaaagcaattatccatgaccacctcactcaattgaatactccaaatatgctctgtcataccctaatttcagctaataatcagaagctgacacgtgtaccagagagggaatatgaatcagcttaagaaacgcattattaaatatacattaaataactcgcctcaagaattacggttgatagaaatatacaaactcgctaccacataggcagaagcgagacaagaataataactattaacgagtaagattggcgagacaacaagtccatctcgggatgaacggaatatataataaaagttgttcaagacgagtaaacaaagagcttgcaactcattgactcacatactcgtgaataagagcttgcaactcagtgacccacatactcatgagtaaagagcttgcagttaattgacccacatactcgtgagtatgtttaaagaataacaacaacattcgtccatctcgatctttatacattgaaataaccacctcgctaataccttccaaaatggcaaaagagaattgcgagaagcgttgtacctttatacttagcatttttcctacaaaaacgaaaaaaaatatgatgtgtacttagcgagagtcacccaatatagtcagcataaccatctatagataaagacaaaagggcagttgaacggttattcacgattatcccatatgcacaataatgaaacgtggagaatgcccacgtttcatgaacgattatgaatgaatagatccccaaggaaataactgtcaccctacacaactatatatagagacaaatcccagggtaaaaggggacaaaaaaatctagagagaaaaaagtaagatataattatccctaatactattatattctgtattccaaatacttttcttaataagatggactcgtggactatgaagaattaacttcaaacctacgttaaaaactttctgttgcttatttagtgatataaagacatcgcgatcctaatcttcgcgggcgattaaaccaaaggcagcctgacctacgtgagcatttaaatcgttggatccaatacaattgcgggtaatacaattagaagataagttcaggaagtacctaagatggagaatatgagaaactaccgggatatgactcagacaaagagacagaaccattccatcctgatattttgaatttgaaatttcctcaaggatttaaaaaccctcatgtctcacaacatgatagtgcaactaatcctgttgcccacctaaataacttcaataccataatgcgagcaagtaatgtttcaaacaacatgcgatgcatattatttccaacttcattaacaggagctgcaagtagttggtttgacaaattcaccaatcattccataacttcctgggaacaattgtcagaagatttcaaaaagcaattccaagctgcaagagatcggcgactagaagcatctttcttaaccaatgccaagcaacaactaggagaatctcttaagatgtacttaagtcgtttcagtacagctgtagccaaagtcgagaatttgaatgacaacattcaattaacagcccttcaagcgggaatcacaactgacttgtcaactgtagggggagaattatgggatgatttgcaaggtcgccctgttaggaacatcaacgagttcaatgaaagagcacaaatttttgagaggaaagaagaggcgcaaaatgaaattaagctgttaaaatccaactcgggagataaactcagcacaagtagcacaacagcgagtaacgtggccattaaggtagaaaatccaaatcatattgactcgaatacgaaaaggaaggatgagtcgagagactcatccaatgacaaaaagaaacaaaagaagcatgaaaagtatgtttctatttactcaatatacatattgagttgaatgagactcacgaaaatatctacctcaccacaaaaattagattgcattttgcagaccatatccaatgagatatgcaagaaataagcaaggtcctaactaatattgtcgtttcctaatgagaaaaacttaattagcagttgaaacattctatagacaaacttttatttggataatagctagatacattaggagtgtacactaagttcttattttcataaaaagaaatgcttcattaacaataattattttagacaaattactaatgcgacaattgctagatacattatgtcaaggaaatatacacttagttggttcttatttttctggcaagaaagacttcataaaagaatcattctacaatcaaattattaatgtggacatatataagtatatatgttagagagtctcacattgataatgtgttgaaattaaatatcatatataagatgcatgagctactcctctcattgctaattggtttggagatggaacctcgt

SEQ ID NO: 379423 - DNA, 2051 bp, Cannabis indica
ctgttctgcttcaaatttttcttattttggaacttctgtcattagtctcattaaatttcctacacccttcccctttgttcatttaaaaagtctgtcttttgtggggcttgctattcaggatcctatgaggggtggtaatgatcaaatgtttgaagatttactagccatcatccatgctgatgactcagctgcccaggcaaaagatgcagcagctcctctaagaagacgacttgtacctgagttcatgttgaaattagctcgcagtgtcagtccattctaatcattctttaattcattctctgaaagctcataactttagcttcagtttactcattctgtatatatcagtggcaatagctattctcttcaattttgtgtcacctcttctcttctattctcaaaaaaagaaaaaagaaaagctcttatgctcttcttaatcttttcctcagtataaccacacttgtatggacaagaaagaaaaagaaaatggtttcaggattatacttgagcccagattatcaaatcttatttttatttcatcagcataacatacacagagttgcactgatcaccaggaaagttcaagacagaaaataaaaacacacaagttaaagaaacataaatacatatcggtctagcttccttatcttgcaaaccatgttcagccaatgaagtaaacttactactttgccgtggctttgctacctttgcctcctttgccctgcaagcaaaacatagacaaacatgattttcgttacttcttgtaactatatcattaaacaagtatatgtgtatattttttttttgcagaaaagtatctatatattttatattctgtaaatgggatttgtgggataccttcttcttggtttcctgaggcttttgtgcagcagctttctttaaactcggctttaaggaacccggctttaaagccgtagcctttgctgaaccctcaccagccttaacaggctccttcttggcttggccaaagagctgagtgccaactggtttttcagccttcatgcttgccataacactattgaaattgaaactgttttaacgggaagggaagagaaaaaacagatagttttaagggttaataaaaactatatatgacactggcttgggttgctttattcatttccaacataacatatttatagtgggttttgctcagttgtgacaaaggggtttggaatcacaagttacagtgacgataagaggggaatggctgtttttcaggtgagcagaataactgacatgatcacttgtactgaaggacagagcacccgatgctttgcttatgaaagttttagctgccattatttagataggtagagagagatataccaatctagtatggtataaacgagtggaatagcatcaatctttgaaaggaactaaatatgctattaactgagttaccattggctttgtttacgtcgccaagatatttactataatatctcaaaattggcatggaactattacttggaatgaattacatcatatttgagtactaaaaaatcatataaagtttactggtggtggttaaagtttttggtaatcaaaaattctgattggcaagcattagaaccatcagatgaagagggcctttcctttaattagagtggaaaaaaaggtacacagctggctcaagaagatttagcaatttggtctccaaatatagtctctaggggaacaaaagagatgatacaaatctatctaagaatatcaattttgctctcacataaagaatatttttatagcggttgattttaaatttggtggtttgatttatatgtttatcataaggtttgttccattaattttaattgttaacccacgtgtaatatgccctcttaatagattttgtgtttcaattttaaggcttgacatgtaggctcacgtataagtctaaaattcgagacttccatcatcttctaccgtaacaaaaataatccgatatagtcaattaatttaggtggcgtttggtaagacttttttaattattttctgttttttaaaattaaaaaagtaaaaatagtttt

SEQ ID NO: 379424 - DNA, 4969 bp, Cannabis indica
aaaaaaaaaaaacaaccgacccctccctaccattacatacacaacaaaaaaagcatgaccctcatcttaaatcttgttccacaactaattacacaaacaaaatatacttattttacgcaaaataaaaataattaaactaagttatggttgtgagaaataataaaacgtagagagagagggagagagagaattgagttgtgaattgttattcattaaaaaaatgagctaaagctcaatatatacaagtataatggtcacttacaatgataactaactataacaaagcagagctagaatgagttaactaaccaggctaacttataatagcttaatagaatgctaaagctctgtaatatctctaacaccccccaaactcaacttggcgaatgagactaagctgagtttgtatctaagaaacaaaaacctagtgctagaaaaatcttttgttaagatttttgaaatatgatcatcagcaagggtatgcttgacttgtagctgcttggtaaaaattctttctctcataaagtataagtacaactcaatgtgtttggtctgagagtgcaagacagggttggctgacataagattagtactttagttatcacaccagattgcaggtggttgatgtagaggaagaccaatctcagtgaggagagcttgtatccacataacttcagctatagcattggtcaaacttttgcattcaacttcagttctagaacgagaaactattctctgctttttagaggaccaagacaccaaattagggccaagataaacatagaaacctgatgtggacctcctatcatcaggatctaatgcctgattagcatcataaaaaccattgagagataaggcttgagtagacttgagatgaagaccatggtctagtgtacctttaaggtatcttagaatctttttaacaatttcctaatgagactctaatggagttttcatgaattgagataccttgtatactgcataagcaatttctagccttgtaacattggcatattgcaaagcaccaaatgtgcttctatacaagtaaggctcagaaattggatcacttccaaaggctgaaagtttctcacccccaggcataggagttggcaaggaattagcatcatgcattttaacctttgttaagagatcatgtatatacctttttctgacaaagatggagagttgtagttgtgtgatgcacctgtatgccaaggaagtaggtgatgtcacccagatctttgagagcaaaataagaatgcagttgattgatgaggaactgaacaatagtactagaactccctataacaaggatgtcattaacatagacaagcacagaaagtgtgtgttgatgagtaatacaaatgaagagagaattaatttccttagagcatacaaaatcgaaggataacagtactgtttgagcttgtcaaactaggcacgaggggcttgccttagaccatacaataccttacacagcttgcaaactaaatcttgttggctgaaatcaataaaaccaggaggctgcagcatgtacacttcttcacttagatcaccattgaggaaggcattgttgacattgagttgcttgattggccaatgtctagataaagcaactgttaatacaatacttatggtggttcgcttcacaacagggctaaagttctctcgaaaatcaaattattgaagaaaacccttggaaactagtctggccttgtactttcaaatggcgccattaatgttttcttttattttgagtccatttgcagcctatacctcttatccctttaggcagtttgactagagtccaagtcttgttattcaccaaagcatggatttcattgttcatggccttgttccagttattatcttttaatgccttagtgacagaaagtgggacactagtagctagaaaaactttaggtttggagatgccaactttggctctagtaaccatatgatgggtattgagagaaggaggatcaggcgcaggtgcaggtgcaagattaggtggaagggaaaaggaatgtggtgtggaggtggagctgggatgagaggaagtggtggatggagacatgttaccaaaagatgagaatggagtggcagcagaagtagacacaaaagggatgagagagagatagttagaacaggagtatgagtagtggtgggagacacaaggggaaatgattggtgtagcagcacgcatatgaaattttttggtttgagagataggaataagattggattgggtggcaaaggagaaaaaaattcattgaaaaacacatctctagaaatgtaaatcctgcctgtggaagacaaatacttgtagcctttgtgtttcaagctatttcctaggaaagtacacttgacagacctaagctaaagcttattcctgttgtatggcttaatgttgggaaaacatgcacaaacaaatacccttaaggagatgtaatcagcaggtttgtgaaaaataacttgaaatggagactgttgttgaagaacaacaataggcaatctattttgacaaaagggtgcagttctcatagcttcatcccaataagagagagtggcataaatgcatgagcaagataggtcagtgctgactcaaagagatgtctgtgtttacgctcagtaacaccattctattcatgagtggtgggacaagacacatgatgagaaatcccatgttttattagaaatggttcaagagactggtactcaccaccccagtctgattgaatagaccttatggaacaattaaattccttttcaacttgagttttgaaattgatggatgttggtaaagcctcagattttgtttttaacagaaaaacccaagtatacctagaatatgcatctatgaaatgtatataatacttgttgttaacgcagattttcgttaactaaatatataagccttttatataataaatataccacagaatttaataaaataacaaataaacactagacatttttacgtgattttttagttaaaatctacatactcctcgagtccttcttattagggatgatgatctggatatagagtacaatcccctcagtaaatgcaaaatatagtttttctcttaattttaccgtccttttatcctcgattctacccctatttataggtgtatatgatggcagttattttcactaggatctaatcatttacaactactcatgaaacatggacattctcacgttttatttttgtgcacatgggataatattaaataactactcaaccactcttttgtctttatccttaaatggttatgctgactatgaaggttgtttctcgctaaatgtgagttattcttcttcactatctctatagaaaaaatgctaagtatagatatgcttcgcctcccagtgttcttgtattataatgatattagcgaggtggcaattctgtcgcgtagagggggagatgaatgattgtagttattttgtagcgagcttcttgatatattgtcttgaatacttctattatatactttgtctatcccgatatggacatattttctcatcagctacatctattaatagttattattcttatctcgcatatgcttatgtgacagcgagtttgaatatttttattaactatgatttattgcaacgagttatttaagccacgtttaataatgtaatttaatatatgaatcaatgagctgattcatattccttttatagtacacgtgtcagcttttggttgatagtcgaatttcaggtataacacttgtatccatttaaggaaagaatgggggagggaccccaaatgtctgtatgaattagctgcatgataagtgtaaacagtttcaaagtaagagaaaggaaacttgtatactttacctttgcaacatgcttcaaaaaaatcatgaacacttttattgacatcagaaattttataagattggatgatgacttttaaaaattttgtagagggatgacccaacctgttgtgccataaagagaaatcagaacaacttggtacattgacaacagaatgtgtagcattattaagagaacatgctctgaagaaggaagagaggatgaagctaaacaagaatggtgtgacaaatgcatttgagacggttgaatgacgtaaaaagactaagctaatcctacaagaggacttccttggaacctgatctttgacaaaacactgattaggaaagagctcaaaataggcattattatcataggcaaattttgagatacacattcattttttcgtgatttgagggacatgaagaactcaattaagataaagggttttggatgagtaaggagtggtgaaggaagtctcactaacattttgaacaccatctcccatatgaactttttctgagccaaattagggatccttgtgagtgaaattattcacatctgcaatgtaatgagatgttgctcctgaatctagataccacacaacatcattagcaatatcaaaagtacatatgttggcaaatttttttatcaacattggctggacaaattcctagaaactccatgttaaatctttgatagtagcgagaagcactttggccaaccttggagcagagttgacacacatgtctaccaaagtttccagaaggaaagttagaattatgggagaactgaggtagagcactgtggccaaatcaaggaggaggagtagactgttagtttttagggtttatatcacagtcgcagcagaagcagaaaataggatcaagatttaaaaaaaaaaatatttgttgaatctgatatgaaccttaaacgctgattcttaagacaatataacataaattaaatctaactacttggaataataattttacctcttaatgcctatcagggtatgtatctttatatcttttcgtataatttttcgatcatccaatctaaagctttatgggattgatgaagaatctacaccaaatcttccagatcaacctcaacactcaggataagagtg

SEQ ID NO: 379425 - DNA, 6929 bp, Cannabis indica
taatcttgcatttcttcataatgattttcttcttgatgctttatgtgttcatttttatttaactccatagttcaaaatttgtttgcaggatatattggaacagcttaccccattgactgttttgcactttggaggcaacatattgagtagaattggacatttatttgataaatacatgactccttaatcaaagaccctaccaggcccctcagatgatgacaatattaagagctcaaagatgttgtaccatttagagcagagacagattcagaacagctttcgattcttggaatagcattcacaattatggatgaactgttaccaaatgcttgttgtaactgtttggaagcaactaaatggttgtcaggattcaaacgatggaactggtgaaaatatgaaatcttctcctagcaccaatgccctgaaggaatggaaacgccaaattcagcattcatatgataagcttagagatcatttttgtcggcaatatgttttggctttcatatactccagagaaggaaaaactcgattaaatgcacaaatatacttcaatggaaatggagatatcttacaccactgggactctgatcctttgccttcacttccatttcaggtcattcttttttcttttatcttattactttatcgtttgatggagacattcaatggaagatctgtcgcaatgcatttcctataaattctactgtttctacttgtagagctatagattgtctgatagcttggcataatctttttaagatgatgcacctaagctaacactgcagcttctatttctggtaactgatatgctgctatctttgtaggctttattttcaaagttacagcaattagcaacggtggctggagatgtattacttggaaaagaaaaaatacagaaaaatttgctagctagactaacagagactgttttaatgtggttatctgatgaacaagagttttgggatgtgtttgaagatgattcaggtcctcttgagccacttgggttgcagcaggtatattctttaaattgtcctcttcgttctcccttttagctatcttctcttgacttgaatgggccatttacgagaggctgcttttatttcttcttcttctttcttaattgatcattgaccttaaggcatgaaagtctgtagaacggatatatgtcgtcgtggtggatactctaaagaaacagccaagttattcactcaatctgactagctttatttttgagtaacttattaaggaaagtagtaacatgtggtgtagttgttgcgtgtcagtgcaacaactaggactggagggaaagcatttctatgatccatacttcttgtgtagttgtgtttatgcagtgcccaaaaattattgagtaatcattaaatgtgcttcaattcaactaatattgtgctgcacgcaactgctcacttcacacaagtaaatatttaactagaatcctggctcttagtagcctggtctcataaagcctcctgcccccacttaatcaagtcagttttactactctcaaatttgttttttttagcttgagatcagtgaattctttgtcatcattggtgtttttgataagacctgtgattttaagccaaaatgatagaaaaagtcccatctggtgaacttgtgtcaaaagccactttgacctctatggcatatgaaatgtaaacatgtcatcatattgttattctgtccatgttcttacgtatattgttgctagtatttaaaaaaaaaaaaacgagacttgcacattcgtgcctattatgcttgcgataatgcagatggaatataagctcaactaactcacattcttgttttcaaactgcactgcataactaatctgacagccaactcgtatgctcctaatttatcaagctcataattggtctttctctcagctaattcttgatatgcacttcactgtggaaattgcacggtttgcgggttacccatcacgacatgtgcaccagattgcatcagctataattgctcgtgctatcagggcattctcttctgaaggcatggtttcaaacaagtaagttatgtttgtgtgcaactcaagtttgtttaccagtttctgtatctttgttcttctgttttccaaactaaaatcgagcactgtatttgttgtagtgccctccccgaggatgaatggtttgtcgatgctgcaaaattagctataaacaagctgctcttaggagcagaaggatctgaggcatccgaaattgatgaagacgacttacttcaccacgatgatgatgtgatctctgattcagatgacactgtttcttccctgtcatcggaagagtcttttgagtccttcgtttctgcaagtatgggcgaccttgatagtccctcagatcttactgatcctgagagctagtattaaagcaattgaaaagcattataacatataactgagatgtttttctttctacagaaagtgaaatcatttcaggttcttcaagcagatataggaaaatcacttcattttcacatttggtgatcatcaatgccaatttattagagaaagtgtgtttgaaccgttgtttataataataatgattattttaaaaattatgatttcattgcattccaatttccaactcaattcttttagacagagatgttccactaaaatgcttctattacaagagtcttggaaaccttgctcttgatttggttgttgtgggtcatctaagaaaacacgttacgagagaataatatgtggcgtgggagaattgatgaggtgtgtgtgattaataaaagtaaattatttattcaaatttatatataatttaataattttttaaatataactggactactgaaatatatataaatatatatataatatagtatatgttatttcaatttctgtgcatggtgatgttgctttaggtaagtgacacgtggagatcaatctaagacttggataagttgttggccttcgaatgctccatctagaggagtttacaattgcatctaagtatcttgcaaacatccagactaaaaatgcacatgatatttcgatgaggaagtcttttgaagatatttttcttaaatattttctcatttataacttgtttttttttttttttttttagaaataatccttacatttatgagattagatttgaacaactgagaaatttagggacttaatatttgatttcttattatttttagtaacaatattcattgtacatctcatataaatattgaagccattccattactcaagaggaattttcgaacttttgagagtacttacactgctaaaatatttgtaagcttttatcaagatttttaaaaattcatttgtccatctccttgtgatcttgataatttttgaagttatataaatttaaagaggagtaggctattaccataattacagtgatgaacctctataaaattctcgtgttcttattgcttattattactatcgtgttagtattatgcattatattattgcttaaagatctagtgtcgttagctaaaagtgatgtcaatatattagtgctttcattgagagctattgaacacgatttgtcacgaagtttagatcatctaccgatggttttgacgagaaggtcacaatccaccgaaccagtcgatccaatggtgacagatcctaatgtgcaagttcccactaatcaaagagatccaatgacgatgaatcctaatctgaatgtccgactgcctccacgatctccgccaccagcaaaacttggagtgacaacccctctggctggatttatgcatggcacgtaggaaaatggtaatacaagctaggcatatactggagaaaccagatcgggtaccggccaaccttcagtgggagaaccccaagtggatctaggggagagcattgatttggataccttgagggaatttgtgggacaagtccaaactcatactattgtccacaacgatcaggaagaaacacgctttgtgatgaaccatgtgttttatcaacagagatgtcaattccaagaatggatgaacaaacagactaagtccatgcgcatccagtaggaagaaatcaaccgccgattaagggaggctatcgacatgatctaacggttccactagcaaactgggggcagatgctggagaatcctacactcaagagagaccttgctttggaaaaagattcttacatcccctctggaggacaacaatatggcccaaaggagcgctcaaccaactatttgcagacaccccaaactaagagacctgctaattccaaaccatggaatccaattgttggtaacttggaggatgaccaagtcctgcctagtcattaccttggaagaaatgatggtcataaatttcatccccagtttgacagaaggacaaatgataatcctccctgatcgattggaggaccccaaggagggcggatggcagtgtacaatcaaaatggacaagtccaaatttatagatagcctaagtacaccgacctactgccccgacagggacgatcaagttcatgcagtgattattctttcccaaagaataatgaagacagagctaatagtgagtgttgtgacaaccgtctccatgataatcgttgtgcccatgacggaattcaggaaaaccctccaagtgatactaattctcctggatcggcttggtctacgagccaaacatacaaaagaggtcctggaaattttgtctttgacaggatgggatcctgaactaacctccaagatgactttaatcagaggtgggaaaactaggacatacattttgttccccctgcccaataatcaaccaattaatgtggaaagctttattccataacatatggagaactttgtgcctttcgaagctctaaggggtcaataggtggcacaagtcggtcaacatgtaggtcaggttgatctaggggtacaagcccaaatggatcaacttaaaagcctaattgaaagcctgactgacccaatcctcatggacttggagctcgatcaaacaagaggatctcctttctctgctcggatcaatttcctagaccttccaaccaaattcaaaatccccacttcgaagatgcattgggaaaaggatatccattatctcatattaaatactttgtgatacaaatggatctacagacagtcaaaggtggcgtgcaatgtcgagttttcctagctaccttaacgaaggccacccagcagtggtacttcaatctagcactagaaaaattcaactcatgggatgcctttgcatcaaagttctatgcccaattctcctcttcaagaaaacttctcgtccacttagaagacctggtcgaggtaaaataggatcctagagaacccctaaaggactttgaacaatgactcttgaggacgaagagagtgggcaaagtggtattgtcctttggtctgaagtgatgtcagaagatgatggagttgaactggtgatgaggccaaaactgaaccttcaggccacactgaagcttatgtgcccaaggaagttgggggattagtaggttgctgatgcgccatagtcatgattaacttgattttatacttttgtatttttcttacgcactgaccattttttattttgctcagcaaataagatgagtttccttgctactatgcattcttgctccaagaggaaaaaacctggaacgaggattgataatccccccatttgagaggtcgtgcgaggcattcttgcaactccttttgatcctctgaagaagtccatcaattctacctgaaaataagagacaagagtctttggatgcttcctaaatcagctaagggattaaaaactgtgtgaaaggtctatagtgttggccgttgtaactacaaacttcaaagtaacctaacgagacagcccttaaaacagtctagcaagctagcataacatgagtaatgcttaaaggaaacatataaaagcataaagtcattataaacgaccccacggtgagggcctaattaaaattattttcgcaaaataagaacagagaagaggaggaaagacaaagtaaaagaatctacaggtcgtggtcttggagagggtcactaccttaactaattgctcaatctttaatcatctgagtcttaagtctggcatgctatgccaagaaagtacctacaagaacagttaatgcaggtttaaataaatcaactcaaacttaggccgaaacataaaaatcgctaaactgtggaaccacccaacccattagaatccacccacatggaaaccgcccatgaaaaacccgcaaaaattgggttgggttgagttttaacctgctctttggcgggcaagtacgagttcgcctaaaaggggcgggtccaacccatacctgccatttttttttatttaaatatataactaaagtctaaaacgaaaaagaaaaaacaaaaccctaaaacctaaaaccaaacctttgtctgaacctaaagttacaaccgctcaactcgtcctcttcttctcatctcctattgtcgacctatcaccaatcatcgcccaatctccggtcgttaacccaccacctacctcgacttccttctctcttaatctgaccctttccacctcgatgggtcacttccagccagtgtagatagtcgcggaaagctattttgccgaaccttcatctagcctgagcgacgaagccacaactttggtccacttcgccggaccttcatctagccggagcgacaaccttcgaaagccacaccaccggtcgatctcttccactttcagtctggtattatttttatttatatatatatataaatatatatgttatattgatatgtttttaatacaactacattgaacttttgttttatgtaatataatatatatattataatcattaatgtagtattacaattatattgatataaagttcaattcttaaaatttttgtttttatttatttttattttttgtat

SEQ ID NO: 379426 - DNA, 1020 bp, Cannabis indica
actatttatcctttcccttattttagtttacacgtacacttacaagtgtcactcttatattgctaccaatcccaagagagttgttggtgatgatgggcaagttctcatttcggttgggtagtagtaggaagaagaatagtgagctttgataacattttgacggtggtagaattttagtaatttgataaatattatgtttgttgttattttattaaagaaaaaaaaacatataccaactctagtctaataagtaagtcaccataacttattaatgcaattagaaataatattttaggttttctagtccccgaattaggctatctatttatgttctcttaccgtttgatatcatttgagaatatttgggtttggtcatgtcattcgatctgtatggtcagtgtgtttttagttgcttacaattgtcaaatctttgaatatgttaaatttatattttgggtgtatggttaaattttcacagttaaaaaagccttaaatttgttttctttttctattcaacaaggttaatattttgatgatacttttgtgttggttttaatttcattattaaatagcattcaggtgttgatgctaagcttgattcaagttgatattatttgagtagtcttatgtgagaagactggcgaaataccaaaagaatggtttgagttgtgagaaaattagaggcatatagttgcttctttgcaatgttttatctcaccaatgttaaatgtatatacatgtatgatagctaaggagagaggagtcagcttgacattgttattctaagtttctcaaatggatgttccaaacatgcatagagaacaattgatttattgttaagctctattgggctaatgatcacaatcatttatggtgtcttcatcctaattttctttactgaatttgtttgtacttggtcttcaagtatacataaatatttgtaaaataattattaaatataaatttatgttttatttatatttattatataattaatttattttttttatatattttgta

SEQ ID NO: 379427 - DNA, 2060 bp, Cannabis indica
ttgttctcgagttttaaaaataacaaatctaatatttactccttaatcatgtcggaaaagtgctacaaactaccattttttcgcacacctttcatcaataaaaaggaatgaaaaattacctcacgccatcataacgtgataggttagaagatgattcagaggaagcaagaatatagtaggatggcaacccaagggagaaagatggtaaagaaacctgcaagtgaacattcatagatattaagggatacagagacagcaactaaacctacaaggctacaactgaacattcaaagagaaatcgctcagatagtaaagaatatagaagtttaaaaatcccacaaaaagttgaaatggaaaattaataacatagaaagtaaacctctgacacagagcatcctaattcttcaagatgtgaagcagcaccacggataacagtagttactccatgatcaacaccttcatcaatagtttcacggataaggccaactctcaaccccttcaaaggcttagattccgaaaaattaattgaagaaataagagaagtgaagtcgggaacctcctgaaaagatcatagacaaaatttaaaaacacaatgtgtaacaataatgtactagcattacaaagtactgcaggaaagttcaataaaatcttactacccccttgcattagtctttagactaaagtgggattgtggaatgtaaacaagatgcttaaaccaagcattttggcatttgtccaaatacaaaaattgacatattttacccacaaacaccagaatcttaaaataaataaagctattttgctcagaatttgcacgaatagttggaaacagatattaatttgtttggacaaatttgctatattagccattgaacaatatttagatattattttttgaggcaaaaaaatagtagtctcaaaatatgggaaattgcttacttgtttgctactagtagcatcaagtctatcatgaccagaaattgcatggagaagaatactagcatctgcaacagatgaaccaaagcagccaatgacatcaagtgaggatgcatatgccattagtccaaaccttgaaacccgtccatacgtgggcttcaacccaacaacaccacagaatgaagctggctgtcttacacttccaccagtatcacttcccagggacaccatacactgtctagcagaaacagcagccgcagagcctccagacgatcctccaggaaccctagaaacatcccacgggtttgcagtcacctaatgaatgaacagatgcaccacctgagtaaatcaacccaagtcaccactcaactctccagtgcaaaacatgagaaaaaggagagatgagctattgtgtcaccatctcccattaccattacaacatccaaagatatgatttttctacactctaaatcttaagtaacttccttcactttctagtcacattgcatccattccttcaaaatatagttataatttaaaagaaataaaaaaatgaaaaacctgataagcagaggcttcagtagtgctacccataccgaactcatccaaattagtcttgcccacaatgattccaccttgctccttgatcttcctcaccgcagtggcatcaaacggtggcctataaccatccagaacgcgagagccaccagtggaaggcatgtcagaggtacaaatattgtccttaacaccaacgaggaccccagccaagggacccagctcctcattcctattgattttgtcatcaagctcttgtgcctggcgcaagagggagtcagatacgtggagaaaggacttgagagagggctcagtgagacgaaggcgagtgaggaaggagttgacaagttgagtagcagtgagctttcgggagaggagggagtggcgaaggttgaggatttgggaggactgagatgcttgagtgtcagtgggggtgagaggctgcgtggatagggaagagaggggtttgaagttgaaggaggtgtggtggcggaggagggagattgggctggaggggaagcaagagagagagcgaggagggtgcatagtggataacattttcaaacact

SEQ ID NO: 379428 - DNA, 2342 bp, Cannabis indica
cggtcgggcgggggggggggggacaaggcgcgtttttttcatttttgaaaatctttatatggtttgaaacaaaagtctctcagtctggtttggaaaatttagtaagttgttgaaacaattgatttgaagaaaagcatatctaaccagtctatgttctacaaacaatcagaagttggtatccatctattagtatgtatgtcgatgacattgttataactagaagttatactatgaatctcatcttttaagtctttcattcatacttagtttcatacaaaagacttggaggtgataaagtatttcctggttgaagttagaaagagtaaaaattgaatcttcctatcttagagaagatatgtttaatctattaactgagacagaagatttgggggcgaaaccttgtaatgccccgatgaatcttagtatacaccttacaagagatcggaaactatttgaaaatcatgagggatatcaaaagttggtttgtaagctgaattatcttatagtgactcctcctgatattgcatatccaattagtgtagttagtcaatttatgtcatctccaatagttcttcgttggcagcattagagaaaatttgtgttacttaaaaggagcacatggacaaggcattgtctatacaaatcatgatcactttgatattgaatatttctgagatgcagattggaaaagtttcaaagtggataaaagatctacttagattaatgtatcatggttggaggaaatttggtttcatggaagaagaaacatgttgaatcacgatcaagtgcataatcagaatataggagctatagcacaacttgtgtgtgaaatcatgtgaacttaccaaatcttacctggagtaggacttaaaacttcaactccaacaaaaatgcaatgtgacaaccgaatcattcaatccaatccaatccaatatttcaggagcaactaatctcaatgagattgattgtcattttttttgagagaaaattcaacaaagttaattttgacaagatatgtgaagactagtgaacaactaagaggcatctttatgaaagctttcaatggggtttatttaacaaattgggcatgattgatatctatgctccaacttaagggagagtgtcaggtgtatattatactattgcataaccttccaattcttcttagtatcctatatatattattgcattcccttccaaatactacccttaatacaaaaactcatatacccttttgtttgttatgctctctctcaccctattaattttagggcctaaaattactagccacctaaatttcaccttatcctcgaggtggaaaatattagtacaaatttgtccttggtagaagactagccagcaaaattgtgttttgagagctccgtgatgcacaaatggatggcaaaccaattgtagaagttgttatcgtttgccctctatcaaaaacgaagcattggaaccacactagaatagcattgtttcccacagttgaagacctccagtgaaactggaaatagaatagagacgcctgttggaaactaattaaacagtatcttattatttttcatgtaaacaattatttaacgtaaattatttcttatagcatgaaaaactgcaaactaaactctaacccttgactcttatttgtagcagagtatagtcaagtactgaactaaaatcttcaattaatcatgaacacaaacttttcttcacggtcttacattgtgttcaaagtaccatgttgaatagtgtcggtaattccctcattacacaaaatttgaaaattctagagagagagatggcagctaagactaaattttggaagagcttttgattgttttttcaagtttatagaagctttccaatgccttgtatttatgccaaagggtgattcaagaaatagaaaataaaattatttttcttacaattaattatttaaataaattgagcaatttcttgttgtccaaggatggcatagctgaaataagctatgtggattaggctttgaattctattatgaaattacacttactatgggattttaaaagtttttatgataaatatggcacatttaagtttgaccaatttatatggtatttttttgtttttaggtctttctatggtatttgatatgtcatatatctgtaattaggttttcaaattttatatttaatatttttatttgtttaggaagttttatttatcattgatgccggaaaacatattcggagtttgctgtcggtgccggaaaagtcgccggagtagcagtcggtgccggaaaagtcgtcggagttgctgtcggcgctggaaaatctgtcggaattggcattgtcgccgaaaaa

SEQ ID NO: 379429 - DNA, 5018 bp, Cannabis indica
aaaatatgttgaagatttatcttcatctgactaataggatccctaatggtgacaaatgaaattaatgacctatactgacaacttttgttcttattatttttataacaaaacctcaaactcatcgtattaacaaataaaataacatataaaactttttttttcttttgtagcaataaaaatacatatcaacctttgaatggaaacaacaaaatgttgcaaaaggatatataccggaaagccgtacgtgaaaaagttgatgctaaatatccgaaaaactgctcctctcaagaaaacattagtgtgccttccaccagatctgcataaaaacagaattatacagtgagcttgtctattctttttatttgtttatcttaccaaagaaaacaatactttgtatgaatataaaggatcaagagcaagtttaactgtggacagcaagagcgcagtaaaacaaaactacatcataaaaccccaatcccacaatatacaaaaatagaatcatatccttaatatcttttatatcaaatagccaaaagcaatttacatttttcttcactctccagttcctctgaaaccagatgaaccagtaagtagctaaaacagccacctaccacagactctaaccctcttattaatggagaaacccagacccaaaatcagcagtgatttagaagatataccaaatagagataaatttagagaataagcctaatgtagcgaagagatgtagacaaaatcttagcgaatatgtaagtttgagcaagaataaacaaatttacgtcataaaagactatgaaactactttaaggagaccaaatggacaatttatgaagtctttggtcgtaaatgtacataaggatacccagagtctacatccttctaacacaacctctaaatatccctaccttccttccactaactgtagtatgtgatttatgagaagtgggaattgaagaagaagacaccttaaggagaaagcctatatgtttctaaggaaggaacaacaatttaaaaacatctagacaatctttaataacatctatgtcattggcaatgtattatggatgaaagatatttacaaatgatccctggaatttggcgtcttaagtttattgttcacttaataacttttttattagtttacttagattatggtgtaactacaaaatctagaatgctccaccaataacccatgacaagattagtccaaaaaataatactaataaagcatgatgatcaagaccaataaacaaataaattaatccaacttccaaaatacctatgttgacgaataaaaaatgaatgctttgaaggaagaagttgctctgccaagttactttctcccatagacataatgaagtccatttcttccaaatcagatttgagataagagagctacaattagaggggggaaattcatcaaaaatcctaagaatacaagaaaaaataagcatgcaagcagttgaccaagtgaaacgactttattattaataatacatagaaaaggaaaataaaaggaaaaacacaagaaaaacaaacatgtaggcaaacagatatagtcaggatctaacattacctaacttggcaagtgttcatcagattgactactttagagataaataagattttcatcccaagttattgctatattcctttgcattactagtgtacacataatcaggaaaccaagcataacaggaccaagttttaatctcatcagtcacctcaacaagaaactaaccattcccaaatatgcttctttatttcattaaaacaaaggtaactacgaatcaagcttataatgggtgcaaggaaataaaataagatacgaaataagaaatgtgaaggaaaatctaggcactggtactgaatccaaaaaatttgagagctgggtctctcctacaagtgaatcaatcaaattcctctttagccaacttcttctctcaaccagctacttgaatattccctcaaccagctaactaataattagctctttcaagcactccaatcacactggcactgccatgtcaccagggcctagttagcagtattctgtttgaaaattcatttgtttctatgctaattttgtacagttttgtgggtgtttgtaactacggctttcctcctccgcaagtgagggctctgcctctcaatatgtggcctttgtctctttttccaaaaaaaaaaatgaaattgttgtgaaaacacatctatcatcataaaaccagaactcatagagaaaaaaataagagctatcaagcaaacaaaatggtgaaattaagcctgccagaaaaacaatagcctagctaaacataccgtgatataaaaaataacgagagaaaagcttgaacaaatttcaggccactcagaatctgctgtaatcttgaataaaccaatgaaatcagctgaccaatttaacaagcttggaaacttgacaggcagctgatacacatataataagaggatgttgaagcctgcatacagttgtaaaggcctccaccaccttaaaatattaacagaacaaatgtcaattaaaagaaagaagaagaaaaagaaaaatacaaagtgaagagtaaaatcacaataaattacctgaaaagtcctagaaaattgcttgtcaaagaccaattcacaagaccaacacaacttccaatgaaaaatggtagggaaacccatgagggatggctaatccccacaaccagctgaattgcaggcaatagaaagcaggaagcaaccctaatatgagaacctttggtgtgggaaaaaataaaatgattccaaattaaattaatggttatggaatagggggaaaaaaagtgataaccactagcaacaagggggtgactaatatgatatttgaaagcgtcatttcacatatacatacaaaagaaagaaaaaaaaaaccaacttacaaacctaagtgttcaattgctgacaagaaatgactccaacaggaattacgccttgaaaacgaaccaaatttgtttccatgcaaatcaagcaatgcaacaactacagctgaaagctgcacagctataatataaatcattggagatttccatgattggattctgcaaatgcatgcaaaacaggatgtgtaaatattccaaaacgtactgaggcataatggattaatataatatgttaagagaaaactatattctcacatcatgaatccgaccagctttccccaccaagcatttgctatactccactcatttcccttaatagtgctaataacaacatatatcacctcagaaagaacagcaagtgatgaaaaaatgatgacgggccataacaataagaacctccttcgaaatcctataacaaaccaacacaaggttagtaagtaatgacaaaactaacagaattgctgcaaataatatggcaccagcagccaataagttctacataaatcagacctaaaccttgatgcataagaaagtataagcatgataataactaatccaaaaattatctattctctagaaagggaaaaaacaatgtaataaaccatagtaaaacaataagttataaagcatttcttcaaattaacaagcaattaaaaaattcataccaaaagccagggtcaaatttaagatgtgcaactagtgcccttgataaagattccattaacatgacattataaggttataaaattataaacctaaccagttgcaatgacagagtcttacgaaacaaattctcttaaacggaaacccacactcttgttaagaaaaaaagcagcaacctaatacatttacgcaatatttccattccctatcatgagaacgtacctttatcctcaacccgaaccacataataaaaacagtatggaaacgattaagaagaaacgctataaaagtatacggttgcatgttatcatatgcagatcattcatgttagaaaatgcacaacttaccaatttttcgagcattgaactgaatgagaagaaaggctatcaaatcaacaaaagagatcaagctccagttgattaaagcacctaaatgaaatttaaaaaggaaaatgttataatcataagtttatttaattaacaacgcataactacaccatataattaaacataaacaagaaaactgagatatgatagacagtccagagtttatcaagtaaaaaagatgcggatctcaaaaacaaacactttacaccaaaaccatagccaaatgctacattgtaaagctattgtccatttatgaaaaatccagcgctagaaagttttaacgccaccaacttaaaattaaacaaatcaatgaaaagtaaaacgtatgttctgaacaaataaaatctagctcattcatactgaaatagaaaacacaagtcgtcaattttattgatcaaagaacttagtttacgcctctaaacaacaatgcactatacttctactctaaatttccacttcagatgccaacattaacaaaatcaaagaatgttaatgtaaaataggaaacaaaatcgaagtgcaatactttaaataacaggtgcaacaaaggatacctgtcaaaagaagcagaggcaatacgaagccacccagaaaactccccatgagcggccctttacgagttacgatcaacgcagcttgaaatccacaataatcattatgtaaaaccacgcaattcggttaacgggtattcatttacagctaaaattaagaataacccatttcccagaaactctaaattacttcccaatttcaaccccaattacgtaatcagcttcttggtccatatagaagaaaacaactatatcaatcaaagttcaaaaaactgtatggttaggaggaaacagtaatctgtaatctaactactagtcaaaactaagagtcacaaaggttgtcgttgatatcagaatagatgaacacgaaagtgtggtttgaatgaaatgagatgagatgaggaagaaagctagaagctttaagaatgaatgaatgaacgaataataaaatatgcatagatattatgacagcaacttcattttggtaaatatatataaatatatat

SEQ ID NO: 379430 - DNA, 3717 bp, Cannabis indica
atatatatgactagttacaacagaaaatataactaatctttataacagaatgtacaactgttaataacaaactacagctgtcattaactgtcattaactaacacctaaccatattcactttctatctcaacagttcatgtactcaacaccctctatataattttgcatctacaagaattcatctcattggtttagtttcactagagaggaatcttaactctgaggttcctatattgaagaagctctagagtctcgtgaatgtaaggtcgtagttcttgaggaaatgaaagtactaaggaggaatgagtaggggggtgttgttgaccaactaaaaggaaaaatgtcggttgttattaggatgttttctatagtaacaattgaaatgggataagtcaagactttagctataggctgcagtcaaaccttcaaagtttattacatcgagctattattcctgtggcaaaaacaaaacaccatgagttatattatgtactgatttttcataaattaagggtaagtccagataaaacacaaatcactagccgaaagaatctgaaagaaaaaaaaacttggaactctacctttcagtccaaacccacgagggtgtacatttgtgtgatttgctacattaagaaattcaatttatagttagggatcccttattgttacaactattcttttttctttgttgttgttgttgctgttgtcaaattgtatgaccattcaaaatcaaataagttggataattatatggctagctttttagataacatgatttcataattaaatggcatgtgtactttttatatggatatttcattttacacccttgaacagattcaaaaacatatcctgggccaattattgtagttgatgtttcaaaggaatccgaggtatgtgacaagaaatctactcctaaatttcatattatattagagacttaatgctattctataattatttctagctttataaacattttctatatccttgtaggatggcttgtctattactgtttctcctctaataagaatacacaatggaactagattctcccttgaactaagatttcaacgacctcaacaaaatgtagatgagtctgcttcactcgttctaaaaccaggagatacaatggatgattcaatggcaatgtttgattctgtacatttgtctggtggattaaagaaggcattgaattctttaagtcttggtaagcatttttaattgttgttctgcgggtagacttgaaacctcttgtggatttatatacatttcaaggagtgtcactgtcaatatccagtagtcacagaagttatagtttcacacatcttcatcctaggatattatttttctcatttactttagaagaatgttaagagttaatgcaggtgcagatctcagggtgaatttgggtgccacacatgtctgagggacacattaaattaattacacattcatctccgactttgttgtggaaaaactaatgatgcaattcttacctttatttttctcttgcttgttatctcatgttttctcgtcaccatggattcatggtttgtggtgatacacaggtaacttcttattttcctttagacccaacataaatgaagagtttatgagttccaaggattcactctcagtagaatggtcacatgaacttaaaggtggaaaggcagttcgtctgtctggaatttttgataaactaagctacaaagttcgacaagtgtttgccgaatcagcaaagtgttccttcagcagtgctcaatgtagcctcaaatctgaaggttctcatattgctgatattcattttctgatacaaagctttggaagaggtgtgcctgttcgacaacctagtaactccaaagaagggtataaaagtagtacttccccagaagcaatacaagaacagaaggaaatttttcttttgccaactgtgaatgtatcaaatttattagagtcagagatacatgtacttctaactgaaatgggtaagggggaaaaatgttctttgatagaataaattactccttcagtattcattccataagtttttacattgttgcagatccatgttcttgcattgagtgtgacaacactgagaatcaggcaaaactatcacctgattcatcgttggatttttatgttaatccctccatgatatactttactgttacattgactgcactaaattcaagctgcaaaccagtgaacagtggtgattgggttaagaagttacagaagcagaaaaacgaggcacgctatctagacattgatctggattttgctggtggaaaatattttgcttctttgagattgtctcgtgggcacaaaggcatattggaggtactatgctgtactacattgttacaaactagaataggaaactaaataggaaatgagttttattgatatcagaaagattacacggagttgagctattcgatagtccaacttgctctatactctgagagactcactctgtacaattcacaaaatccagaagttcctttcctagtatttatagacaaaggctcctggctgacttgaaactaatttcaaagaaaaccccaaaactaactaacaacaggaaaagccaataataaagtagacattttactcaagtacttaagtaggtcttctcctcgaatacttcaaacgttttggaggcctaacatacatttgattttcttaaaaaaaatacttattgcaagaacatgagtagtattgtgaatttctatttatgttttcatgctccttttatttcccaagatgtacgttcactttaaaatttcaataattacgctaagtttgttgcgatgattctaaactgcatatatcttttgtaggccactgttttcacatcatatgctctgaggaatgatacagatgttcccctttatatctttccaccaaataggaagcccctggctaggtattttgttgttccataacaatacattttctttttcaagattactaaaggaaaaaacattaaaatcaaactctttaagcattgatatctgctcatgctctttaaacttaatactcattaaattaaccagggatgaagtggagaatttcggttctgactccttttcagagttcggattacttctacatccaaagtcaaccagatcttggttcttgaagtaagatgtgtaattttcaatagtcatatccttgtttgaggtccatatcttttttataataactagaggttgtgaacctaatagggtacttagttaatactagctagaggttgtggtacttgtattagtttttacagctcttaaatattttctttacatttccttcacttagatcttccttatttccatgttataactgaataggcatcttcatgtgccttatgtttgcagacctaacaaggtttacctcaaactcttaaaagataatgcatctgaggcacatctagatttggatgccttgtcaggccttacagagataagcttagaaatggaggaaagcgatggtgtaaaatttattacaaagcttggggtttctgtgggcccacttcatagtaaaagcagttgtaccatctcaacttagtaactatagtcccaagactatgtgggtagtaaatgaatactgtaagaaagtatctgtgttcgtcaatgctatttacaggtagcttttgcatttatagttctagaagttctttttatattacatatttataaatatgttgtgtaattc

SEQ ID NO: 379431 - DNA, 9313 bp, Cannabis indica
ttttttcttctttcttttctcattgtttcttaattatttcactcctaaattaagttaacaaacacaaccttcattcaattataccctttctttctttctatttacacacacatttcttcttctcttccctttttgatgaccaactctccctctaatatggactagaatatcatcatgaaaccctttaatgtatactgtcatattaatattgatcaacatcattaatttataacaatggcatccttgtctagccagccatcaaaaaagggtatgcgaagctcgatcggtggtggctctaactctgcagccagccgtagttctagcggccaaaccgtcaaattcgctaggcgaacatcgagcggtcggtatgttagtttgtcaagagaagaccttgacatgtctggagaaatctcgggggattacatgaactacactgtccacattcctcccactccggacaatcaacctatggactcctctgtggctgtcaaggctgaagagcaatacgtttcgaattcccttttcacgggaggattcaacagcgtcacacgagctcatctcatggacaaagtcatcgattccgacgtaactcaccctcaaatggctggtgccaaaggctctgcttgttcaatgccagcttgtgaatggaaaggtcatgaaggacgagagaggggttgatgttaccccttgtgcttgcaggtatatatttacatatatagatacaatttgttatgtatagagtttatatgtttgtgtggtttgtgtttaggttcacaatatgcagagattgttatttggatgcccagaaagaatctggtctttgtccaggttgtaaagagccatacagagtgggagattatgatgaagaccaacaagattatagcagtggagcactacagttacctgccccaaatgactcgaaaagagaacgaaataacatgactatgatgaagagaaaccaaactggagaatttgatcataacaggtggttgtttgagactcaaggtacctatggtgttggaaatgcttactggccccaagatgatatgtatggtggtgatgaagatgatggatttcgtggtggaatgatggaatccactgataagccttggaagcctttgagcagaaaaactcctatccctgcagcaatcattagtccatataggttagtataatttgtcacttaaatcaactcaaccacagcttttgttattctaatcttatttttgttgttgtctaggttgttggttgttattcgattagtggtgctatgttttttcttacattggagattagttcatccaaatgaagaggcaatatggttgtggctaatgtcagtggtgtgtgagttatggtttgctttctcttggctccttgatcagattcctaagctatgtccggttaaccgttcaaccgatctcgttgttctccatgataaattcgacatgccttctccatcaaatcccaccggccgctctgatttaccaggtgttgatctgtttgtttcaacagctgatcccgaaaaagaaccacctcttgtaactgccaacaccatcctttccattctagcggttgattatccggtggagaagctagcatgttatgtctctgatgatggcggtgctcttcttactttcgaagcaatggcagaggctgcaagctttgctgatttatgggttccattttgtcgaaagcataacatcgaacctcgaaatcctgagagctatttcactttaaaagtcgacccgacaaagaacaaaagtcgaatcgattttgttaaagataggaggaagatcaaaagagagtatgatgagtttaaggtaaggataaatgggcttccagattcaattagaagaaggtcagatgcattcaatgcaagggaagatatgaaaatgttgaaacatatgaaggagagtggtgctgatcctttggatgcaccaaaggtccccaaggcaacatggatggctgatggcactcattggcctggaacttgggctgtccctgctagtgaacatgccaaaggtgaccatgcaggaattcttcaggtaataaacttgtctaaaaaaacttgatctttactaatcccaaatcctaattatgcttccaaaaccatatccaattgtctaaacaggtaatgttgaagcctcctagtagtgactcattaatgggtggcacagatgataagatcatagatttcactgatgttgacataaggctgccaatgtttgtgtatgtatctcgtgaaaaaagaccaggttacgatcacaacaagaaagctggtgccatgaatgcattggttcgagcttcagcgattttgtctaatggccctttcattctaaaccttgattgcgatcactatatcttcaactgcaaagccattcgtgaaggaatgtgcttcatgatggaccgaggcggtgagaacctctgctatattcagttccctcaaagatttgagggcattgatccttctgatcgttatgccaatcacaatacagtcttctttgatggaaacatgcgcgcccttgatggagttcaggtactaaaacattagtctttcacccatcaaactcatttgtaaaacttaaacataacaatcatctccattgatgactttacagggaccagtttatgtagggactggatgtatgttcaggcgattcgctctatatggcttcgacccaccacaagtagataggatccaaaagctcgagtccccagaaactcatccattaacacctagcgactttgatcccgaacttgatgtgaacctactacctaaacgttttggaaactccacattgttggctgaatccatacctatagctgagttccaagggcgccctcttgccgatcaccctgcagtcaggtatggacggccaccgggcgcccttagagttcctcgtgacccacttgatgccactactgttgctgaagcagtctcagtcatttcatgttggtatgttaaagttcgagttttttagtgctaaactctctcaactatcaaaaactcgttaatgttttccttccccatttgaatttttcacaatttactgttatgaaaacattctctctcagacattttatcgaacaggtatgaagacaagactgaatggggagatcgagtgggttggatctacggttcagtaaccgaagatgttgtcaccggttaccgaatgcacaaccgcggttggcactcgatatactgcatcaccaagcgcgatgctttccgtggttcagctccgattaacctcacggaccgacttcaccaagtgttgcgttgggccacaggttcagtcgaaatctttttctcgagaaacaacgctttcttagcaaccaaacgcctcaaattccttcaacgcttagcttacctaaacgtaggaatatacccattcacctcagttttcctcatcgtttactgctttctcccagcactttcactcttatcaggacatttcatagtccaaaccctaaacgtcgccttcttagtctaccttctcatcatcacactatgcctaatcggactagcaatcctagaagtgaaatggtcaggagtagcattagaagaatggtggagaaacgaacaattttggttaatctcaggtacgagtgctcacttagcagcagtggttcaaggattactgaaagtaattgcaggaatcgaaatctcattcacactaacctcaaaatcagcgggagaagacatagacgacatctacgccgatttgtatctagtgaaatggacttcgttgatgattccaccgatcgtgatagcaatgattaacattattgcaatagttgttgctttttcaagaacaatttacagtactgttccgaaatggagtaaattcatcggaggagccttctttagtttttgggtattggctcatttatacccatttgcgaaagggttgatgggaagaagaagaaagacgcctacgattgtgtttgtatggtctggactcatcgccattactctgtctttgctttgggtcgccatagctccacccagtgggagtagtccagaagctaccaccggaggaggagggtttcagttcccttaaatatgccaaaaaaaagaaaaaaagaagaattaaattttatttggttttttttttgtttattttatttttttttttttttaatatgcataattgttgattaaattgtataatttagggggggaataatatgagattctttgtaaaattcaatcaattattgttgttaacacactatgaggaggagaatggagggagagagagattgaagttggggtggtaaaatgaattttgacatggtaatacaaaattgatatgaattttagatgttagagttggaaaaattatatgtcaggtcgaaaatgagttaacacgactcgataaaataaaaaattattaataataataaaattatgtaagaatatatatttaatgatttaatattacatcaaatatgatatgaatacaatgcgaataagctgaaattttaaaacatataaaattaaatacttaattgtatcaatagcaatattcacgtgaattgttagcatattacccactagagattgatgctatcatacatcatattcaaagatatggttaaaaaaaagcatatttactgaaaaatttctttatcttttgattttttatacttattactattatcaattttatttatgtcaaaatctctttatatttacttttttttttgcaaatttgaagtaccagctgaatatcaccgttaaataccaactagaatattattatattagcttcaaaattagtgatcattcatcattagtattaaacaatgatatctcaaatttgtaaaaaaaaaaaaacaataatagacttccataaaatagttaagtgtataaaaattaaaatataaaagaattttaccgccaattactctaaaaaaaaataaaaataaataaataaaacacacacagttgtgaaacaaattgcagattttattgaacaactaaacaacctaaatttaatcagagagttgtcattagttaaaagaacactaccttattttacaggcaaatcaagaaatacactaaaaaagttaaaaaagaattagtagctagctttgtggaaataacttgaaaagaagcccagaagaaaaaatcttccatatccaactagctagaactcaccatgcaaactttcacatctgccttcccttctttcgttagcaagcatccattcaaacatgttttcctcctgcaatttacaaaatataagatatcaacactcactctacacattaaacaagaaactaatatccctttatacaacatatacacatatatgtatgtgtaatagggagagaacaaatcatagaacacaaaagataaaaacccaggaaggatttacatgtgaaactgtctgaatccatctgaaaacaacttaaaacgcacggaagccttcccaagtgccaaattttgagaccaaaatccatggtctatagtctactgcaaacctcccttggttctctgcagaaacaagagtttacttaccaattgttcttacatactgagaaaatgccttttcaacatgtatcaaagacaaggctaaccatctctcgtagagagcttggaccatgaaaacacactcatatctagtcatctagcggtattaaactataatgtgcgagaaacgtgtatatctttgcagacttacattccctataccactcatgagtgaaggaacaatttaatccaaagactattgtaaaaaggacatttgacttcagataataaaatataataaagcaaacaaaaagtacgagtatagcattgttgcacctttaaagaccatctttcatgctaatcttaatgttttgcactttaattgacaactgtagcttatgatcctcaatatctttcaaaactgaaagcaggttagctcgataaacctcacacttcttgtttgcgttctctaactcatttgtaagttctcgaattcgcttgtccatatcatcctgcatagtagttcataccaaatgtaaagtattttaaggtgcaagactttacaaattgaaatggtataaacactatatggaaacttcaatgatttgggatatcattcatacctctgacatatgttggcctgagctcacttccttatttccactagtatgatttacacgactggcatctacagttgaattccctctaaaacgtccattcaacatcgcagatttgctggaattctttattgcatgatcaaccttttctgcagctttttgcagagcaatcaaggcagcttcatatgtttcagaggtcttcgccccttcatctacaaatttaaaggcctcgtggcgtagagtattatatcgaacagtgtgagactccagataattggtatatacatcactacaatgttcttctaatataacactgcttttggcattccttgtccatcgtttcaatatgtaatgtgctggaagagttagcacattggtgactctaaaaactgccaaaatatgtctgcaaagaagacctgaaaactcgaacatctggcaactacaacttgctttcatttccaaaacattgaacttaacataataagctttatgatcctccccatattttgatacttgatacgtgatgacctccccatcatcctcagccttcgatgccatgaaagttagggtcccaactagctcctcttgaaacctcgcaaacaattttctggtataaagctctgatacttgcttctccattggtgatggagtcttaaggaaaggagaagtgttcatagtatcatagtctgctttcacctccttctcattgcggctttcaagagctttctcatacagcttgaaaaactgatttagatttgtcgacgcatttatgtatccatcaaaatatgagttcatactatcacttctctgcgttatggacatttctgcaaaaaaggtgtcccgcaaatacactggaacccactgcctgcgggcagaatatattgtttgaagccaatcatgatccctgagttcgtatctatcgacaagagacaaccagcaagactcaaattcctcaattgactcagtcaagttgacacatttgtgaaaatctgcttcaaaagttggatgttcaagaaacacgtgagataacttctcttgacatttcttgaatatgtgccatttacagaaacgatgacgggtctccgggaaaacttgcattatggcagctcgtattactgcatcatgatccgtggtgattgacaatggagggcgaccagacattgccgtaagccaagtcttaaacagccatacgaacgatgattcagattcatttatcaagaaagcacaaccaaacaacacaggctgcccatgatgatttactcctgtgaagggtgcaaatggcaatcgatacctgtttgacctataggttgtatcaaaagtaactgtatctccaaaataattataattcgtccttgcctttggatcagcccaaaacacattacctgatgactgatcctcttcaccctgtacggcaaaaaagaaattagagttttcagcctgcatctgcctcaaataatccaagagcaattgaatatccccttctaagctcctctggcgattattcctcatgtaattcctacaatccacctctgtaaatccaaccttacttattccaccatattcttttataagagctgacataattctacgaggacccatcccagctgcctgcaaggtatcaatcaaagtcttagcagggccagagatttgacgatgcgaacggagacaatgcacttgatcaggcggaaccagctcatgattatgttctctaacaaaaccagacacaacccatttccccgaattctgcatcttcacagacaatgaagctttgcatccaactctggtgatagttcgcggccgcttgatttccctatcttttgtacgtttctcatttaaatttctaaaaccttctttggcacaaacaaattgcctctgaataatcgccccatcacgcctagaccggcgagacgagctaacacgggtactaaatccaactctgcgagcataagagttataaaaagccttggcagcctcttcagactcaaattccatcccctcagaaggttcaagatccaataaatctccctcaggaaggtaaatctcaccacttccaccaaaaccaccaccactattaaaaggagggctatcaaccatctcctcatcatcaacatggtgttcaatatccaatccatcatcatctccttctcttccactacctccttcccctgctcccaacccaatatcaaattcaatcacttcattgtccatgtcaaatagagttcagttcctcaataccaaatcagtactcaaaataacccaattacgtgaattttacttctctctgtatacgcaaacatatataataaattaccatacttgtgttcagactaaattccacaaaaaagcttaaaaagttgtaaagaaagaactaaccttcaacgttgcagactcatagtcatcccaacgacaacgatacctctgaaacatcctcatcgtaaaaaatcaaaagtcccttgctttcttgcagaaatgggacgtttggggttctagggttttgcagaagagaaatgacagcgaaaaaaacctagaaaatctaaattcttgaggaatttccgacaatgaatttgagaaacaattgaatcgaaagagaaaaatgattctattttaagctgccttcgtcaatctcgaggaaagccttcacacaagcctttgacgatgccgaccacgaacagagccttcaaacccaaccgtccgtcgaagatgccgatgctcccaaaaacgtgcttaagttggtactgtctgtctgtgctccgatttagggaagaaaaagagagggaagaaagagaaaggatggatttgcaaatttagggttttgttgtgtgttcatattttagttttggctaattattaattattcactcgaactttaacatgtcccaaattatgcctctgaatttttttgacagttaaaaattcagctgaactattgagattgttagatttaaccgccaaaaaagttcaatgacacgatttagtacatgtcaaaccataaatttaaaaagggttatttgcggcaaaaccccctaaagtagggaggtttttgcaactaatccccaattctaaaatttttgcggtaaaaatccctaaactcgagttctgttagcagttagccctttccgtccatttttggctgttaaatgccatggtggaatgttcacgtgtacacagtgtacacgtggcacaattttattggtctacgtaaataaatatttaaaaa

SEQ ID NO: 379432 - DNA, 1177 bp, Cannabis indica
tgatgatggtgatgatgatcaagttaaacttaactattttagtaaataaatatttataattgaccaaaaaaagggattgaaactcatgaaaatcccttaccaagcttctgaattgcagagtacattttccgcctggaaccaacggcgttgattcccatatccttaagatcctccaaagtcaacatgggcaaaacgtcgtcgtctacctcgtgtatctcgaacaccggagcatacctactcaaacccaactctatcaaccaagacctcactccaccacaactagcctccggcaaactatcattccacgtatccacgcccgcgttatccaacgactgaactgggctctgctccctcattggactatccaattcaggatcgaaatccctaaacccttcttccgccaattcttccctactatctgccccatcgtccagttgcttagaattcgaattcgaaacccaattcgatcggacccttttaccgccgttgctcgcttcgacttcactcttcggatccccaattcgaaattaagagcgtctccgttctgattcctatcttccgcctccgcaatttcttgggaatcaccgccgttgacgaggtttgttaaagaccgggcctttacggacttagacgtagccgcaacagcggaagagtctctggagaacctccatgggtgcttggccctccgaacgtgagagtcgtaggagagtgtggcagctggttggtcgccaatctcacccaatcggacactggggcggcgttgtcgtttaggggccaaagatggccctgggttgtcgaaggaggatggaggtgccgtgagctgtgggggtggtgtagcggtggtgggtggtggaattgtggcggttgaggcggcggtgattgggggttggaatgggttgaagtcatcggccataagagagtagagtggagtggagagagagtggcgcaggataaggagagtgagatggagtgatctggtgcttcttcatccttatcctttatcccatctatgccgtttgatcaactttaatcttttttattttctaaactgcgccgcacgtgcaatatgttctttcgggtttttgccttaaggttttttttttttttggaaagaattacatttgtatggttaaataacttttttttttttttgataaatactactttgaactttgag

SEQ ID NO: 379433 - DNA, 2518 bp, Cannabis indica
attttttttttttttcaacactttgaaaaggcctgcaccgaaggaaaaccccaaggttgtgcctgggatgaagagcaagaaggcccatgatccacaaaaactttgttttgatccccgaaacggaagggttcgcaaaggggtagatttcccataggaaaaactaaccctaggaccgtggagatcgaagaagcgtattcgtgcatcaagagccaggaaaacagaaggggtatgccaggaaagatcaccctgtcgatttacgacacaagctcaattccaaacatggagacctaagggcacgccttgaccaagaaaaaaagttgtgccagtctctaagggtatcttaaatgaaggagtcctggccaaacttgctatactttgaaaggacatagcaaggatctccctttggtagaaatgagatgactcagaatcatactgtgaggatcaggagccctatgcaagaaacatactagatgccaaactcccaaaaaaatttaaatgcctgaaatggctatgtacacgggtgacacgaatccaagtgatcacctgtctagattcagcaaagtcatgacagtcatgagggtcagcaatgatgccaaatgcctatgtttcccactgacattgggaggatctacagaagaatggttcaaaaagttccaggatctgtagattgttggaataaattgcaaattaattttaaaaaataatttgttgcaacgagaaagataaaccttgagttagtgccttgactaaaattaaccaactgccaatgtaatcttgaagagcttcatcaagaggtttaaataggaggcttccaagactaaaaaagtagatgacggataacaattagctctactgcaagttggaatccgaacggaaactctgttatagaataaattcaataggaaggtgcagctagccttcaagatttccagaatagagcccaaaagtatattaacttggaagaagcacaaataatgactttcaggggatactatcctaccagatgccctaggtatgttttcagagtgcaattcccaagtatcacgtttcctactgctccccaaacgagtggcatgcctagtgtgtgcaatttcaagcaacacttgagtactcactaaattctatcatggcacctatccattttgattatgggctgccaaaaagtgaccctactcatgcagatgcacacaatatcctcctcaatccgcttcacttgtagtgagtgcaactgcagctcccaaagcttctcagagtaagtggtcatccaaaatgatttttttatatatatttttatggtagtaaaaataatccttgttaatatgtggaaataatacatcatataagatacatgtgttactcctctcattgacaattattatataaaacatcatgcaccttacataaccacaaacttctaaattctaacatgacatcaaagcaattaaaagtttttatctctccctttgacctctattttggatctttcgaccaccatgtgctagttttctagtgctagccctttgacttgttaaaaaaaatccacaaattatttccctaattgaccttatgagattctttcaaatgttacattcggctatatagtctcttaatgatagtttacccatatttttaagcccaacataaagatagtatattaattaaaatatataatctctcattattaatttaatgtgtaaaaagattataccatatataagatgcatgctactctaaattatttgtatcttcatcccaaaattctaacatatgatttaaaaaatttaaaattaaaattttaccaaatgcaccttaattcatcatgttaaaattaattctaactaaaattaatatatatatatgtgaagatttttttaattaaattttttgccatattttaacaaaagacagcaagtgataataatgtaaaacatccaataatattatcatacgatttcgcttatacttttaagatttaaaaattgttgtatatgtttaagatttttgagttcttctgtaaatttgatttactttaatagaatatttttacacaaaaaaatatatatatgattgcggttgtttaatttttctcgctcatatgttgcataacaaaatcacataagaaaaggttattaatatattagggaaatttaaatttgtatgcttaataaataataaaatttgaatcctaatacaatactaaacataatttgtaaagtgggatacattttccctaaatcccaattttacccctctcatttcaaaattctctctctctcttcgtcccctattctctcaaaccgaaccctctccaactcgcaaccctaaccccttcctcaaccgacggtgacggcgcagccccttccttgaccgacggtgacggcgcagcagaggaccgacggtgacggcgcagcagaggaccgacggtgacggcgcagcaaaaaaatggccaaggtgtgatttttttgtttttttaagaaagtgtttttaagatttattaagtgtgtgattttgtttggaa

SEQ ID NO: 379434 - DNA, 2791 bp, Cannabis indica
caagcgcaagttggttcttcggtaaaatgtttgattgaattcatagtgagggtctgagagatgtttgtttagaaacttggaatgttggctgtggatttatttatttattggtatttgattgattagatatgtgaccctcctgttagcgtgttcaaaggataccgtttgtcaaatgatactgaagagtatctcacttcgcggggactgaaggatgccctctacactatcagagctgacgacatgaaagatggcatttttggcacacttgtgcaatgtccattgcaggtaagatgagttgtcaattgtgttgttgtctgggttgagaattgtgatttgttttaggagaaattctcttctaattcaacctatggagtaaacagtagaggatatcatgtttctttagttaaaatctctccaattatctatatgaatttgatgatgtactgaggattttgggcaacaatttgagctagtagttttaattgccaaggttgttaatgctttttttattggctattatcaatgcaacgatttgttgtcttggcttttgtaggtctttttactattaattgtggaaatatgagctgagaaactatttggaatgtttcctattttccttgatccttgtgattgctggggtttttttacttgtttttaaatgtatgttttctgattataatttcgatgggataaagctgtgtgtggaaataaatttgatttattattccctaaaatttcagattccaactccttcattaggggaaacatctaccaaggatacatccaaaaagagatcacagctagtggaagggtcagaagatctggtaagttgggaagcatgaatgctatgaaaatatctggactcaagaaagtaaaacaaacaaatggtctttttgtaaagtttgttggtatatactttgtactagtcaagagaaccctgttttattttgtcaattgaattttatattaagataaatgtatcagcgttgtaatctatgcattttccttgtcatgtctgttttgtagattctgtataccagtgtcaaaatgttaatccattgaagtcgtgcatagtttgtacttattgctagaatatatttgtgtgcacataggaggtcatggctatattacatttcacattttattttatcaaatgtattgtgcatatgtttcccctgtcacgcttaaatctttatatttggctgctctgaagtagtgaattctgactgtttttcaggaaacaatgggttctacgtcaattgatccttcaagaaagcatcccaaattagatcattctaatgtggggaaattatcaacagtgaactgtgtaagttagattatattaatgcctgatgaaatgatgatagcagggatacatgaccttgtattgcaatctaaagtttgaaacaaaaaactgtgaccctttgttttgggtaaaataaccattgaattgtatctgcctcaacagcagctggtttttccggacaaagatggtgtattgagacgcatctttatttatttattttcgttatgatttctggatggcctgtacaattataaaaacctgaatcctgcgatatattacacatgtagcggtcatgtattcttaagtttgatggtgcatcaaaaggaaatcctggaagagctggtgcgggggctgtgctactatctgatgatggaagtttggtgagctttccttttactctatatggtttgtataccttttattttcttctcttatctaacctttgtcttttcttgaaaaataaaaataaaaaacctttgtctcttcttagatttgtaagttgcgggaaggccttggtatagctaccaataatgtggctgagtatcgagctgttctattaggattgagatatgctgttaagaaaggttttaataggatatctgtccaaggagactccaagcttgtttgtatgcaggtttgctatcttctttatcacttaattttgttttgcctaatatgatattggaatcaacagcggctagattaattagcagcattattatttgtaagtaactttattgtagtttcttcatggtttcttttcacctttatttggaggatatgtatgcgtactttgtaccatttttctggtacagaagttgtacatgccctctagttaatgcaatgaactagtacattacattccattcaaaaaaaaaaaaaaaaaaactaagtacattacattaactaatttatctttttccttattaagtataaggaataaaattcagctttcttcccatcattgttgagatcaaaccttatgttgtagcaactgcaagagggatatctattctttggtatattagctcagaagaaacttgagattaagttaaaaactattttctgcaacaggttcaaggtttatggaaggcaaaaaatgagaacatgtcaatcttgtgtgatgaggtgaagaaactgaaggatcgatttgattctttccagatcgaacatgttttgagggtgagcaaagttgattctgcttaggttttgtacttccctaagctgtctttcactatgtgttatggtttctgataatacttttttatctgtacaacaatttattacaccgaacattcctgttacaatttatcatctaatctttgttaaaacatctttgaactaggagtaaaggtcattattctcataaattgattttttcaaacctcacaccactaaggtggcgtttggttggaggtagtgaaatggaatggaaaggaaagaaaacaattttttttccattcctttatttggttgcatattaaa

SEQ ID NO: 379435 - DNA, 3838 bp, Cannabis indica
tgattatgaactgctattttatcttcaatatatcgcgatatatgtcgtgtagacagctggtgcataaataacagttgggcttttattttcttctttttgttttttctttttcagtttttttttttttttgtaaaaggatttttcttttcattttttcgatcagtaatattatggcaggatggttagttgtagggccataaaagtgattacacttattatatatatatatattattttttaaacaaattatataaaattaatataaaaataataattaaataacatcaaaataacaaaataacatcaaaataacaaaaaaaatatatatatataataaaaatcaataataaattaataaaaatacaacataaaaaaattcgtaaaaatatttaaattctgtaaaactgtattttataatttttttattatttttgtgtatttgtgaaataatctttatagatttttttttgttgaatctttattaccactatttaaaattattattttactcttattttatatttttttattaaagtaaaaataattttatcaatttactacttattgcaatatttttttttaaaagaagaattaaatcaatatttattctaacaaacaaactaaatataataattaatttctattaacattatattatattatcattacaattaccatttgattctttaattactcacttatctctctcgctttgtcggtacatgatctatacttttttttggctacctattatttcattttactctctcaccttttcatttttcattcatccattctctctgacttaattatccttaatataaatatgaaaaaaaaatactaatatggctttgttgttttactaactattaatttagagaagaaaaaaaataattagtggaaattcttctcaagaaatttgcagttgttttccatgactatgaacataagcatgtgtgagtgtgacccataaaaaagatgtccaattgttatgaaattttatttgtgtaacaaccaccactaactctcttttttatttaatttaagatgttgagctttttgggtatttagaaaatgaccaaaacctacacaagattgcatagacacagtgaatattgttttcttgcttgattataaatacaagaaagaaagaaaattgcacatgattgaaaaagaaaagagtagttaaacatatagaatacaacttttatttatttattatatttaagtagttttacacttaatattatattattctaaggctagctcttttgtgtttcggcattattataatctttacttttatacaagtttgaggatgacagaagaaaatttggaattgtttacacattaagggtcctcaaaggcaatgcttccaagcaagactgtcttaacaaagttggagtatttataaagtaaattaaagaaggatcctaatgggctttactttaaattaagattattataattataagattaaactgatcagatgtcaaaagtgtgtggacggtggacctacttagctctattaatggtcaatataattaatatttactaataagaacttgagaagaaaccatatactagatggtattcttaatagcatttttatatttaatttttaaaacttgaaatcctttctgtagtagaaagtgaaatttgtagcaattgggtcaggccactcgatcaaaattctagttatatagtataatatttataatgtaattgtttattaagaattttggaaactaattataaaataaataagcttaagaaagaaataaatttaagaaggagatactaagatttttacatggtttgggtattaatgaatcttagtctacaagtcaatattattaagctagaaaagtgttgaagtattttcatacaagagtgttcttgctaaatttaagaaccctaattcttagcccttaatttgagaaataattttccaactatttacatgaagggataatgttctatttataggctacagtcgagtatggttgaactcaaacctggtagggtttaaaagtgtcaactaggcccactaatagggtaaaatacaatatctattgactttgagttggttaggtaaggcccagtttacgagataatagtcgtccgtactgtgggtactgtttggtggtggtaggtgtcgtgcgcaaccaagctagtactgagaatatcagagaatatgatgttagaccaaaatgtgttatccttttggtgatacacgcactcctcatgcctgacgtaaggaacaaacctctgacttggtggaccttgtgtctggagaatgtcacgtaggatggtatcttaatgcttccagatgcctctttagttgcaattccagattaccccctgagggtatccaaatacgtccggatggacccttcatgttctgggcaggatagtctttcccggaccaaagtggtctagccttgtcaggccttatcgtgcctgtcaattggattttcgtatggacctggagtggtatccaacctccattgtgggctgatttattaacttgattaggctcagggatgggcccgtcttggctaatgttaggccttggaagtacacatgtcattaatctaaaaatgtagatatttacccccaagccttcggggctcaagtgtcgtggaggcttgcagcctacttctgaattcatccttgaatgcgaaatcttgaacagaggtgaacttttggaattccaaggccaaaactggcagatgctcgtgatcctttcatcttcctagaaaggacacatgtgtcataaaacccttgctttgtgcatattaagcacctcgagaaagcacgtaaatcctggggaaacgagacgacggctagtttatgttagtgagatttttgaggcgaatgtcatcattaaatgacctcaatctcatacacaacattaaatgggaacctttcgtattcccaaactattagatctctttgtgtttcttgcgatttgatctgggtcgttggattgaaaacacgcagatcgccaattcatgtataaatagggtgaagatcaaatggttatcattttttccattttgaccctttgggcttgaatttcccgagagagaaaattgttcaaaagaaaacccctaaaaattttccagtgaatgtcctacattgcaacttagattctccaccttcttctctgagtacgatcgaggctacatccagacgcacccctaaccctcgtcatttatcctctagagccatcaaggccatcgaatttccaggcagaatacaacgaactattaaggtgtgtcttagaattccaggagaggcttagaattcttaatcaaatacccccaactgtaattttcatacgtaagtatccctaactttaagtttgcgatttaatagtttttaaggtcactacattctgagtgaaaatggtaggaggctagccatgcgttttagggttttgctagatttcagtcacgtgcttcgccgtgtagggcaacgtttaggacatttgcttgtcagtgaagcttttaggttgatcatagtaaacacatttagtaacttagctctcttgtagaagtatataggctttgtggacactgtattttcttgcttgatgttgttgatgagtttgtaaattcggcaaaacgtatagcaaaattatcgtgacaaatacctctgtctaggacccttatggttccagatgagccattatgcgagcctttatttcatattcttgagttaccaatctcctcatcctcaagtaaagttccttagagaacatgcttctggatgctgggtacgatacgtgtaataccccaataagcctaatggtaagtaattaggatttata

SEQ ID NO: 379436 - DNA, 1838 bp, Cannabis indica
tataaatacaattgtaaaagaaaaaagtaagagatagcattttattaattacctaggaacacagctcaggtggatattgactggttgcatatatagcatattgtgataaaaattaggtggttgttgtggtagggtaggcctgatttgggtgctgttagctaggttgtaaagtgttcttaaaagtaatacaaacatacttacatttaccaaaatgaaaaaaagttgtaattactagaaataatataaatgaaacgaattacaaaacattacaacgaaatggtaaatttaaaaagtaagaaaagagttagtgattcgagagacaaacataattagtttataataaaatcttgaatatataaattagtaaattccatgttcaagtaatcatatatcattatatccctattaaggcctcacaataaaaaatatatatccctaatttcctattaaggaaaaaaaaataataagaaatgtgtacatatatagtttttctcatctcggaccccactaatcaaaaactaattaaactttaacctaattaacttatgaataattcaagatacgtacacatttgtataaaatactagttagatttttaaataagtagacggtcaattttaattatgagaattgttaaaaggtaccacttagcattcttcttggtgtaatagtgttatttgtataattaaatagtggattttatataacctaaaaaaatagggaacttcctaaccaattttagggtgtcacacttagataatgttataggcactagtaatatccaataccaatactctataattatatctgtagtttttttttaatggattatacatagtagttgagattaattgcttgtatagaaaaaatgtataatttgagtgtattaattatattatccttaattaacttttgctttttcattttctttttaagaatttaaaaattagcgtagtgaaaaaaagaaatgtgaatttatatatattgatagagatatgttagaagatattttattgtgatcatatatattattattgatataattaaatatccaattatatataacttaaaataataaatttaaaaaaaaaaatcactaattaattataaaatatcatctatatataaatagtactaattagaaccatcaatatctaataacaatgctccatagagatatgatacaacaagaaaagtaaaactcacatatatagataggtattaattatacaatgttcattattcaatctttttcccgaacaatttaagtaattattgctataattaatttgataataaataataatcttagtttattagctggccaccaccgattataagatacatatatatcatatatatatatatggtatatctcattgtcaatgtttcgatatatataatggagttttccctaagaataattataattacattgtatatacatataggagctcaacctctccatccaaaaacacccatttgcagtaaaattcaaatttgatattaattaagatcaatctcagtgtcatcatctagcttaagaaactctccaacccaaataataataatcaaaaaattataaaattagccaactccagcaatcggaatccaacttcatatccaattcacatatttattttaaatagtatacatttatttttaatgggtattattcatcaatgagtattattgaaaaaatttgaatttctttgcgtaattttgttatctaattgaaaaaaaaaatcatgtttgtattatatgatgaagtgtgttagtcaaagaaaaaaaaaaaaaaaacgtagtttcatgtaatacccggaattaagaaatggatt

SEQ ID NO: 379437 - DNA, 2669 bp, Cannabis indica
attattgaatcaaagagagtaaaaaagagagagagactcacctagaacattctttgtataagaactctcataaataacaaagactcgtgtactacgactcattaatgcctgaaccacgtaaaaaccacctgcattaatgctttcatagctctccttattatatcatttgattggttgccaaaaatcccggtcaacaatcataatcaaagttgtatcgagctacaacacaataatgggaagaggatggttgtatcgaatgcagggtgtagcatccagtcttcttcagatcttaagatgcccatctcccaatgggactcacatagtcgacattaaaggatgtcaaaaataggctaagaaatattgtactctgatgaggaaggtcaatgcagtgataaaagagatcgctggagaagaagagaaatatcaattagaaggctctcgcaacatacctaaagcacttggaaggtgaaaaagagaaaagtgtgagagataaaggcagatgagcttatctgttcttttagagttcgagatacaaggggtaccaagagaaatgaaccaaagggcatataagctcacgaaaagagcttcactcaaatacactagcaggaattcatttgaaggtctcaagtgacctcgggaagcagttgcaaccttatcaagcccttcagatagaagagtcgaaaccatgctagatggatccaatgtttacttatgtcgataaaggagaaatctcagaggataaagaagaggaaaacacttgaagataaagtaacaagatatgtcatcctggcaggaaaattatattataaatcctttaatggcccatacttgcgatgcttaaggccagaataagcttagtgattgtttattgatatccatgaaggaatgtgtggtaattatttagagaaagaagcctgactcataaggcattgacaacatggtattgtgggccatacatgatggtggatgccacattttatacaaaaagatgtgacatatgccaatgccatgctccagccatccatagaccaacacaagtgttaaatagtgtggtagctccatggccttttgcaaaatggggaatggatgtagttggagagctacctcgagttgtagatgtaaaaagatatgtgctcctagcaagtgactatttcactaaataggtggtaatagaagtatatgttatagtctcgaaggtagaaaccctagcctttatttggaaacacataatttatgaattcagaattccacatgaatttgtaacaaatagtggctttcccttttgaaataaaaaaattaaagagctttttgacaccctgaatattaaactaagcttctctcttgtcacatattcacaagggaataggcaggtcgagacaactaataagactattttcaataacatatagaaagacttggaggacaataaggcaaaatggttagaagatcttccaaagggtttgcgttcatacagaactacaaaatgaactcagacaagagaaacatcgtttactatggtatatgggatggaagctataattccaacagagataggcgtaccgaccctgtgaagtgaaatttcagaagacgaatattaaaatcatgttcatatttctcataatcttgatttgctagaggaagtatgaaaaatcacacaactaagacaagtcaagtacttaagagcgatagagaagccttaccgagcttgagtcaacctaagaacctcttgagttggtgaatgtgttaaaaagcaaccaaagaccccaagaagctcgagtcactctgagatggaccttatcaaatccatgaagtcttaagaagagaaggatatactctaaaataagtcaacaatggaagggtggtaccaaatacttaaatctcaatgtctttagaaaaatattatttatgataaattgtatgaatttcaggaaaatactattttatgattaatcttgtaccatgtaaagttgttgatttcaaaaataaacaaaatacatgagggattttaatgaaaccatgtacagaacaaattatccattgatctgtagagaaaaaaaatcaaacacgaagatttaacaagacaaggagagaaaacactataacaatttatacctagaaaaagaaaagaaaatgggagaacagatatatgatatgaaaaaagaaattagaaaaagaagatgagacggtaactcaacaattggtggcaaaaatctcatatatctattctatataaaatgtggctatgtaacagaattttttgtttaacggtggttttaggttctctacgttaactttaacagaatatctcaattacttaacataatattctttattaattttataatattattatatatatttaaaaataaaaattatgcaatatataaagaaattaattttattatatatatttaatcataaaaactatatctatatataaaatatatatatttaaactttaaattcacgacaaattttttattttaaaaatgattaatgatattgttaaaaaaaaaataattaatgatatatatatatgtttttaataatttgtacactttattataaccacactctcctaactataaattataagaatgtatctatcactatcatttattttttttttaaaatatatgcttggatacataatatataaaatgtatttt

SEQ ID NO: 379438 - DNA, 3499 bp, Cannabis indica
tagaggaagtataggtaaaagcacaaccataccaaggagttaacttgattcaattagaagtggcttagcagcagtatggactgtaaagggattaaaatctgatataaagaagaaaagaaaggataacaattttaattaatgatagattcagtataggctaaaacttagaagttagatttgaaataactgaaaagcaccttgtggttcaacctgcaaccaatcttgggtgcaaatcaaggcctcacaagtatctggactcaacgaacttcgagattgatggagcaatctgctactagtgctgaatgctaattcggaagcaattgttgacattggagttccaagaacatcgcgagccatcatggataaaatagggtaccttggtgtgtggaccttccaccagtttaacacattgaaatcacaattacgaggaaacactggttcctctaaatatttatccaaatcagatactgaactttgactatgagaagtttcatggaggaacttgtcaaagcccttcagtctatccctggtatcattactaatgctaggcaagctgctgcctggcaaagcagaaccttcatcaaccatggttgagcagatagaatatgcattgaaaagttccttgattccatcagacacttccttgattcgatccagagcagtactaccataaatttgggaatagtaatattccaccagcctcatcttgaaccggggatccaaaattgcagctatagccaaagccaaactacacttgctccaatatttatcaaacttggttttcattttcattgccatagaactaagaaaatcatctgaactcttgcaccattcaattaattgcatgtgtatatcacaaatttcagggaaataaatgtttgccgtaggagatttatatccagaaatgacattggtgatttcaacaaagagtttcaaataaccagtgatggaaaaggtccattcccattctgtgtcagttagagatgaattatatgcagggtcatgatcttgcaagatagaaaaggcagccctgtactctaaagctgtttcaagcatgaggtaagttgtgttccatcgaactggactatcaagaaataatctcttctgactatcgattccagctcgttgagccatctcatcaaacttttcttgcgttagttgtgaacttttaacaaacttcacacttcctcggatcttctggatcacttcttcaagtgctgcaatgcaatcttgtacaattgaattcagaacatgagcagcagagcgaatatcaaatagttgacggtccaacagtggcctgttttgagagatctggtctttgatctttacaacaatttcatcatcaatggaacagtcatcaaatgtcaaagcaaataacttactctcaatttcccagttggttagacacctaataatcacttctgagagtaagtcttctgtatgagaagaatcaagtgtcacaaaatttgtaatcttcttttgtagcttccagtcttggtcaatataatgtgcagttaaacacaaatactcaccattttcagcagaagaccacagttcgacagaaaggttaattctcccatgaaatttattgatcatttcaaacaccttctgtctttctttctcataaatttccatacaacaatgttggacatcattgtttgggacaacctcaaacagaggttgaagattcttgacaaaaacttgaaaaccaacatgatcaaccatggccattgggtatccatgatatataatcatacgtgcaagatcagatcgactacgttcctggtcaaacttgctacttttaaggttaaaaatttcatcttttttctgatcttgatcaaactttatcatggctggcttgatatagtcatcttttctctgtgtttcgtcacaactgatacttgcaaggctaatggtgctatcttttttcctccttttcgctgcaagtagttgagacacatcaaaattagatctttttaggcatctcatcaagtggtttctaagatgcgtggtaccactattactcgatccactgagcctcttgttacagtggacacaaacagcataacaaatgtcagcctttttaaccctttcaaaatgattccatactacagaggtcaacctctttggtttcttggtagcagaatcatttgatatttccatcgcataagcttgaaattaaccagatatgctctatctgcacatttgaaatgaaccaagtaagacataaaaacaaaacacgagacatgatcatataaaattaagtgaagactcttcagaacatcatactaatctcatagtcatagtgattcttcaattcaatatcttgaacagacaataatcactcacaaaaccaaaaacaccacaatcacactatacccaagtcgaccaaaaaaaaaacacacattttaaactttttggaaagccaaacaagttacaatgatcacatcacagactaaattatttaacggtatacactcttaaatcattatatgttgatcatagacaatcatgcataaaaactgaatatgtttttatctttaaaaagaatcacctgataaatcaaagtacagaaaaattctaccaaattccacaaaataaatcatgaaatttaagtaaaacgctgaaccaggaaaggaaaagggttaagaaggatattgaattgacaattaattcggaattggatcttacagtgaatgatgcaaaagcttcgaaagaaaacttcaatccgttcttgagtccgatcggatgatccgggaaggtttagggttggattttgaaccgtgtttgggttagagacgaacccgatatgggtagttgagagagatagaaatgatgggttagatccgataagcatgtatgtacccactaccaagattggttggttctaactttgggtgggtaatccgccaaaaaagcatatttagttttcggacctttctttttattttcactcatttctttccaaaaaaaagaataaccaaaaataaattacactttagcttttaataattttcttaatttggtaacttttggtttttttagaatctttgttgaaaaacaagctcctttcttatacatatacactgtacatatatttaattggtattataaaatttgaatttttatgtttaattttttatataattagaaaaaaaattatttttacattatattggctaggagtgtacattagtcggtttgatggggttatagtgtatttttatcaacccaatataaatatcgagttgcaaaaagtgtaacccgtccaatgaaaaaataaaaaaaaaatgtaactcgcccaataatttttgtcagttggatcgggctaaccacttaaaacttgattttattttttatttttttttttaatttatgggtagttttttagtattcaaataaataattttttaaaaaaaaaataatatatatatatatatatagaacacttcttaatggttaatacccattgatgggaactaaaaaaaattaataaggt

SEQ ID NO: 379439 - DNA, 1060 bp, Cannabis indica
aacaaacaatgcatgaaatttcatcaaaaaagaaaaatgggaataataatagcaatgaaaggtcatccaggaacagggaagagcactttgggtgagtccatagcttcagctctgaaacttccccttttagacaaagatgatatcagagactgtaccttctctctccaacactctctctcacctcacaccccctccgcctcttctctcctcaacgacctctcatattgtgccatctggcagatcgcctccacccagctccgcctcggcctccccggcctcgtcatcgtctctcccctctctcgcagggcccacctcgatcggctcctcgagctggcctcctctcacggggctcgggtggtgattgtcgagtgtaagcccaaggacgagctcgagtggcgccgacggctcgagcggcgcggagaagctgagtggcataagccgtccacgtggcaagaaatggaaaggctattggatgagtatgcggggtgtacggaatacgaagtgggtgaagtgcctaagatcgttgtggatacgactgcttctgttagttttgatgagttggtttccagtgtggtcgacttcatttgttctcatgctcctcctctcgatgaatattaataataataaatataataattaggataagataaactgtaaataaataaataaataaaggtaattaacttgtgggttttaacttgtaataaaaagttaataattacttttataacattttctttatgttatattttggatgtgatgtgttgtgaacgtgacattgaagtgaatcacacttaaatctgtgaattaatatgattcgcctaatctggtcacttttttttttttgaagaccacttttgtgagataactcaaaacacaagatgatagtttgttctaaaaaagagaaatttgacttttatttatagttggaatttccaatttagcaaaataatatagggtaagtgtacatccctcgattctagtatttaagaaaaaaatttagtcttattttttttttagttattatgttatagttatttaagaatatttataaattttt

SEQ ID NO: 379440 - DNA, 2903 bp, Cannabis indica
aaattattaattaggtagctaatggtgattaatttcttttagttttcttgtaaagatgagactcttatactgtttggttatatatataggcgattgggtaaacctagtttctacacccagccaaacacatttattatagtttatgttgatggattaggctgtttaacaatttacatatgagtgcttaattagttaattatcaagtcaacgtgtattattttaattttaaaaattatagtatttttaataaattatattaaactataagttaattaatgattaaagtagttacataaaactaaattaaaaagtgttcacatatggtactgatgacaattatatatctagttaaacaattatgtcattttttaatttgtcaggtgtaaaatttgacaaaaagattaatttgcaacactgtaaatagtttaaggaccactttatcagattgaaaaattcagaaaacacaaataatacataaatcataatttatttaacaagataaaaattctaaatatgcttagttaattagtcacatcaggtgaaaaaaaaactcatttatattctcaaagtggaatataaatgcaatattttcacccattgaaaaattatgattaggattaccaagtggttataattttctttttttttttttgtaaagtttagagcaattataaaatttggttttgagtcttcttttttttgaattggagtatatatttcatcgaagaatattgaattattttttggttactttaaataattgttaaaatttgtaaagaaatgatgatgagattttaaacaatatagtagatcacacaatataaataattttatagcacacattttcgtggaatcaagaagtagtgtcccatatatagtgtatcaaatcaatctaattctaatacatcaattaacttaatttatattaaatatgctaattaattttgttcactgatcagttaaatatttacccttttaataaataaaaaaattaattaattttttaaacttaaattgatttaacacatatgacacatcactttttcatcttaatcggattccacctttgtgctatggtgaccacttttcttaattatctttgtcctctctctccaattaaattgcttcctaatataaatagctaattaattaaagcctatataatagacataaaatcatgactatttgaaatccaatattactaaatcataattaatttaaagttagcaaattcctatttcttattctaaaacattaagtacgttgagtttagtcagggataatgaaaaatgaaagaaattaaattttattctattctcttatttagtttcattttaattaagtatgataatttttgatggaatgatgacatttctgttaagggaacaaaatgttgagctgtcatgttagttagttttcggttatgtttgttatatttcagttgtaactaattcagctcatccttctctttgttgatttgtatataaggcatgtaatactcttttattaagatgaataagattgctgcttctttcttcatgttctttctctcttctttctctttcattgtcgtttacatgatatcagagctttttctttggcaactatatggaggttctttcagataatggcaatggagattcgtctctaccatagctggtaaacgttaatactactctccctaaaacctcgatcccatgtaacttttagtcactctctctcagtccgtttagatgagcacaactaccttccatggaaacaccaagtgtttgtctccattaaaggaagcaagttgcacagatttcttgaaccagatcgcactcctcaatttctccctgaagaagataaagcagtcaatcgtgtaagtgcagagtacagagattgggatcagcaagacagcatcttggtctcgtggcttctgtcatcaatgtcggagaagattctaacaagaattgtagggtgtgaaacagctgctcagatctggagcactctcaaagtgtatgtcacaactctaaatcatccaaacattggccaatatcgaaccttgcttcgtaacacaaagatgcaaaactctcttggcgattttcttcccaagatcaaatggattgttgacattctttcttccattgaacaccagatgacacctgaagatcacattgaagccatcttcaatggtcttcccagtgattatgatgttttcatcacctgtgtaaacacaagattggatcgatgtctattatgtagctaaaatcgaagctctcttgttgactcaagaagttcgattggagaaaggatccaaggaattggacatcaacaaaccataagccaatctggcacacaccaaaccataccatggcagccgaggtactttttcttctccccatattccttaaaattctactaactaccctaatgtcatggccagaaatgctagtagtagttcccaacatccttccctatactctgcaaccaatgctccactaggatttggctcttatcctagttcaagtaatggtcgtgctttaacaccaggtagaggacaatctcctatcaatcgaggttgaggccaatattctgcttggggtcaaaaagtatagtgccaactatgccataaacttggccatattgtcactcaatgcttttacagaatcgataagtctttcacatgacctgctatatttcagaacttttttggcaatgcacacttagctgagatgcctccactatgctagccctgaaactgttgatgatgcatcttagtataccctgattctggagccacccaccatatcactcctcatgcccaaaacctgcattacagcaattgttataatggggatcaccaaatccacatggggacatggatcaggtttggctatcaacaatgttggtcactccttttt

SEQ ID NO: 379441 - DNA, 1480 bp, Cannabis indica
caaaaaaaaatgcttatgatatgaaatgggtcgtcatgaattccattacatttatcaatgacaagggatttgtaataccagtacccttattcaatgatatatttaattaagatcaccaccttatctgactgagtgaggggggaccattttctttcttgggacaagaaaacctattgccttaaccttttcccaaaaattaaaagggaaaatgataaaaggctctttcagcctaattaaccttgttcaatctttctcagtctcagaggcactttaaatgcacaagctgaagtgagacagaggcaaggctaacaccatttaataccccactaaatttaataggtgaggtgagacttgagagatgaggtgaagtgaggttaatttcttttgtacgagtgttttaacttccacggctttggctttggctttgaccacttggcaagctctgcagtttgcaggctggcaaaggagacaagctccatcaccaaacatttgggaattcaaggaaagtataaatatattataagaaaataaattaaaagcaaaaaaaaaaaaaagacactactagaaagaaaaagataaatatattatttttggtgttgttaaagtaaaataaataaagggtagaaaggactgtgcctatttaagtagttggaagtaaatggtggggttaatgtagagacagagtgcaagagaggagttagctaagtttctttgtgagttttgagcctttaagggatactgttgtgaacaacagcctttgtcttctttctttcttttctttaaagtttaaatctttagcaagtatgagctacttgggtgttggagttagtccagggaacgtcccagtttatcatagtacagactcaagagttatagatcgaagagtaagaataacagagttggtgttgagatgtgtcatatgtgccctaggactagttgcttgtgttcttatagcaactgatacccaagtcaaagaaatcttctcaatccagaagaaagctaaatatacagacatgaaagctcttgtgtatgacttagattcctcttcttacttaatctcatgtttcttatttttctttttcatttctatttggtgtgtactaacttttattatgttgtttctatgcagatttgtggtcatcgtcaatgctatagtttctgcctactcgttgatacaagctttgcgttgtgttgtgagcatggttaaaggaaatgttctgttcagcaaacctttagcttgggtcattttctctggtgatcaggtacataacattatatcaaattcattaccccatttgcttcaaatagctttcatgttttgtaatctctttatgtattattcctgttttctttatgcatgatcattgttgtagttgctatttattttccatttaaattaggaagaggaaattcgtggactgaaaatgaacacgtctcaatcaatagcttttcttttgcataggccacagggcatcttagg

SEQ ID NO: 379442 - DNA, 5260 bp, Cannabis indica
agtctcatatcaaaaatacatcgttaactacgcaaaatatcgcccaatatcgctaatcatcgttaaatttcatccctaacctcaaatttggtctatctttgcaaatccatcgctaaatatcgcaaaaatttggaaaactaaaagaaaaaaaaaaagcaaaacacgagaggccgtgagaagacgatgggaggggcttgcgactggggttcagggtctgtgttcgacgacaggagttctgggttggggttcaacgccgaagagttagagagagaagttttattaaaatataaggggtatttttaagagaaaacgatattaaaagtatacatatactatttctaattgggtggtatattagaacaccatgttttacatttaaacatactaagcaaaaattttcctaaaaaataatagaacacgaatattaatagtttatgtaatagaggagtaggtagacaattataattgaggtaacgggtgagctagaatagagtagtagatataggagaataggaagaatgaaagggatcatgtaagtgtgatgaattcagcagtgttgtctgtctttccatttaataattctttttccaaggtgggtggcacaccaggtccatgtaatactgtaagacataggcaacgcttgaaagcctcggcaaggagctattggagtgggctttcccccttaaaaacaatttaatatcaagtgggccacatatcaaatattaaactgatatacatcttgatttctttgttttctcacctcttgatacttgagtgtgctttagataacctaggggtttgttattcttcttccatgcaccacccatgatggaagaaaatgatgggctagttgggtttgggtgcactcatcacttagtgagtcacgatggcaatcgagattccaatggcgacaatcattgctgaattggaaaacaatgtgatggaaagaggcaaaaggcccattcctaagattgattgtcaaacaaaggaagatgatacgattacatggttggatttttaacagaggaagagggaatcatgggactagagaaatggaaagatgtgaatagaaaggtatcgattacttggtctgatctttgaaggatattttgggggacgagacaacgaaaaatgataggcaagagttgttgtagttgaaggatttgccttgccaagtgctcttgaggagttcattgtacctcgaagataaccatagcaatcctcccacctataacactagcatcatccatggaaattagagaagattccataactattggcacgatatcaaatttgcactaaagttcggtctacaatatctcaacttaatattgctttggcacttgtatttaagatgcctcttgccagtggctattcccaaagaaatgatgaccaatatagttgggtgatattcaagacttacttagtgatgatacaagccccttcttagcatacaatacaaatctcttctcaagtgtacttccaactcattctattattccttggagtttagtggtttttaagcttatccaccataaagtcacaagtcttggatatgatttggtttggtttatggttttttgctaaatcccaaccagtgtacactttggcatttgttattaatagactctattatggagttttaagacttgggctacgctaccgagtttgtggtgaatctcttggggcatccatgtgaggttaagctaaatggacaacagacaacaaagcttcaaaatttcgggggattagtaaagaaagatacaaaatgagatagaaaaacgggtgtggataaggttaggttacttcacttggtaaatgtaatttatacaatggaatcatgctagcttgaatgcaaataaagatgcggagatgatggatcatgacattgatattactatcgtgtcgtgttgtgttgaagggagtagaatttggttttctgatgagcttgttagtgcacttgagaagagattgtattgtatactaagatgggtactgacaaaggagactaagaagtactttgcttgagtgtagaggatgatgcgaaagtaggaggggtatatggaccatcatcgaaagggataagtggatgggttgaataaagtggtagatataagaggtaggaagaatgagagggatctctcttccgagttttggtcactgaactacccaaagtattgtctgtcttttcgttcaataatatacttcaacttctctatgttttcttatcgttcgtttttaagtgtatgtgctactgagtttgaatacctacattccctgtattacctatacgttaacaatatccaggatctcataaaaaatttggtttcttataaaataaacaattgttctgactacatggtgtcatggttctaaaataggtgataccatacattcagatataatcataagaaagacaaattcatatcgtacctgcaagtggtcaaaacttctttcaataatgtcaactaggcaggggaagcatgctaatagttgaggcaccattgaaggagcataacaaagtgtggcttcccataactgcacaaataagctaactatatattggtacagtagaataaaaaaataatagaagaccatggaaggataaagttaaatggtagctgacctgcatgctgtcctctagaagattaagctcatccgggttatttatatcaatccccttctgcagaatgggcagtagcatattgtaacaacaaggggactgatagcctagagcaacaacaaagttcttgagagcaactagaagttgaatctgcagaaggctctcaccagaagattcctcccaaaacttaaaaaaaatacaataaataatcagaaaagtaagagaagcttagcatgtcctgtcaaggaacaatttggatctcatttgacacaaagaatgaataaaatatcgaccataaaatcctgtaacttaaaaaccatgcacaaatagcccaactgtggtatcaacgcaagatcaactatgaatcccattatggaaaaactcaggaaaccaagcaataagagattaaacaaatattcgagtgttgaccaatgcagaataagatccttattatttaaccactattatccttaatttatattatcaactgcaaggtgttttgaacctcaagtccgtcctaaaaagattatctacagtcctcaacatctaactccacagagaaatatttgcagaacaaaatgttctgatgcaataggctctaacaatgtaatgaacttataaggaacatactagaaaaagtcacaaaagttaaactcagatgctctcaagcagccagttggatttacaatatcaagcctgacactactttaattcaagatttacaagagcatttacagaaatttgaacctcttgccacacacactcacttacaactagagttagcctcaagtggcacattttcttattaatagaaaaaacttgttatttatcaatgagaaaataaaaagtaataggctcaagttgcatataaataaggaacagttaaccctaagtccctattagggtccagtaggaattagagccatctcccattatatagtgctaaatttagcacaaaaaagtcaattactaatatattaggcacaactttcacaattgtgcttgcacatagatgtaatgaaaagaaaattacatttacatttaatgcaaataataaattagacactaaaaataataattataacggcagaaaattatataatagttaaatgtttaatgctgattcaaatttgcatcatgctaaattctgtgtcaaatttggcatgtgtagctacttttagaaatgtgctttattttaacaatgcattaattagcattgaaatgctcttagcaaagtataaacacttactagatatattgctatttgtgtttgttttatgtattgagagctttaggcttatgtaattttatgtattatgttaagctttctaatgtatgcatttgtcctgttaccattttcctgaggatttcaggcttagacatatgacctttctctcttttcaaaataataattaaaaaaaaaaaaacataactgtaaataaaaccgtagcaagttgctcattaaaaatagaaagtagatggcaaaggattttacacagcatatgtaatttgcaaaaatatatatatacatgtactagtatatgagaagtctttaatccaacatgatttgtaaagagggaagcaaggggaaagcaagaataagagtaaaacgggccgtttggtggggagagaaaagggtgtggaagggaaaagaaaagtgagatctgcaatttttactctccacaatatttcctaaaaacaaatagcatgtctaaattataacttgtagttttagtaaatattcactttccttatcaaatggcataaaacaaaataatacacaatcagcagtttattcaaaaaaaaaaaaacacaatcagcagttagaaaaaggactgctgggaaagtttaattaagcaccttttggaaaaatagcaccaatttgtttgcaaatggaataatttccttgacttgacctgtcagaatggagatcaaattcaaaacctgtacctgtaaataatgaaacaaaaatatacatcatgagatcgatctcctcattgcaaattgcagatatcttgcttttgcataatccaaatctatatcccaaaccttggagggttttggcaggaagatccagtattcaacaaaaatataatagtatcactgcagagccacagcagctatatatatacctttgaatcaaattcttggacttcctcgaccaacttgaaacatgaatcccaacacacaggaagaagatctatgaatgctccttctaaaaagttagcatcctcaatatgcagacacaacgacctacaggctgccaactgccaataaagcacaagctaagccattgaactaggtaggtaggtaatacaattttggaaaaaataaaaaatagcatgtttgagaataatgccctatgcaccatactctaacagataggtctttgtcttgtagcaatttgatcagagcatagtatactggtcttttagtatcatcttttatctgccataacacaaacaaaagaaccaattatattatagactaattttatatcaaaggtaaggcatataatacaatgggaaaaatgcctacaagtacaaaaccacaagaggtagaaaattcatcttaacatgcacctttctctctagagtaaaagaaagaaattccactaatatataaatatttatatat

SEQ ID NO: 379443 - DNA, 8222 bp, Cannabis indica
ttacattgaactaatatcattatatgtggtagttttacaattttcttaacacttatcctcctcgttgaactacctactaatcttggatacagaaactatagcaaataactcgatagttcttgagagaaattgaacttcatacctcacgaaagcaaactatgggcttttgaccgaagggttgggggttacagtatttgagtatccaataaaaatcaaatgctatttatctactagtttacacaatttgatctaccgttttgtttctatacctagttatgcaaatacatatatagatatatatatatatatatatatataatatctctgccaaatttttcctctcataaatgaaagaaactattttatctactatgttatgttgtatttcagggtttattagaaggagtaagccattcatttacaaggaacttccattttattgactcagtgaaagcctatctttcatatgctttgctgcgggcatcagtttcacagtcccctgtcatcttccaggtttacatgcaactaattgctgttaatgagtattttttttactcttttgtgagatatttttgtcctcatcatgtttttcttttctgtcagtatgcaactggaattttcttggtgcttttgttgcgtttcagagaaagtcttaaagtatgtctatgaccttgataaactagttacataaacttctttctaaaatagtaaatttttaatttgttttcctttctcatgtatacaacgactacatttgcagggtgaaattggcatcttttttcctttgattgttttacgatcattggatggcttggaatgttctgctaaccaaaaaataagtgttctacggtatatttctctctgattactatatgtcagctgttagatgttaacttttctttttctggggatgtttttctgctgatcagtattttataaggttgtttctattgtcctctgactactggtgatttttgcaggatgcttgagaaagtatgcaaggatcctcagatgcttgttgacatatttgtaaactatgattgtgatcttgagtcaccaaatttatttgaacgcacggtataactcccatatagtatttcaaaaaatttctgttcaggttttaataaaagtttttagtaatgtggctgcttaggcacacctaacgctctcacaatgcaatttattactggtgcaggttacttcgctatctaaaatatctcaagggactcaaagtacagaccctaatttaactgtgttgtcgcagacaacttcaattaaaggctcatcgcttcaggttggttcgttggtgtggattacaaaatgaaattaagggatatttaataattttttttctgcaacaacctactgtgttatttcagcagaaattgctggatgacaatttttcttccttcaccctttcagtgccttgtgagtgttctcaagtcactagttgattgggaaaatgctcgtagagaatcagaaagccagcataaaagtattcaatctcttgaacaagaagcttcaacgggagaatctgtggatgtgaaaaccagggatggtttgaccagtaactttgagaaggcaaaggcccacaaatcaacaatggaagctgtcattgctgaagtaaacgaaaattaattttaatttttctaaaaatagaaatcttaatttactgattcaatccaaacatgaataaatggaatcccttggatttcttttgtttccccccttaaaaattcaaggttcaaacaaggcttttaaatgttatactgtacttgggtttgtattgtcctgatgcccttttgggtgcaccaagcagtcagaggctcatgtatgtttctaaattgaattgcagtttaacaggaaaccagtaaagggtagtagagtatttaatatcaaataagttggtggagaatacaccttcttcagtggcccaatttttgagaagtaatccaagtttggacaaggtctgttgtacttatgttctagaatgtgtttcctttttgtcatctttgatgacagcttcttattcttattccgaaatttcaggcaatgatcggggattatctgggccagcatgaagaatttcctcttgctgtgatgcattgttatgtggattccatgcagttttcaggaatgaagtttgattctgctatccgtgaatttcttaaaggatttcgacttccaggggaagcccaaaagatagatcgtataatggagaagtttgcagagcggtaattgattcgctatgtacattactcccattagtattttgtgcacactctttgcattctcaacatccctctcgcctgaaatgtggtttaatttcattttcatgcagacatttttttatagattttttgataagtcttttcataaacatattgatgattgaagtttttttttttttttgataactatccatgattgagattaaagtggagtagacacccttagcacttaggaaaaaaaactttggttttccctgaactggtcagatacaggaaccatatccatgcaagaaatttagaaagttacctacttttacactcatcggtgatttatgatgcatttcttatctcgtgcagatattgtgccgataatccaggtcttttcaaaaatgcggataccgcatatattcttgcatatgcagttataatgttaaacactgatgcccataatccaatggtgtggcctaaaatgtccaagtctgattttgtccgtatgaatgctgcaaatgatcctgaagaatctgctcctagagatctcttagaagatatctatgattccattgttaaagaagagattaagatgaaggatgaggcatttggagttgagaaaagtggcagaaataaaccagaaggtgaagagagaggccgcttggtcagcattcttaatttgggccttcccaaaaggcagtctacaactgatactaagtctgagagtgaagctataattaagcaaacacaggcaatatttcggaatcaaggaataaaaagaggggaatttcatacttctcagcagatagaacttgtaaggcctatggttgaagctgtgggatggcctttacttgcaactttttcggttactatggaagagggtgaaaataagtctagggttgctctttgcatggagggatttaaggctggaatacatatcacgcacgtgcttggaatggacaccatgcgctatgctttcctaacatcattggtcaggtataattgttatactttttttatattaattggacctcccctccttttagcttaattaaacaattaccttaagttttcaaagggtacagaatcatcttcttaaattttagtttataagcaaatctacccatagtctaaaatagtaaaattagttaaaattaacatgcttttgtcaaaatccaaatttcaaacttaaaatttaacttgttaaatggaaataaaatttttaaagtccacaaaagaaaatgtttttttcttcttaaaaaaatttcatttatattttgttttcaagttttgataagtgtacttttgttttaatttctacttgaattagatttatttgtaaatgtgaattctaaagagagaatttgatatttttgattttgtaaggtggattgtttaatctttattataatggaggggagattgttattatctcatactattgtatgtatggtgaaaaaaatgttttttactacaaaaaattaaatattgaatttgtatctcaggttcactttcttgcatgctccaaaggaaatgcgcagtaaaaatgtagaagctttgcggacactattgggtctttgtgacacagagactgacgcccttcaggacacatggaatgcaatattggagtgtgtttctcgtcttgaattcattacatcgactcctgccattgctgcttctgttatgcatggatcgaaccaaatttcaagagatgctgtgcttcaatccctgaaagagttggctgggaaacctgctgaacaagtatttgttaatagtgttaaacttcccagtgattctgtcgttgaattcttcaatgctctttgtggtgtatcagctgaagaattaaagcaaagtcctgctcgcgtgttcagcttacagaaacttgttgagatcagctactacaatatggcacgtatacgcatggtatgtctcatatataataaaaacactcttacatgctatcagatgtggtcccttgtcttaatttactttggggatctcttaaatctattggtattgttactacaagagatataaggtagtagatgtcatatcacgtgattggttaaaacatgtatatttgtgtcaatgcatggttatgtgctgtagccaattattcttatcagctatcatagcatattttgccaaggattttcagatttttggtattagttatggtgtctgccatccacatctgttatccatcacgtattagttatttgtggcttcttggttattttcttacagaaacattttactgatttttcaggtctgggctagaatatggtctgtattggcaaatcatttcatttcagctgggagccaccccgaggagaaaattgctatgtatgccatagattctctacggcagcttggtatgaagtatttggagcgtgctgaacttgctaattttacattccaaaatgacattctcaaaccatttgttgtccttatgcgcaatagtcgaagtgaatccataaggagcctcattgttgattgcattgtccaagtatgtctatatgactaacttctactgaatcctcttttaaaagacattttttttccttgtgaacttcaactatttatatattgtttttatttgaagtttatattttctggtgactattgtagatgataaaatccaaagtggggaacattaagtctggatggcgtagtgtctttatgattttcacagctgctgcagatgatgatttggaatcaatagttgatagtgcatttgaaaatgttgaacagggtaaaactttctgtttttcattacttacaatgttttaactagatattagagtagtaattctttgcctattttattagtagtatatctaacttcggtggtatttgcagttatcttggagcactttgaccaagttgttggagactgttttatggattgcgtaaactgtcttatcaggtttgcgaataataaaacttcgcaccgaatcagtttgaaagctattgcacttttgcgtatatgcgaggatcgtttggcagaggtttgctgtttagtcttcagtcctgttttgtcttttgatttatgtttgatatagttttgatgtcttatatttttgggaggaccttgctttatcttggtgcaatacttttcctctggtgaattcactgaaagccactagatatgaatgatttgtgcaatttgttatttttactttgttagttctaccagacccttcaattgtgacacactgattgattggctgcctttacatagatatccagaatatattattatttatcatcataatcatcatcatcatcgttattcttcttcttattattattataacaaagaaattcatgataggactctgattcatcatattgatggtatacttgtgactaccataaatcatcactatttatgcttgttttacttgaatattctttgtttacttagagtgattttactaagagaggttgtatggactctgctctttctcaattttgagcctttttaacaaagttcggtaattttagggtcttatacctggtggtgctttgaagcccattgatgcaagtgtggatgaagctatggatgtgactgagcattattggtttccaatgcttgctggcttgtctgatctaacatcagatccaagaccagaggtcagaagctgtgcgcttgaagttttgtttgatttactagatgagaggggtaaaaagttttcaccatctttttgggagagcatattccatcgtgtattgtttcccatttttgatcacgtgagacatgctggaaaggaaaactcactttcttctgatgatgatttgctgcgtgaaacaagcattcactcgcttcaattgctctgcaaccttttcaatactttctataaggtacttttatgcttccttatcggctttttgtagtgtattatacttgctactagtatagacagatatagtgaaaaagaaatgaatattttactattgagcttatgatttggttctgatgctaggttacttgaaatttatggtttcaaaaatgaatgggagtttactgtctctttccaacaaaaagtttggcatattcaattttaaatgtagtgttgcactttaacatgtttgtatgatgtgtccaatcgagaattcaacctgcacttaacatccaggacattactgttgaactttctaaattatgtctttctatcggcaggaggtttgttttatgctgccaccacttctcagtttgttgttggattgtgccaaaaagacagaccagtcagtggtttcaatatcccttggtgcgttagtgcatctcatagaagttggagggcatcaattcagtgagagcgattgggataccttgttgaaaagcattaggtaagtataattcagcttacttgaacgtctttagtatgtttttcaaatacttatcttttctctgtttccattgtcagagacgcttcatacaccacacaaccgcttgagcttcttaatgctttgggattcgagaacaacaaaccattaattaaagatcaagagatcaattgggctgatagctcttccccacatgctgctgatattcatcagtttgatgccaatgacgatggaaaggtacctccattgacacccagcagtgtcgatggtgctggaagaactcataatgctgcagccttcactgaccataatcaacaatcagggctgcgtgtgaacttggatggttctgaaggttagatttataaatctaaagagaaaagtcagagcatttgtagtagttagttggtacttggtgtgtagatattaatagtgacaggataaacttagcaatggaatggacattatcaattatgttatcaaaatttaattcacggtgcctggagagttcacttgattctgatgccttgattagtggggctagttttgcatttgtatctgcacattaagaaagttgaacgaatgtcttcaatatcataaatatttatttaccatgcaattgcaggccttccctcaccgtctggaagaagtccaaaacctgctgaaggtggtagtctccaacggaatcagacgataggtcaaagaattatgggaaatatgatggataatcttttcctcagaaatcttacctcaaaaaagagcaatgtttctgaggcttcagtgccatcgtctccaattaaggtactactgtagaagatattttgtttcagatagcataattcagatggtagtttatgtatagcgtttactgttaaggtgacatatgcatttttaccattcacattttctcttgtatttgaaagattttgttttacctgatattgactacgtaaaacctctaatcattgcatatttgatcttctccatcccctttttcaacatttctttaggtacccgatgtagtggaacccgatgtcaaagatgaggaggagagtccactcatgagtaccattagaggaaaatgcatcactcagttattgcttcttggcgccattgacaatatacaggttggtttgtattgtatgttcaactctctgtgtgtgcctataaatatttaatttaattatctaagttcggtttgaaatccaatctagggaaccttttagcatttaatataagaattctgtcgcccttgaaagctacagtgcctggagtcaaactagtgctccaagcgtgttgttaagtttgttcatcaccatatataacaaggctgtaggggtaataacatagaaaataaacaatggagttcatagctcgagcaaatatcaccattttggcctttgaaggggactagggattattaaattgtctgtacactgttttaattaaataatattttaattgcagaaaaaatattggagcaaattgaaagtagcacagaagattgttataatggacatcttgctgtctctgttagagtttgctgcttcatataattcatataccagcctcagaacacgcatgcaccaactgcctgatgaaaggtatgacacatgatgttgcataatttcttcttcttgctctctctctctctct

SEQ ID NO: 379444 - DNA, 8916 bp, Cannabis indica
agctcttattttatagattcttatatgtaagtcctcactaatattatgtatttttacatttttgtaaaagttatttatatttttattatatatttataactatgtagtattataattttttttaatgtatatattaattttattaattatttatattttgcatctacgatgacaaaaatttttgggttcactgaacataaattaaaaataaataaaatttacttaggtaatttataaaaaatatatatgctttaaaaaataaattcttattttggcatatttgaaaaaatacctgtttattttttaaaaaattgacaatatatattaatataaaaatctttaaaatcaatactaaaaaataaaaactaaaaaaatcaacaaaaatactattatttaagagtggggagggatgggaacttattgttgtcaagatcaagaaaataaaaatttggggatctatttgtcaaaaaattaagattggggactaacttgttaaaatttatatattttggagattaatttgtcaaaaaataaaatttaggcaccaacttaccaaaatctatataatttaaggacccacagtacaaataagtctatatagagttccacattggttagagattaatatttcatctatataataattcatgccaataattatctaattgggataataattttattaataattatacaattttgctaaactaaatttgcaattcacacattattatttttattgtgattaaaacttttaccaacagattttttagtcataatctcgtcacgataaagattaggacaaaaattttttgtcacattttttacctttagtaattaaaaatcaagttttttgtaatgaatataggtagtgtttggtttaagggaatgtaattgtaatagtaataggaatagtaatggaatgtaatggtaatagtaataggaatactcttactatgtttgacttattttataatgaacattgtaatcaaaattgaattgacaaaaatacccttgccttatttattatttataaagaaagagaaaaggtaaaattgtctttttattatttagtagtgattgtaatccttattcatgtggtgtaggagtgtaatccttattctattacaaaggttaaaaacacaaaccaaacattgtaatggtaacttttattccattacaatcttcattctactaaaccaaacatgctcatagttattaacttcaaatttgggtagtattataatcttctcctttacaataacatatttctaaattttctcaataaaaattagtgttaaagagatgctgcaagaaggcaaatttgtatgaatgttttacacttttgatttaaatgaataacttaatccgataaatgtatgagaatctaagaacagttgcaaccagtcagtcccacaaggaatatatctttctgtatgccgacattgtgacaatagagattccctcccatcttctgtgaaaaattagctccttttcattattatgacatatgggacatggaactctttctgttcattgatcatagctctgtaaaagtgagagctttttataatattttccaactactttttggcattttcaatggagatccaaacaacaacaagaaagattagatttttaactttgtggtatgtgttttgttgagtttatggtgttcgatttttcattcatgttggttatcttaattcttgcatgttcttagttgacatttaagataaatatttatcataagatgaatggctcaaagaaaaggttgagattgatgtggtttataatgtcaatttctattgatcatattctctcaaacaatggttcatatcatttcaccactgtctctctgaaaagttgctttgattcaaatcattacaaaatttgatataccagaatatattatgagatgctttaaagaatctattgaacagaagaaaggctttcctttttgggttaattgtttcatatatcaatttttattggatgttcaaaagttggatcaaaataggaaaatattccttaagattataaaaaagttgttatagttgacaaaggctgaggtaacaaatatcaaccacagaatacaaaagtgccataataaaatttgattggattcatgtttggttatatctaacaagaaagatcatgatatgtacatagaaaaagtgagttaagttgtttgtagtgttcccttttggttaaccaaaatgaattatgctaattagaacttgcttagactaatccataataattcggtttgatatattcttctgctgctaagtttccattagaagagttcaaagaagaacattaaaggaatatttgacacaactaaatgaaatgtgttcattaaacttgcttagactaatcgaaattcggtttgatatacttctgatttagttattttctaagttaccattagaaagagttcaatggagaagattgaagttattatgtccataatctgtttttctatttctctttaggaaaatttgacataactaaatgaattatgctaactaaacttgcttagactaatcgaaattcggtttgatactcttctgattaagttattttcttagtttttaatccttaatctgtttttctgtttctctttcggaaaatttgacataagactaatcgaaaaattcggttaattaatctgtttttccttttcttttttaggaaaatttgtcatagctttcaaattgggcaaaaaagaaaatgaagactaaattcagacaatgcaatgatgcaaattatttatgcatagtcatttttctcatgataacaatggaagaaagtaacatggaggtgtctattagtttgagcccctccatataaatataaacatataattaattcatttcattttcaattgtcagatattttgaagttactttttccaacagtatcaaatctttgatacactgcattaatttttacaaaaggaaattgggaattgtccaagtttcatatctggcaaaagggtaataactaataagtaaggggaaattaatagtaaagttataatttttgtctatgtggtccatacatacatatacaaacaatttttctctgagaaaactttgttactaaaactaaagattcaacttttctgctcaacttttttaagtgttattattaaacaactcaaaacttgttatgatttgttatgtctaagttgtattgtctaattttctgagttgttttctcatttttattggttgatatacttaaaagaaacaaccaaaattgatctgccctttgattagaaaataagctttcagatgaaatcaatccctccattcttttgcatttcttcattgaattcttagtaaaattcaatcactattttgaaaaagaaaaaaaaatagaatctcatgtgattttcaatgtataagtcatattttctctctttcttattagttgctttacttaaaaagtgactaataaattagtttgcatgccctttggttagacaataaattttcgggtgggacccgatcgctccattctttactatttcttcattgaatccaatcactatttcaaagaaagaaacaaaaaagattgaagcttgaacatggagaagaagaagaatagtatgcatttataaagtatagagattgagtagtacacattaatatttgttattaaactttacaaaattgacatatatatatatatatttatatttatatatggtatttatttacatggtctataggaaggacggctgttctccaagtcccttttccaactatgattaatacttaaaccctttacaaaaatctcaactaactaattaatactaatcaataattacttactgttgtataaaagcatggttgtcatgagaattgtattaaaggtttgcctttttgaaatattctttggccaggagcaaatatggctaaagggtcataagttgattttctttgtgtaaatttatgccatttttgtggaccaaagtgggctctccattgttgttgagtggtataatgtggtaggtattgctttactccaagattggatttttcacaaaactctagaattctcttgttctgttttagaatatgttctaatccatctcttcctcttgatgagggtacagctgagctaaggaatgccaccaagtagaagatttcttcttcttcttcttcttctgggataactactgatgttctgttgtcccacctgtaaaataaatatcaatcaatcaaatttggacaacataaggcaaatgggattttgtccccttttttcaaaaaaataaaaaaaaaaaaaaaaaaaatgtacttcaataaaaatgtagatatgtaatataaaaggtaattactttgatttgttgactgggtagatgagaactggaccattgcttgtatgagttaagatattgccaaatacttgatgagcaaaagtttgaattttggtttttggtataagaagattaagccatggatgtggtacttcccataatccttttgaccttaatttgacttcagatacatgaactctgtctagaaaatcaacataactaacatctgatatgaacagtgttgactttatatactttaatttactcaacattttctccacttcctgcatttacaacaacaacaacattagagaattttcattttggaaaattttagaaaaaaattaaaagaaatattggaaaaaaggtataaggtaactggttaccttcttgtggtaactagttaccgttttcctatatttttcaattttttccataaaattaagtatagaaaacctataaaattcataatttaattaagtttactatgcttacctgatttaccatatctatattgtccttgttgaaatacttaaccaattctaaacaaaaaagagtttttccatctgaattgaattggctagcttgagaaggatcatgtggattaaaagatgatctccaattgtttaagagaccagttctgttaatgataacaaacccttcaatataatcaaaactgttgttctgatcttgtgtgatcaagctctcttgttctcttgtaaaggtttcgaaatccgaatatagaactctaatccatttcaccattgaaggagctggttctagtgatattcttgctcttgttatgataccaaattgaccaagtccaccaagaacactatgaaacaagtcactattctcttcttttgaacaattcaccacttctcctttacctgcagatatatttttgtaagtaaaaatccaatctttagacaaagaaatataataaaaaagaaaactttgagaacaaaaggtaaggaaggtcattaagtctagacaatttgttttggttgttttgtctttccaagtttgactcttgacccttgcaatagtcacctcaatattggttttttttcttcttttgtttggttgtcaactctactttactatataaaataaacaccgacaaataatacccctcaacttttcaaaccgttaaaaattgctgaattcaataacttttaattctgtttaattttactaatgaacgtctaacatggtgattgtttatgtatcaaattatattcctgaactttgataccaaatagtatccccgaactaacgggcatctgacacaaatggaagttcagggttacgatttaatacatacagaatcgccacgttaagcatacattcaaacagaaattcttgaacccaacaatgttcgaaagatacagtttggtacatgtgaaagttcaatgagaaaaaaacaatcctaattagccatatataaatataaatacattatagttttttagtataagtatattaacttacctgtaataacttgtagctgtaggacattgctgatctggggaccgatgtctaaatgcttgtccactaattccagcattggagagagttccaccaaccagtgagatgaagataatcagtccatgattttggtgttaaaaccaaatttcaaaagtctcatgcaatatgttaatccaaagctcaccaccataaacatcaacataagagaattctccatcactatgaatatacataacagagttttgttttcactaagtgactccatatttatgacaacacctttatgagcttgtgattgtccttggagtgagtgaccatgtcctctggctgcaacacttagctctgttgtcatccccatttcccaaacatgtttcacaagagtggctatatccgataccgatttcgggtaaagaacagctgagggaaggtactgaaatctgttgccaaaatccttggatgcatgatcaacatcatcaaaactcaaatgcccatcaaactcaagtgtcttcaaatgatcatgattatgattattttgattatgaagaagaagaggaagagtgtttgagaaacaaaggtttatcttaatagtacttattaagcaagtgaagagtaagataataaagcctctaatgatgataaagatgttagctttagattgccaattcattctttttctcttttatgtatatatattaaaaagagatttatggggaaaatggagaaaagggtagaagtagtttttgaaagattggatgagaaaattattgttttgagaagagaatttaaaggggttttaagctagtgaagaaaagatttgatttttattatttatttatttatttatttatttttattattgggtgacttagtcaaactaactcatatgacttgatctaagtagtcattagaatccgtatgaagactgcctactttggtggaagagttttaggattttcttttgttagttttcctttctttcttttaaaggaggcttttttagtttagatgaagccatcacaacatatcaccaagttgaatacaaataaaaataaataaataaataaaaataaataaaagaagattgtgaaaatctttctttgcactttttctaacagttacaaccacaacaacaaaaccccaccttttattttttttaattcatcaaagacaaaatatgttatgaagaaaaagaaaacaaaaataaaaaaaaaatgttcaaaggatactttcccatttttagctaaacaaaagaaaaaaagcttagtccttttggccataatggtgtatttgtattagtatttttcccttgtggcatgatgatgatgatgatgatgatgatgatcatgagactgtgttttgcctgggaatataaacacagcgtatctgatttcagatcggatgattatgagaagaaatggattgttgtggtgtggcctttcttttgattcattttcaatgtggggtctttagatgggtccacgtggcacgtgatttttaactagtttgtgtgtgctttgttgggggaagctatgtatgattggttttatattgggaccccccaacactctcttaattaatttcttctcttctctttcaactaatggcatcacaagttattgagcattgttactgaacactagtagtgtgtagggttttctgcaagtgacattttacaatatgagattcgatacttaactatatcaatagaagaatgacattgaggagagtactaggcaccaggctacactcatggacatgtgatttttaaaaatgatattatctatctccatattggtatgatattgtccactttgagtttaagttcttatagatttgttcttgggtatcttttcctaaagatctcagtatggtaatattgtacttccttatatactcataatttttctcatttctagctaatataaaactttagtttcacatccaacaataatgatgaaaaatattgtgcatcccaatgaaagaacccttttgagagacttgcaccgtacacaacacgtgtcactgtacttgtggtattcgagagatctgcatgacatagtgatgaaaaaaaaattgttcatccaaatgagagaaccctcttgggcggccacgtggtacctaccagtggtattggtcaagagacctacagtactgtaccacatggctctaagaagtactcacaagataatattattctacattgaagtaaaatatatagaatctgatactacattatactaataacgattatattaaatttaaaatagtattgttactcccaaaagtaaaaattgaaaaaacttttccttatggttataccttacattacattactcacaagtcactatactcttttggatgattctcttgtttgtatgttttcttttttcaattgaaaatttgcagcctctaagggaaccatatgtctattgatatgtagtttgatataactaattttgatcaagttgtgatgaactagctagctagctctttattatgctctctctagctatataaatatatatagtggatctataaaataatacatggtatatatatagttgatatgaaatcttagattagatatatatgttatttggagagacaaatggtcatgacatgtctcaaagattgtaaactcttgtattgaatattgttatatatgttgtgagataagatctctatctctctattttgacctagctagatatgttatagctagctatcttatacatagttttgttttctcatgtccgaccatatataaataaattagttgatttatgataaaaatgggattcattcatttcatttaattacaaatatttttcatgggaacatattttttaatatttgaggtgggaaattgttgttaattaaatataggattccaccttcaaagatttttaagagatctaacattgatcataactaaattatatgtagtattaatatattaaaaccagggccgaccagagggtggggtagccggggcctcggccccaggccccataattttggaggccccgaaaaaattaaaattgatataattacacatttaaaaaatatataatatataaatatttagctta

SEQ ID NO: 379445 - DNA, 4326 bp, Cannabis indica
ctctctctcacacacacacaagtcagagctttaaaaagcaatttcagctgaaaaagctcttcctcctattcccttgcccatactcttacatatacatacatactcctctttctttaaccaaacaaaaccaaattctctctctctctctctctctctctaggaatccacatctccattttcgggttctcgggttccgggtctgccacccatttcaacaacagccctttctttccatcctcgaacaaacacacgtatatataatatacaataaattttatataactatatatagacaaaccccagttctcaaattctcttgggaacccaaaagaaaccaatgcttaaactctcttcttctcacctttcctcaacttaaaaatccaatttttattatatacaactttataatagctctagtactagtgtaccacaacaacaacgacaacagcgaaacttttctttctaaccctacgttatggcgggtaacccgcctgagaatctcggcgatgatttcttagaacagatcttggcaggacagcagtcatacactggtggcggtggcgatatggggtccatgcccatggttttacagttgggttccggcgccggaaacgtctccggtgggtctggtcccggaggtgggtatagaggagttggaatggggatgggtatgcctctgggtttgaatttagagcaaggtttcttaaggcatgacaggtttagagatgaggttgaagttaataataataataacaacactaataatctttcttctccagtgaacgctacttctgccattaatgtaagtcactgttttttttttgttcgttttcatttggtgatgtcgtttttccaaagtacaaagggttctagttagttagttttaagtgtaaaaaaaagtttgtggttttgatagagatgttgtgagatttgcttgccatatgtggggaagaagtggagtgggaacaattttccctgaaaatttctgtttcctttgccggaaagtgcttgggaaaattctcttatcgtcagctttttcgtttctttatttttttaagtaggaattcgaaaccccaaaattcctcttttttctctcatttatttatgacgaatttggaatctcataaactttaaattttggtttattctttatttttcactctcttccccgttcaggggttagaattaaaaacccgggttggtaaagggtatttttgtaaattgtgagggaatatagaggataatttggtcatttggagttttggcaggagcgagattcggtgcacatggcgagtttgtttccagcctttgggcatttgcaaaaccagtcggtccgcgcagcgccaccgcctccgccaccccaacttcaccaggttcgcacaagtgatttctaatgactattctaccctcaacttcaatcttttattatcaaacagcccttagcatgtatataaatatcacagacatttataattatatacatatcttttaggtatctttcatttgaataatatggtccaaagaatttttcttttcatatatttttcaataaagttacaagattttctttcttcttggtactaaaattcttttttagaagtttttatttttagaaatttttttaagttttttttttttataagtattgaagcaatataaattttgaaaaaagcaacaaattattggtgtttaaaaaggctcatctttttaatttgactatgattgttttcttaattattgattatttattctcctctattaggcaaaaaaaaagaatataaatatacattaattaaattgtcccaaaagtaaagaagacgaaaaaaaataataaagttgaaaacaaaaaaggtaactgtctcaaaattatttttgaagggagtgacgtgaagggggcaaaattgggtaattaggaaaaattaaagtgtttcttcgttttcgtaaaggacctggctttggcactgaaggctccgtacacgtgcgagttctcaaaagtccaaacgtgcggagctttgcagtctcagggaccatgtggccctttttcagcctaacttttatattggtgattattacggatgtaaagggaattttattgaaatgaaaatgaattctctttacatttgtaataatagtgatctttgtcagttttaagttttaacttatgtgttaatactcttcacacgctctcactctctcttcaatcagagcagagtgtgtctgtaacacgcgccggtagctttcatttgggccggaagatgtgtcactgttaaactgttctaaaatttgacttctccatatatacgtatattgagcggattttgctgctgaatttcagttaaatttcattttcagtgttctaatttttttttgacttataaataaataaaatatttattatattataaatagatgggctaattgggtgtacaataattgtttgatttttctccaatttcatatgattacccaaagtagattaaagttattgacaagttgatatgaatgaatgaagtgctaggataggtaagtgttttctttatttgtattacttttgatgtatttccttatatgcaatgaagcttgcatagacttgtctaactcttaatttagttctcatctcatgcgttacaccactccaaaagaaagatgatgcaattttaagcaaaacaaaaaagttatttttttattacttttcgtggcgtgagcttatgcaaaatgtgtctttttcatttgaggagaagtgttagaagatagaggtttgtgctaggaaagtaagaaagagagagtacatgaaccataaggtggtcttccaccaaatattgtcggaattggccaatgaatatcaaaaaatttgaagtttaggattgagataatgactttgtatcacaatttgacagctttaataactcttatctttattgtaatgatttggctagctagtggtttatgtgtttttctttgtctggtatggtatcagtgtttttttggctaagttcccacgagcctgataaaggccaggtttcaagggaaatatttttaattggacagttgacatttataattttagtctttcttatgtgttcagtcaacttaaccaattaattatgtaattttcattatataattttatgacttgttgttttttttttttttttgctttttgcctttttgaaaccttttactggtaaattgacattggtttactttcatccgaaaacagtcatatcatgttcaacccactccacaagttgcccctgcaccacaaccacctaccatgcgcccaagggttcgagcaagacgagggcaggctacagatccccatagtattgccgagcgggtaagtatagtttggttttgatacagcaatatataatatattctctgtcaaaggtcatagttcagtaaatcctttactttggatattcataagctgtgttgtgcttcatgagctagagaaatttgagcttattgaatctgttatgtttgatgaatgattcactactggcaaaaggtcaccaaaagagtttctttgatgcttgccatcataaaattaataataataacaaattcatttgtaaaaaaaatgagtggaacgaagtgcaaaatcttagagaaattttttgaaagaaaatgatttaaattaaattatttgttcacattttgaagtttactatgtcttcaatacaaagactttgaaagataataactcttcaactttaatttgtgacttcttgataaaaattcactgaaataatttggtgatcttcccacattgatgctcgatacatgcgtattaatagtgaaaatcaagactagtgtctttcaccttgtttatacttaatattttttccttcttttccttcagttgcgccgggaaagaattgcagaaagaatgaaggctctgcaggaattggttccaagttgtaacaaggttagtgtctaagaaataaagttattcagtagcctaaaaatattgaaatgaaaccgttggctttacatctgaatttcaatcataagttccattgtggtgatcaatgaaaaacctcatgcagacagatagagcagctatgcttgacgaaattgtagattatgtgaagtttctaaggctacaagtaaaggtacgattttacgagtactcaagatttgaacagttgcatgctctagaaacgattctttcctttgcttcatacgttattagataacttcctagacttgttaatcttcaaaataatcttgaacactgcttgaatttcagcacaaatttaatctgatgctctttttctcttagaaattattgatttttttttcttactaggtaaaactttt

SEQ ID NO: 379446 - DNA, 1548 bp, Cannabis indica
agtaagtcattaacaatgcgtatgatagaggtagtatgaacgggcataaaatttgaatcaattcaacattatttcacaaggattctaaactgctttcactatagaattgttcaatttatgaaacttaagttgccagaaaattaattcaacaataaattataatcatccatggaaatactaataatacaatcaagtcatatttagcaactgggtcaaatccatgaatcagacacaataatgaaatttagtataaaacctgaagttaatcagaaaccacaagtctaaacaagcaggttaagctagagcgataccttttcactgtgagtggcccaagaagagagagtagcaaaggagaaccatgatacatggatcctgcaaaacaaacacaaacccaattttcttagatccttaaaaatgaacgaaattccattggaagactattgaagactaaaccacaatcagaagaactacacaaagagacctgcgtaaggagacaatgatgactgtttgagccagtaaccctcagccactgcaaaagcaataacaaattagtgatcaaaaagtcaggagctagccatgaaattcagcttctaagagagagattacagcgacggaggctggtgactggggtggagatttcgggacgggaagcgaggttgagattgttgggaaaatatatgagaattagcctgaaaaagagtgaagcagtgagccatgtccaaaagcttcgttctttgatcaccattgttgtagttgtagtagtatgaggaaggtgtgttagcgaatgcgaatccagaatccagaatccaggaagaagaagaagaagaagaaggaaagagagtgtaagagtgagaagttgaacgaaggaaggaccaaagtccaacccaaaatgtttgtttggggatcgaatcgaaatagttgaattgaagaggcctcgatccgcaaatccaaacagtgcatgtaataataagaagatttacattttacatttcatattgctaaagggaaatttgacattttatgcttaaaaatgactaatggtgttaaattatacctaattataacacatagaaaaaatataccaatctttctcttttcttccaaaaatacccttctcatttcaaacttcccacattccctctaactacattctctctcttctttccctctcccaaactcacgaacccaacccacacccaaacccacggacgcagaccaccgaagctccaccaaaacccacaaacccaaaccaccgttcgaacccacggccacccaaacgaacgccccaaccaatcggcgccacccacgaacccagacgtcgaacccacggccatacgcacgacctagacgacccagacgaacccacagccacccgcacgacccctcgaacccacagccacccgcacgacccagacgacccagacgaacccacggccatacgcagtcgaacccacggcgaccgaggagactcgcgaacccacccacgactggaaaaacccaatacccaggtttgttctttatttttttttaactttaaattcacaatct

SEQ ID NO: 379447 - DNA, 3353 bp, Cannabis indica
aaaaaaatctaattttctaaccgacaggaatgctctttttgtagtagtgtatcataattcttcttttttaatggcagaagattctaagataatatcgtttatctagacgtctatcttatgggggaaaaagatttttgaagctggagctcgatggctcattagttatgttactaaggtgtcagtttatcatgaccggtggattcttagtctgggtggtaataattcttcctctcctcactttccactgaacgatgcctttgtaaatgctctattattgcctaatagttgttggaatgcacctcttattgctagctccttcactgcgcttgaggctagtgctatacttgccattcctcgtgatcatgttcatagtatgaaaatatagtgtgtaattttgagaaataaagttattactcaatttaaagtggatactggaatagtatatgaattcctacagtttttacctaccatttttgtttaaaaggtcatgagaccacccagcatgctctttaggattatgataaaattttctctatctgtgaggtcatttccctccatctctaggcacttatttttcttggttagaatatctatgagttcttttatgcttgtcttgacgttttatctatgccttgttctaaattgtttgtctttggagaatttggtatcgacaagaataaatgggtaactaaaaaattttgtgtgtgaatgatgatgtcttgtttgattggagtatggattatcttcaatgaaactcttctgccaatagtcctacactttcacatggtaatccccctgtgatatgccaattgttcattggtttaaactaccttttgaggtggtgaaattaattgtgatactgggttgaattcaaaggtaagtctagggtcagggaaatttttcgtgatgggagttttgtcctaacgtttagtacttggacttagaatagttgtttctctcatgatgttactgaggcgttgggtatctattctgggatcatgcttgtctatcgtcttggttacgtaccagagggcatggtggtgtaatctgattgtcttactgtgataaatgttattctttataataaggttgattagtcttatatatgttgtataattagagatatccttacttattgtaaacattttattgatattttttttttgtatcgttctaagactgctatagtgtggctcacactttagatatgttagcacattctatggatgatcattatatttggaggtcatttttcaaaaatataaataaataaataaaaataaaaaataaataaaattttaaagaaactttaagaacctggctgcgtttcctttttctaggaaagcactccttcaaaatggcaatgagaataaacatagaaaaaaacaagcagaagcttacatgtactggcagacctttgtgacgggaaatcatacatgcatggtactctttgaagactaggtcttcctaagtatacgttatattatatatataattaacaaattaactaaatcactatgccaaatcaaagtttaattgttgactctgtacaatatctaagatcgtttcaaacaaatatataatactgttctatacatagaaaaacatatgtctccaagtcatttgactagaccaccaattaataatattattaattaaatcacgggcttccttaaaattgtttatacccacgttttttgtttcgctttacaacaaacaccacccaaatccaatacatatatatataaacacacatacataggcactcatattcgattaattaacatcctaatcttcaacggtcaagtacatattttcacaagtatatccaaaataaaggaaccggccggcaactttacgaatccagccaggctcggaaaacccctccgtcaacatatctgaaaaatatagatcgacaatattttgatctatcataatatatctatatataccccatacatatatgtgtaaatatatttttataggttttgatgagggtaaaagttgtgggtcaaagaaaatttggcgtttcaagataagaactttacaggatccaccggcaggtgtagtagttaaagacgagccaacgcgatagagtgttaagacatattaatgtatataaactaattaatagttaaatattatataaatctggattaatttaattatgtatgtatatatatggatactgtttcaagactgcatctatagttttttggattatcattctttaaattgttccctcagatcgtagaataaattaaaggcaaatattaaagcactgtaatgatgaatgatttaattaattaggaacgttaatgttaatatgatcaatatcaaatatgtattattcgtttttttagaacaaaaattcaaagaaaaaagtcagcgttaagtacatatcgaaaaggaaaaaaagaaaaactatccacccaaactagctcaccatttactctaacagctaattcatgagcagcaatattggccgaccgatgaagatgaatcagggacgcctcaagaaaattggatagttgactaaaaatatgtattattctttgaattcagtattatacatataattgtttgacattatattggtataacaaaaattatgctcatcgatctgatctagtcgaaagaactagcatacatatggtcatgatctcagcgtaacgttaatggttattttaactctccaataaaagacaagaagtttttggttggggtgttagggcctagctaattgagaaggtatttaagtatcaatccaacattacatccttgtacttaattacaatcatgctaattgaatgaagagttcataaattatgccttaagaatttggggctgatcgtttagagaccagtgcccttccttagcattcggtctttcatctgagtaagagttgttgtgagtctagacatgatttcgtccatttaaatttccctaccttattcattcactcttgctcctaggataaggcatctaagaagaaggaagagagtccagcttcttgaacagaaacccttcattgtgtggctccaccaaagtaatggaagagagtcgagctttgaaaatttgatgaatcgtccgagaagaagaaacaagcggcggctagttttctattttaggtctcgagaagaaaagacacaagtggaaaatatcaaatgaagaataattaagattagatttaacaattagactgatatgtaatcatacacatcaacgttttttaataaaaaaaattaaaatactcaaaaacgttaagaacataagcaccaacaaatgttaaaaaaagtcccacctatacatttatatatatactagcaaaaactacgtgcgagacacgtata

SEQ ID NO: 379448 - DNA, 1510 bp, Cannabis indica
tttttaaccgcaaaaaaagtttaaaatacatgatttgatacatattaaaatttgagaaataaaatataattaacccgtttttttagttaaagtcaagtctagcaattataaatgttaaaaacatttgtggcaaatatcctttatcattggaacttttgtgcacaacacgcaacgcaaaggcacattacaatatgaaatatcacataagctatcagtggtccctacattcagtcaactatcccatgactgaacaaaattttataatttcaaaaatataaattaaaaataaataaataaaaacaaatacctgaattcaaggactaatatgacacacgtagagtgagaagcagaggataacagctcttcagttctgattatagtatcggttaactgaaagaaccaaaagacaaaaacaattattatcatccaaagatataatatatgttgccataattacccctaacgtttaaggcaaaatatttgccgtttttctcagcaatcataaggactaattagtcctttaacaaaaaacaaaaactttgttgtcttcttcctaatatcttaatctatttataatataattttttcataaaataaatcattttttaataaatttaactctttttctatggtaactaaataaaaagatttgggaactgataatgaacagagatctttctttcaactaatcagcactcacaatagaacaatagagtagcaaaaaggccttaatttaatctttcttcattcatttttaaaattaatttctttttcattattttgttttttgaaatgtttcttttttttttcatttaatttctttttcattaattgcatgttaaaaaaaactatttttttttttttttaaaatattcttcaaagttcttatttaaatttattatcgaataattttacaatacaccccactaaatcaggtgtcttgatgtaatgttaactgtttcgacatgtagaagaattttttagtccaaagtcatgtgcactcttaattttaattttttaaatttctcaaaattttataaataattacaacatatacaaccataaaaaaattcgtctaattttttctagataacgaaacagataagggtgcatcggtgcactcttttcaagcagtgtattgtaaaattttactttattatatataaaaaacttattttttttatttcggagaagtctaccatgcatcctttaaaaggaatgtactaatatattttttagtattcgaaataattttttagtcaaattttttcatatggttatttaggttatagttatttaagatattctgtaaaatttgaaaaaaaaattgaaaaaatttaacacgataaaaacataattcaaatagtatattacacagataattattttatacgtatataaaatagattattaaaaaaattatattttatattataaattatttaaaattttatataatattttaaataactacacaatatatatatatatataaaaaaaaataataata

SEQ ID NO: 379449 - DNA, 6528 bp, Cannabis indica
ccaaaacatgttaaaagattttttacaaacatataaaagttgtttacaaacattaatctgtatttttataaataaaatttgtacttttgtagtataccgtattttttcaattttcttaaaaaagaaaagttcggtattattgaaaactatccaattttaaaggatcatttacaaaaatattggaattccggttaacttttacaaaaatactatcacacggaaaaaatttcaaaaatactgtgtttttataaaacaccaatagaacacaaaacagattaactcaaaacaacagtagaacaactaaaaaaataccagtagaacaccagtgaaaacttaacacagtatactgcagcatgaaacttataaaaaaaacatagtaaaaaagtaaaaaaaaaaataccgcctgacaatattttcataaaaaaatgacaaaagttagtatactatgtaaatttcccattataaatagtatttgaactggggtaagttgaaaaataccacttttattaatcaattaattaaatttaactctaattttatatttaattgaaacatacctctttttatatgtattgtacccaaaatactctgacataagagtgtcacatttagagtatcttgaagtgacaggagtaaaattggtataatgtttaaaaaaagaggtagaaatgatagactttgaaaaagatggaaaaataaaagaggacaatataaaaaaggtatagtgtgtaattttgtcatctgtgaacttggagtgataatggcccaaaattcaactcaggtccaataagcttaatatataagaaaagcccaatgctggtagctaacacgcctcgtagtggattcatagtggtgggctagacgtattgggcctaaaaggtatggaggcccaaatacttcaaatagtgaaaatgaaacggaagaaaaaatataagcagtaaaccaaaaacgttggcaaaatcttccccccaatatcttatccactctacagctcagagctccagccatggcgtcgctcttactgggagctcttccaatcccctctcaatcactccccctcatcaactctcggatttcattctctcaatcagaatccctagccacctcgtttccttcttccaaagctccgatttcactctccgccattaccactactcctccaccagtcccaacaggtacatgaaaatcgcttaactaattctacttcttcaactttcttttgttctgccctaattttactcttctccttcagtgtattgtggcagaggagataagaaaactgaaagaggaaagcgtttcaatcactcttttggcaatgtgagtgttcttctttcttcttaattctccaaattacgagtttcagtttcattcacttatcaattttttttttaaaaaaaaaaatatatatataggcgaggcctcggaacaagaacaaaggcagaggaccaccgagggcaccggttcctcaagctccaccaaagccagataagtttgataatgatgagaaaatcaagattgaaattgatgagtcttttaatggctaattaatttcacagaaaaaaccctttttcaattcacttttctcttgtaatattttgactactgagtttttagttgctcctttctttttgtaatactctcaattttatgtttgtaatttcttcctttcttttatgagttgggtttcggaaagtgagatttagtacaccaaaaaatgaagtgtagttaataattcttgaagctaattataatattcagtcaatatagacttgtggctatagttatcttatgcattgtttatgcttttattaaatgattagataacctaagttttggagcataattaaggtgtttcattaacaaaaacaaaatgttcttttatggccggctttgattaaactcttttattagtttattctttaaagtttaaactaccctcttattgtttgccctagagattttctttggtattcttgtgctttactttagagtctctgtcaagtagggttatgaaggttaaagagataacagaggagaaagatgaagaagagagcttctatgttgatacagagtgtaaaaaagaaaggattaggaaaataatagagtatcaaaaatctctatactcagcttcatctttagcatcttcctcttcttcttcctcctcagttgcgtcgtcatcgtccttgtcttcatctcatcgaactaacagtctgataaatttgatgaaaagtggaagcacatcattaagaagattatttgaattggagcatactagtttggccacctattttgaacattacagcggttcacctgtgattaagcctatacttctatggggcagtgattcagataatgaaggctatgatccatggaaatctatcaagcaatttggaccctccaatgattctgtgattgatggattagttgggattagttcaaatcttagctttgaagataaagaatttgactctaagaatagaagagcaaagaagcccaagttaactagaaaaaggtcatttaggagattgccaagatttgggttttggagatgcaaagggtttagattgagaaagcttaggattgtatttcacaagaagagaattatataaaaattgttattgattatctcttgaacaattcataaaagaacaaatgaaactctatttacaagaacttatgggaaacatgtgaacttacaaacaaatttgaataaaaaaaagtctatcaacaaatgagactgtataacattctcaaaatttgcgtatttgtacatgtacatgatgaagaggctgaggctgaaatttcatgagtttttatcaaagtaaaagtttctttctataactataaacatttatacaaaagatacaatggtctgagattaacttcccaataatgctaccttcttcaatcaacaatttgttgctctgtttattccacaagtgaactccataagactctccactaagctgacgcaacttggctttcacccatttggattgggcctcatttttgggcttctgaaaaagcccaccaatcttagtccagtctactggataaaaggccataggagataggattgtaaagttgagttgttcaggacttgttgtctgcactctacggaccactctagagaccaagtaaggtccattataaccccacttattcccatcaaaagttgaagcaaattcctctaaaaacttcaacagaagtggatgattcatatcaaagatcaaaacagcattgtttaatctcgaccagtttttggaccccacatcaatactctgtgctccaatagagtttctcaacccatttaaaggcttcaaaacgacaaaatctgtatctaaataaacgccgccgtatttgtacaaaacagcaagtctcataagattagacaagttctgagccaaaggaatctcacccggatctctattcccatttttaatgtcgtttaaccaagcctccgcgggagtgtcctttaacaaaaacgacaactcaggtgtaacgggttgaaccttgaaacgacgatcgattagtggtttaaggattctgtaacctgtaacggagtcaagagttctcgaaagaataatcaaacacccttttggatgggccttgaagagactctcaacagacaataattcacggttaccaaacgacgtcgctggagaaatccacgtcatgaagacccgaacttcgcaactcgggtcgaaaaattgtaaaacccgactgtggaatttcttgcttgctttatccgatttgaaaatatggagctccggcaattttttctgaaaccaagctattctttcactccctgtagaattaaagggtggaacaaaaggattgattacggtcttcgtcgttttggtattttcatcgtcgttttgattgtcgtcttgtacggaataaagacgaaaactactctgtttgataatagcagatttaattattagaaccttagaagaagaagtaatgatatctctgtctctgtttttattcaaagaattagtagtgaagatcataaaaccatctgagaaaacaacgaagagtaatcctacgacaactaaaagagctgataatattctgagcttggtgatggttcggctatggagccgagaagaagactcttgtagttgcataattctacccattatgtaatttgttagagaacagtagtactggagattttatggatttgaaaatgaaagctctgaagatgaactctcatcatcatatatggctatatattcttctatatacgaaagttcctaaattgaaatattcaatatgtgagttttttgaagagtcaaaattgaagggtttggagagccgccatagacacgccaattgttattttaagaaataattaaataaataaaaggaagtagaaagtctccattgctggggttctaatcaaaaagttgttgattaaaaatatattaagcataattaattatttatattttaaaggacatgagatctaattttactataattacatctaaatgaaaaaattttgtaacacgcgtaactgtaaaaaagtgttagaaaattttgcacgttgtgttgtgcttcgctggttatggaatattcagattcactattgagatttgtaatgcttaattaaccaaaatattattaatattttatatttaatgggaatccaaagtataatgttgtacatatatatataattcttttttgtttaattaggatatatagaatatatattttttgtaattttttttgtcctttcttctctgcaccatatcatacagtttattatatagatttttttgtctttatttattttcttttttttttcttccctaatttccaatttctcattgagatttttttctcctacctaccaccatattcaacatttttttttctctacatattttgccttttattttatattactctttcttctgcactaaccttccatgacattatgttgttttgtaaaataaaatgttatatatttttgtattatactaacaaaatgaagatgtaaattcttattttgttttgttaattattattttttttccattaaataattagtaattgtgatttttaagctagattttaataaattaatatataaatttagcacaaaatttggtgtcaaaaagtttttcactctaaccacaacactaaaaattacactaagaaatatttttactattatattaatttttctgtttgatctattgtgtaatattgagtatgcctatactattgattaataagaatatttagtgtgtgtaattttaattttggtgtgtttaaatttgtaatgtttataatgtttgtaaatttttaaaaaaaaaatatacaaaaaatttaataatcttttacttaagattgtaaataaaaaaataatttatgcacacaatatattatagataaaaataatacatataaattaaataataatgaaaaggaaaaaaaacgatatcctagctacagtttcatatcatatatgtcatgcactgtaactacaacatctgtagctacaacatcgtgaagagaatatatatatgcactaaactcaaattctagagcaacgttagagttcctcttatatactttattaatttatatagccatttacgcctatatgtttttaatactcattaaggttaaaaatgtttataaaaaatctatactaattaaaaaaaacactctcaaatttgtttatttcgaacaaattgaagtgttttttttttcttttcacaacaaatattgaagttattattatctcaaaaaaaaaatattcaagttattatataataagaaagaaaaatgtttttaatatattttcaaaattaattactctatgtactatataatgcatgcatggcgttttactctacgttcggcacttttaagtcatttctttatttttaagaaacttttaattaatattttaattataataataataagttatctaaaccgaggtctcacggcatcgcgcgaggacaataattattaattgtcggttgtagatgacataattataaatgttgtttctttcatttttattttattacaattaatattaaaaatataagagaagaataagtaaattacttcttattatttctctaatttcaaacttaccagctcattctttatttctctcacacctggggcatgcatattaatatatttatattaaaaaatttattaattaatttacggaatttgactattatttgagaaattaccgaaacttatgagatcatttgcatgaaattaataaataaatatagattttatgaagggactttttttcaacatttgctgctattttcacatttggttaaacttttcattctaatttttattttaatttttttatccaagttctctcatatgttttgtatcggttgagttcctaatccttttttacttttaggtttatatttaagtaatcttctacataaatggtctccaatagctaccaaacaagattgaaatattgaggttgaaaaacctacataactaattcatccatta

SEQ ID NO: 379450 - DNA, 5179 bp, Cannabis indica
ttttttttttttgtaggaaaaccacatcaataatatttagaaaccttttataattgtttatttatttatatatgtttttttaattttaagaaaaaacgaggtcaacttcaaggtttctacgccgtttgatatgggaaaagatccacgtaatacccttcaccgtccgatgtggcataatcatcgtcatcctccgacgactttcgttttctcacaaaaagaaaataatagtaattattattattattatttttaaggaaaaataaataattaaaaagaaagtttttcatttttaatttccacgaaaaaacataaataaatattaataaaataataaaaaccttaacccaaggccaagggttgggagagagtggaggaccaaagtaaagtcatttaaaccaaacatacctatctaaccctttctctctctctctctatgttttcaacagtttctgttttctctctcttaaatttcgacttcttctttctctctctctctctaagtttttattcataccaaaaacaataacggcatattcctgcccatttcttcatctctctctctctctttttctatacctgttccaagcttttctcgggataaatactagacaaacgcaaagagtacaattttcccatacaaaatcattcttgggatttatcattttcattttctcgagtagatttcatctgggcatttgaggtttttggctttcgaggttgtcgttgctatttaatttttttattctggttctgggtttttagcgagaatggtggtgaagatgatgaagtggcgtccatggccaccgctgccggcgaagaaatacgaggtgaggcttgtggttcggcggttggagggttgcgatctggtgcgggagggctctggtggggaaccgggaaagttgaccttagagattcggtggaaaggacccaagatggccctcagctctctccggcgaccggccgttaaaagaaactttaccagggaagttgatgcttcttccattgaaaacggcgtcgtcgactgggatgaagagtttcaaagcatctgctctttctcaccctataaggacaatgtgtttcatccttgggagatcgcctttactgttttcaatgttagtttctttttctctctacctttcttattctggggtgttttttttttttttgaatttggtgggttttcattttctatggagaaaattcgagattttctttacgggttttttgattaggtgaattgaaatatgggtgttttatttttttttattttaggttttgaaatcttgaaaattctcgactaacaattctagtatatttgtacagggtcctattagtgtcttttctgaaatcaaagagtcaattcaacttaaaatggactgatgttaggtttgaaaatggattattgtgatgagtagatccgattgctgttattttacttttctaacgacgatttcttcattgatttatggatggagaaggaaataaatttagtagtgtgggttatggagattttgttttctggggtgtttgacttttgactgttaggagtgactaaagggttttgaatgggaagtatttgtcttctatttttatgccaattcaaattttatgtatctaaatcgtttctgattttaagaagatttatttggtatgatataaaaattactgacttgattttcatcatataaatcagggtttgaaccaaggatctaagaacaagattcctgtggttggaacagcattggtaaacattgctgagtttgtttcagctgctgaagagaaggagcttgaattaaacatcccccttacaccttgtgggggttcatctgagccttgtcccacactttgtgtatgttctttctctttgtagacttttagtccttatggttgcctcggttttattaccccatgaaatttgacattttctgatcttagaattccttaaatcttgcagttaacgctgagcttattggagctgagaacttcacatgaaactgcagagcccgtagaaagatcaattgttcctgctccatcaccaactcgatcggtggaagctgtttcaacagaaaaagacgaactctctgctcttaaagctggtcttagaaaagttaaactttttacgggctatgtttcttccaggaaagctaaaaaggcatgtcgtgaagaagatggtagtgagggcaggggctctgccaaaagcgatggggagtataactatccatttgactcagattcactcgatgattttgaggaaggagaatcggatgagggaaaagaggatgctacagttaggaagtcatttagctatggaactctggccaatgcaaattatgctggagtatcattttactcaagtgcaaggatgaatacggaagatgaggattgggtgtactatagcaaccgcaaatcagatgtgggatgctcaaaggttgaggattcatctacatcagtctctgaaacacccttaattttaggctcaaagcgtagcttgctgtcatggaggaagagaaagcttagcttcaggtcccctaaagccaagggagaacccttactaaaaaagggtaatggagaagaaggtggtgatgatattgattttgatcgtcgacaacttagctctgatgaatctctttctctaggggtgagaattcattaccatttgctttctttatttgatgcacttcttctagtgctcttaaagtgagttatgttagattctaaattcttgtgcttattttaagaaatagaatgttctaacatagcattggcattggcaactatttatacagcggcataaaattgaggaggattcattagcaaacagatcatcagtttctgactttggggatgacagttttgccattggcagttgggagtataaagaagtaacaagccgtgatggaaacatgaggcttcaaacccaggtcttctttgcttccattgatcagcgaagtgagcgggcagcaggtgagagtgcatgtactgcactagttgctgttattgctgattggttccaaaacaaccaaaaccacttgcccatcaagtctcagtttgacagtctaatccgagaaggttctttggaatggaggaatctctgtcaaaatgagacatacaaggagttatttcctgacaagcactttgatcttgatacagtcctacaagccaaaatacgccccctttctgtcgtttcacagaaatcgtttattgggtttttccatcctgaaggaataatagatgaggatcggtttgactttctacatggtgccatgtcctttgataacatttgggatgaaattagtcgcgtgggttctgaatgtgtaagcagtggtgaaccgcaagttttcattgtcagttggaatgaccatttcttcattctcaaggtggaaccagaggcatactacattgttgacaccttgggggagaggctatatgaaggctgcaaccaggcctacatcttgaaatttgactgtaacactgtaattcacaagatgtcaaatgtgacacaaggatcggaagataaaacaaccagcgaacagcagattgtggctacagcagcagaaaccaagagccaggtgcttgatgtgaacgtgtcctccccagtagttgaggcactggaaaccaagccagaagaaccaatgaaggaagaggaggttgtttgtaagggaaaggagtcttgcaaagagtacataaagaacttcttggctgcaattcctctaagggaattgcaggctgatatgaagaaaggattaatggcatcccttcctcttcatcagcggttgcagattgagttcaactacacccagtctctacagccatcacctgatatttcatttgccgaagcggtgtcagttactcgactagctgaagttcccataactgagtgtgccacctaaaatgtatattgttaggaagtgtgattactctaacttgttttttcttcactcttgttttaatcacatgtatgttcttatgtgagttggattaactgagaggaaactgtctaaaccttattcagtgtaatgaagaggggtaatagggttgagtctatcttaagttagaatggaaatgaaaaaaaaaaacatgttttgtaatatttccaattttgaagctttgttcttatctgtatctgcctactaagtgtggcaacttccttcaatctgtaaatgaacaccttttactccaatttaagcaatgcttacttctgatatttacttttgtttggtattctcactctcaaaagattctcttttacttttgcaagagggtcatgtggataataagtccaaacccatatttttgaagctccaatttcccatggctcttggatttgacacaaggaatctcaattctcaacagggcttccattccattggattctggcttatttgaattgatattccatccaccatttttctgtatcctaaaagctgtaaaggtaaactaacttttcactttaagtaatgaaagagaaaagagcagcaatctttccaagtttggtgtacaaagtatataaatcaaaagattcttttacaatgcacacttgtttggaaattttttaaaagccttgcacgttcagtataactttgaatatatctcaacataaaaacgtttctattaggctaataagatatctccaagacgttactgatttattcccatgaacatgcactagtccacaattgtgtttgtttgtttgttttcacaaaccaagtatgtccaaaaagtcccaattcattttctttggcctaatctccaaaattgacagccaaaaacagctgtggacaaatcatattaccggtttttttttttttttttttttgttgaaatagtctttatttgttggctttagtgacttgtttttaggctaattaagatttttgccacctgaattttgacatgtaacaaattatgttccttgaacttttaaggtcgttaaaaatgtcccctaaactattgagattgttagatttaagaacttttgtctaattgcatctaattttactattccagtgattgtttatatactaaaccatactctctaaactttgatatctaccaaatcactctcgaactttgatatgtaataaatcatggtccctgaattttcatctatgttagactttttcatttaaaaagtccttaaatctaacaatctcaatagttcaggagtatttttaacgac

SEQ ID NO: 379451 - DNA, 4255 bp, Cannabis indica
ctaattaggtctcctcgagaactttgacatgtatgaaattgtgccttccaaatttttagattgtttaaaaattttcctgaactattgagattgttgaattcaaggacgaaagttaaggggcataaatctctaatataaaacaattttaagaatatgccataataataatacaaacaattgaagatgaaatatattatccaagagagagagagaactactatgaagaagaatgaacattgtttacttgccaagcagatgccagcaatataggtctccctttccaaccaagcaacaaacaacccttttcactactcaaagtgtaaccatcacaaccataaacagacaacatcatcctagcttgactcaaacacttcaatcccaacacttggaaccctgctctccctaactgtctcctccattgatcaactctttcatgtctctcaatcctacttggcccttcaaatgccacaatgttccttatctcctctgcaaaatgatgcctctcaatcttcatcctctgctggctatttctagggagactagcctcgagtgaatcgaaaatcgctgaatagtaatgaagggactccaagaatctcccaagaaaaaatggtccattatggtttgcatcttgttcaacaattgtaaacaatgttggagaaagtttctttatggattgaaggattgactttagtgaacctctgctctctttaacatacttgtgtaaatgcatgaagccattgaaaaacaatgcttccccttcttcttctcttaagtctaacttttctttagtgaaaagtgatggtgttacttgctctgatatgaggttgaactttaatgttacacctaatgagttagcttcttccactagtgaattcatgcttgtttttagctctgcaacaagggtttggtcttcatcaattaggcctgttattcgaagttgtttcggtgagccttcttgtcttgatgcaagagttctaatcaaagatggccattgaagagtatgttccattcccaaatcaatgatatgaagataatctttgtttgttgcagcttgacatatagcttcatttgcaaccatacacccaagtgcaatgaaaggagttgtttggtaaagtagttgaaaagcttcaatcttttcctccaaagaaacagaaaactccattgaaccattcataaatgtaccatttgtgttgacattgttttggagaaatgagagccttgacttaagtccattagcaaaacaataagacaccctttgtaaagaatcgccataaggagtaaccgaggaccagatttgattgagcattgagtctgcaagttgggtgtctctgcagccaacagcctcagcacaagctaacaacatgtgaaccaagtgaagcccttgatccacaccatgattagcctcttcaacactaggcattaccaccaaaccgacatcagtctcaacctcaaccggcgagccatcatcttgtggtggtgaatctttgttgttgttgttgctgctgctgttgttgtcatcataatgctcatccatgttgatgaagctatcgacgaattcatcgatttcccaagcttccaaaagaggagtattagtaccattgttgttatttggatttgttattgttggtgaagaacacatctcaatttcattcaatatctcttcccattctccttgctcttcttcaactctagctggacaaaatcttctaatggctagatcatgatctaaagaggtgtaattcatgttcaaagattccatctttagcttctgggtatgttgagaaaagagattatgatgagtttggtgatgagaggttgagagagaagagaagactttgtttggtttttggaaaaaaatgaaaactttgttatacctttaatataagctatatagaatattctcattgttttttctttcaaatgaaagaaaaaaaatgctatagaatcatcttctttatgtaaaagttgttatttttacattaaaatagaatttaattatgttcatgatgaattcttaaagatattaaatattcaatcaaaatcattggttggaacttggttgcatatttgtattgtagtaactagctgtatttttgtctatataaccaagttacaaccttggacatttataaaagtaaaaaaaatgcttgattttttaaaaggttgaattgagttattttagtccaaaaagaatttaatttagaatattcctatctttaaaatgaataaaataaataaaagggtggctataattttaccaaaagaagaaactttattggtcgcacacataacatcatcatcaatcttttgaaataattacaataaaaagagtatacatgacataaatatttagagttttaagtttataattgatataaatttaaatttatttttagcggtataagtatttaatgtttgtaaaattatataaatttttctttaatttcgtcagtacaaactctattattatcttaaacaaagtacatataagatctagattctaaattattgaatctagacttaaacatgtgtatcagctacttccaaatattttttaataaattcaaaatggagtatgtactgacaaaacttgtaaaaaattacagttttacaaacattagatatttatgtcactaaaaataaattttaaatttatgttacttacaaatttaaaactttaggcacacataatgctatttatcctaacaaaaaaacaattttcacataaatgtgcctaagctaatttattagaaattttcttttgtagtaatttttataataagatagaaagaatataaactagagaatcttaaatatgtgtgtgtgtaaagccggctccttattccttaaacatgatatatagttttggtaatctcaaaggtatttgtatatataaatatttatgatatgaatatgtgtggaaattgtgggagtaattggtgttttgcttttgtcacaagtcaatctgaaatgggtcggccaacaagcaatgagacatagcagttggcctaagcctggcctatgccatctttccactactcaatcaaactcatcaattcatatatttcattatttttctttcttttttagttcaattaattacaccaaatttttccaactttaattagtctatgtgtattattgctcttcacattgcaaaaccagttgtgtaataattttattgtatctttggttattttacatgaattttattagatatataatgaaaatcaatgtgaaaattagataccttatttttgggtgaaataaataattaatggtcaaacttgtttccataaagtcatggattaggtagctatagttggaggttggtgtttattttaattattagttagattgtgagttttaatacaataacatatgaataaatatatgtcatttcttattgggagttagttaagataattatatacatattaaaaatatcataagactaataaaatttggtgagcaattttgggtgtaaagatcacaagtaacataacctttaatgctcatataataagatatctatttatgaatatgtctttgtatgaaaagaccttacatttatggatctttataatgagatatatgactttgtcaattgtgatgatgaacctcccactatttactagtcaatgagatcttttataacttagtgacaaagccttggacctttaaggttttcttggcctagtacccattatattcatcctcaaaaaattgtcacattgtcattaatccaatccaaattttgttaatgaatagttaactagattttaattgatggaaagtgtaatgagctctattctttacatatatatgatactattatgtactttatacatgtgctcattactaagcccaatttcaatttcaggttaaggcaggttagacctgtgtctagggcctacccaaactcaggcccaaaaaagaagtttcaagttttttatgttgtgatatttttgtaaaatttgtataggcccatatatattatgcctaattttaatgtccatttttctaaaaaactttattaaactttccttaggcccaaaatttatcaggccaaccctgctgattacatccacacattatttttacccaagttaagatacaaaatgcattttcttaagaagaacattacatgtaattaattaactcacaaatgtattttaaaatgaattatatgtctaccaagggttgttgaagtctcaaataaaaaaaataataacaaaaaaaagtctcaaataaa

SEQ ID NO: 379452 - DNA, 9731 bp, Cannabis indica
tgaattttcatgcttgggtaatgaaacataattggtataattctgcagccaatgctatttactgtttcaattgaaattgcaataacttgtacaggaattgaaatttctctagattttgaaatggttgtctatatttcatgtttttatcagtgttagtttcggttccattttgtccattttcttaatcaagccaaaaatagagctctgtttgtaaattaatagtaatatgtgactattacttaattaagttattaatgaatgaatttgtgcactacagatagtgtatgacaaagacacatttacagtggttgacaaaataggagatgcagatatagacctaaaaccaaacatagagcgtttgaaaatggtctataaatgaatatgtacgtaccagtgcataagttatgctcttgcacaataaattagtggcgttggctaggtaatctctaaggaaaaggcttagacattttgatgttcaacaatttagctagcacctctatactaggttctttttctgtttttaacctatcatattttccaaattaattaagggttgttgtaatgtgaggtacaaaatttttatgggcattagttagagggcatctctttgttacttatttttacacttgcccaagttgaatttatatcaataaaataagaccattattgaagtagtcctccattctaaaacatagcgtatatctttgttgtcctcatttttctcagtcaagactcaagtaatttgtatattgacaatgaaagtggattttataattactattttgcatcaatataattttatctattttgaatccaaaatgttcttccaaattgtttttctaaatgttgcaactgtttttttttttttttgcatgattttgtttcaagataacagagtatattagcttgcaactggtttattaactattcaattttggactcttgaatatattagttaccaactggtgcaagtcaattggtttagcttgctgaaaagttgaacccttgtgtgcatataggtatttgataagacttgaataattttgcacctgattaaactttcagatacttataacatgaatgaaaaaacatgtcatttcacatttcactaatgatgtatagatttgcatttcaagtaccatagagaatatttttgctacaactttatttgcttttttttagtttttctccttcttcttccttttctatagtaagtatttacaagtaggagtctacaagattagggacaattaatgagaaccctcaactaatgttgttctttgaaatacaaaatatttgcagaatttgagatttagtagaattcttttgtaaactcaatttatattcactattttcatcaggcccgacctctttatttgtgaactctaatgcattatcacataatgcattagaattttatccacttatttattgtttacatcttatgttaatctctgtttttgtatattgatattaagaattgtgtcaacagtattgctctagatgactatcaattactttatatcaactacttgtatatctactacttattgtttaacaagtgacaattgtggagcaaacatgaagtccaccctagacaacaacgaaaatacttttacaaattgtacattcatccaatgaaataacaaagaactaattacccacctttctcatctttctttttgaatgtgattgtcaatttggatgatggccccttacatagtttctgtatattttcttgattgtacatattttgattgtatagtggttagtgtgattgagagtatgtctctttaatttgtatggtgacataaagatgtataatttcgtattttctcattttcttttttttttttgtgttgaagtgtaaataagagagaaagagtggggtgtgggggagacggagtaaggaagaagagggaggacgagaggaggcattgttcaaaattacgatgcagagatcttcttcaagggcttcaagactatcctcatcagaaaatttgattacctcttatactactaccactactactacgtatggagatactacctttgatgatttggaaccggagccgcagcagtgcctccccacctacgatcccctctcacaagctgccatgagagagcagtctcgtatcaaatccgcacataatgccatccaccttatacctctactccttattttttgcgccatcgtcctctggttcttttcctacccaggtttttatttttcttcctttaaattcatctttttgcattttatttgggttgtttcatttacatctgcaaatattttaagcctcatgaaaggagtggagtcatcttcattgctttactgatttgtttggacattgtgtatacaaatacaagcttgctaattatgggctacatatgtttttatttttttgaaccttactaactattttggaccctgtgttttgttaaagttttcgattggaccagctgttatatctatattttctaaaatggtacaaataagatcataaactaattttatgtcaaagtaaaacttaataatattctgatctagatgtgttatgacaaaactggttacattttctgcatctgttcgtgctagaaattgtcttcaagctggttatataaaaaaaaatacaaagtctattttatcatttgacaaaacagaaagtccaatcgttaactttttccaaaacacagggtccaaaatagtaactttagtttttaaagtccaattgtcttgtgtttgtttgatgctttggtaatatgggttctgaaacatatttgttctgattattttcttttttctcattaaactattgtatttgttgtttttgccagaaccaaagttatgatataattgctgtgaatgtgggtagcagttgtacacagattaacagcattcatcatctttacatgtagccacgaacaaagattttgtggatggcacaatagggacctgttttaatttgttatacaaatctttgatctttttgttttcaatatttattatttatttacatcttactgagaatgggtggtgtgtgcctgtctgattacgtttagaaaaattttgctgaaaatattgatttcgatccaactttattaaaagttcagtagttagcttattggtattgtagttttgtaataacaagtggtgtttgatttggttggtatgatttcattgatgcatttactacactggtctatacagtacaataatcaaatatatattctatcatattttgaacacaaagggggggatttttacaataaattattgggtatacatttgcacatacttgtttgagcttattcaaggatttgaagtcaaaactctttgctttctaaaggggttgacaatcaaaattggtatgctccaacaaaggtccaagcctaaccagcttaggtatgacaaaattgttcctaacagaacaaacaattggattgtcccattgcagagccaacccaacgagattggcacgtatggttagagggaacactcggggccatctctcgtttccatatgaactcagagcattttccactgattgtgttgatccggatttgattgcattggcaagctttctagacagaacaactgcatcttctagtgcacaacaagctccttgtcctagattgggagtcattggatgccacgcatctcctaccagcacgactccacctgaagaagcctgtgggctaatggtaggccacaaccaccggtcgacaaggggtgttctgataattgtgtcatctggggtttggtctatgatgctaagaagatcggtaggccagtttttgactagctctttagcttgcttcttaagttcagccgggtcagtgattttaggacctgcagtgacaaatccaacatcttagaacaacacgaaaatatgtagatgattcttcaatttgccaataacttcatttattagttagataaaagtagacctggagatgagcggttgaagcagacaaaccagtatactttagtaggagagacaggaacacatcctgctcgaagccctcttccataaatgtagcttactttaggctcaaatggttgcccattaggataatagccaagccctcggaaagcacaatgaccaacatactttggatcagagaaccccatccatttggctattggagatctaatcccatcacaaccaattacaatctgttaataaccacacaagtaaatgttaatatttatagctaaccaattgatttacatatgctcacatataaaagaactaaagtcaaatagttagtagatgtaatttaagtctaacctttgaagaaaatcgacttccatcaaccagttccaacatagtttctccatttccatttttactaatcttagacaatttggaagaaaatcgaagagtgtccggcggtagctgatcggcaagagtctccaatagtactcttctctcaacagctcgaacttcttggctattccatttatgtttacacaaaagaataataagtgaaagtacagtgtttactgtttctacaaactcttgagtgagaaaacataggtgcaatgttgtgcatgttttaaagaaagatcatgatcgtgtatacattatatgatatttgcggcataagtatttaaagttttgaatttgtaaccgttataagtttgatagatttttttagcgatacaaatatcaatgttagtaaaactataatttccgtttaatttcgttagtatatattccattagtgtcttaaatttataatcaaatatagtttttgaattttttgaaagaagatttacaataactaacaccacatattttcatctacatatgttttgtttatgaaactatcaaagtttgtaatgatggactgactatttactataattgaatatttatgacactaaaaaaattattggatctatactactacttacaaacttaaaattttaaatacagtaatataatgaatatacacaatatggtacctttcatcttcatccttgaacttgaaggagcgcaattccctcccatcttctgacttcaccaccatcctgcacagctgataccatgtacaagttcaagtaaaacaaaccagtggcacccaatactaaggtgatcactgatttacatatttttagcttaagatatgccaaattaggccattttcaatggcgagtcataaattcaaaattggtaaagtaatctaaccgaatttcaaaagttattctatttatgttgatgtctaccgtgttccactaataatactatttttctattaaatttttatatttaaataatatatttataatttaataaaataatataataataaagaacataatataagtgtaatttttagtgttatctaacatagagtttgccataaaaaaagagaactttgccaatatcaatgaaaaaaatagagatgtgtaaatatagtgtacccttgaatttcaaggaattgggttctgagatcattgccaactccaattgcatccaatactctccaaccattcttgaaaagggttagtgaagttccaccagtccttagtgactcagcttgctcaagcaccaatgatcgaacccctagcctaaacaatctcaagaacacatttatataaatacaatttacaattaacaatccacacgatttaattctgacattataaatcatggaacctgtggagggagactgcggtggcgagtccagcgattccggcgccgactatgacaacatcctccttttgagctttgatgattgggcaagaagagtaataataatggttcttgaaatttggtttgagtttggaacgattgagtgagagagatgggttcattgagagtgaggagaatgaagctgaagccatggaaagagttggttgtagtagtgactgagtggctctaagccatgtccacatatatatatgagataaggattggatcccccaacaagtgggaaggagagtagtgaaacttataatattttagggaaagagttatttgcacttatatttctgtaactctataggtaccgagttgttaaagtaaattgtcacgtagtaatatttgattggttcaagttataaatttttaatttttttttaaaaaaaaaatatatgtaccaataagaaaatgatacgtggctaatgacttgaccattaacagatatttacaaaatttcagaaatataacttaaatattattacggccaaaaattaaacttagtatttatttacaactgaaagttaaacttaggtatttatgttacaaatactcatcattataacttgagaatcactattggtgtttaacattctcgtcgatgtcatattgttattagtgtaattaaatatattatttttaaattaaataaataaatatataaaaaagagtattttcttagttaccaaattagatttatacatttttgtaacattctcaacaaaaagaaaaagagttacaaagataggactacattatttagaagtattttccaaaataaaaattaaaatttgataacacttttgggccctaaataagtctacatgggcccaatatatagcccaaaagccattgatatgagtgagctgacatccaatcaatcaccaaagctcaccgccatttttgctttctttctctttacttttctcacttaaatttctccggtcacctttctcctcctcttccgatcatccactccaacattttccctacccagtaagctatacttcaatctcctttaaccattcttttgcttttgcttttgcttttgcttatctcaagtttcgctttttttcttgttatttttcatctctgcttaaacgaataacaatgtacccatttattttttatgctttcttttttgtgtgattttgaatgaaaaaaatcattttcgggttactctgtgcaaaggctacgatcaatttcacatgcattgactggaattgaaagaacaaagtttagtttacaaaccaagttagtacatggtatttgtgtcaccttcatggggttttcttattattattatagttttattttattattacttttttaagaaaaaaatgaaaaaaaaaattccagttgggcctttgtattctcacctcagttttagggtatgctcatcttctgtaagttttttttttttggtctggtgcatagctcatatttgataactgattttcccttcttaggaggttcattcccaaattgattaatattattaatgagggtatctttcattttgggaaataaagttttagttttgctgttgtggagtagtaatttttctaatcaatcctatttatacactcacattcagcatatatttatgtttttcaagttattgcagctcaaatgttaggagttaggattgtttagagatgtgtggcaaaaccctaagaagctttatgtgtcaaacaatcagtttgcaatgttatatattggtacaataattatgtatatctgaatgtcatttctcaagttgtttggcttttttgtttctgactgtgctatgagtttagtcatatgctttacttgattatactttattatttctacattctctagttttataaatgtaatcatatcatttgcttagttatcatgtctgatgatttgtatcactctttaatcatatcatttggttagttatcatgtctgattgttgtcactctttaatgctagttgagttgctaaattatattctaattatctcaagtgtcttcatgtgttgtttacttttgatttcttgttaaaggaggtgtagtgaaatggatttattttgtaggttaggtaaaatttcggagtctagagatggaagctcgaagaaaaagaaatcgtaagcaaaagaagcagaagcagaaacaacatattagtgagagtaatagcgagctaattagtgtgaattgggcagaactccctagaactgtacttgagattatttttgagaaactttcagttgttgattgcatttcggttagtaatgtgtgcaaaccatggagatatgttttcgcatcagatgtttcttcttggaaaaggattggcattccatccttaataatgtgtggtcaacatagaagagagaagagaacttgtttaagtatgttggagaaacgagcttgggagatggagctacctgaggcacataagaaatattgttggggttccttccatgattggttgatcctagtggataattctatttatctctcggttgaaatcagtttgttgaatccattcactagaagcacagtaaaactacctagaacatgggacgattaccataagatagtcctctcagggcttccttttcagaaaaactttgtttgcatgcttttgcacaatgaaaggcgggaaattgctgtttgggtttcgggagctcaatcgtggaaacaatttaaacttgttggtgaaccatttgaggatggtattttctacaatggaagtttctatctgttgagcaaggatgatgaagtttgtcaaattgacacagctagcatttttgctgccattagcgaagataatgctttggtggatgcttcagctgaggcttcggtggatgcttcagctgaggcttcggctgatgcttcagctgaggcttcggctgatgcgtcagctgatgcttcggctgcttctgtatctgaaatcaaaattcagtcccataaagtaagtaggatgtcaggaaaccctacaaatgataatatgttgaggtatcttgtggagtcatgtggagagcttttgcttgtctgtaggtttttcagtacaaatctcggtgctatacttgaaacacgaaaattcgaagtctatattttggatgttggggagatgtcctggaaaaaagttgaacacttgagggatcgagtattgtttctaggtaaatgttgctcaagatccttgtctgtaaaagaactcggggtcccaatgaccaatcgtatttacttctcgaatgacaatgttgctccttggtggaatgaatgggattctggttatcttcaaggaatgtcatctcgtatgcgtcttgataattctggcaggaaacattggggcatcttctggcttggaaacaaagacaaccaccacttttgcttccggggcgatcgtgacaattggggacccatctggctcactacacctctatggtggtattgtaacaatttccttacttactgattagttaattatgactcatgttgatgatcttggcaggttaggggcttcttgtagtaacaaaaatgtgaatgctttattagcaaaaactcaaatggagaaagcttgtttcgggtaaggagctatgaaaactatgatgagtgaagttttttgtacatagttggtgtattttggttcttccttagcttctgccttgttttaacttgtataggctttgatccaaaaccttttgtttattgccttgaaatactttcaactaagtatatttcttgttatgtcactcatgaacattatcaatccactttttcttcattattttgtttctttgctttttgaataaatttaatgttcaatctttttcctctttagtggaacaagactagagttgggttgttgagataactaaagtaagagcaataataggtgggttaaaataaaaaagtgatctttttagtggaccagaagaattatttgattatgtttaaaagtaggaaatttcaatctaatttagaaaagggataataccattttagactttgtatttgtaaaaattactgattagattttttattttgt

SEQ ID NO: 379453 - DNA, 3157 bp, Cannabis indica
ttggtacatgtcaaagttcaagaagagaaaatactaattagttattagcctatatatttttttaatgttgataatagacatatctataactataatacattatcatataattagtccaatatgtacacaaatattaatagcggttgaaagataaaagctaatcaagtagctagcatgcagcttcgtcaacatatattaatacaaattgtttaatttttctttataagtcattatatatataatttatatatatattaaaaacattgcttaagccttaagctagcgcgttagaacaaaaaccatagatgccaacatttctattttattcactttttaaattttggaattcttgtggtttttcatatagttgattgtttgagtatctagaattatttggtatcttataaatacttatcattacttcgatctattataattaacttaatatatgtcaaatatattttaatttaataaagtttttacaggaaattaattaaggccaaaattcaaagctcaatcaaatactttattaattacttattagcaaatcatcttcacgagaaaaaggcagtaaacgtgcatttctttttgggtaaataagcacagattaatggtaaaggatattagtggtgtttagaatttttctatgcgttaatattattattggttcaactaagtatcgggtctcatatagtttaatataataacttttagtacgagtatcgctagtcaatcacaacacaacgtgtctagaaaaatacaaggcaccactcatacctaataataatgttcataagcaaatgtatttcatcttaaactttcatgtacatcatatagctatttatatcaaatagcccctctttacaatccttacaaaccagacatttgaaaataattggtggaaccattgtctatacatcctattttctctatctcttaaagagtgaattttaatacttacaacttacaaggcctgtttataacacatctaaaaaactctttgcagttacaacatcactatcccataatgccttaattcggattctccaaatcatatacacaaaaacatacattaaaaataagtatgtaaatatgcattaatttttttacaacctattttacataattaaaaatatcatatacataaatacataatatatatataatttggatatgcaaatatttacgtcatataatatacatattagtggtttattttatatttattttcttgaagaaatatattagtggttcttatgcatatataaatattaattgtagagattcttcacaccaaaataacaacaacataatatatatatatatataagtagtacagtatatatatatatatcatcacaaaattacagatattgatcaatattcatcaaaggataattatatataattataattaactaattaattatgaggtcatcatttggtgaaactcattaaaatcaaggacaccatttccatcagtatcaaagactcgaatcatagccgcacaatcatcaaatgtcttggaatgatcgcctaaacgagccaacatcctctgcaagctctttggggtaatacaacctttttctaactcaaacatctcaaaagcattcttcaaatcatcattaatatttataatactattattactactatgatcatcatcatctctcttgatcatctttaagaagtcttgatagtcaatcaaatcatcaccgtccgtatcaaaatctttgatcacagcctttgcttcttcaatagacatgtactcacctattgatccaaaatcgatctcagctctagggcagatatttttccatctccattgctatcaaaatgaccaaaaactagtctcaactcttcttctttcttcttcttcttatcatcatatgatctaattatgttatgatcacgtgcagggcacgtgagaggtgaacatacagcatttggcgaagctgctgacgtggaagatgatgatattgacaaagatgatgatgaacggtctacgattgatcaagcttagttattgagacccttgttgtaaaccatctttggatttcgaaccaactgttggcacttgtagtcatagtttaatataatattatatatatatacgaaactaactgtatttacaaactataagagcctaagagagatgttatatatatatgaatgttatatgcatatatatatatatatatgcatgtttatatagaagaggttaataggtgatgatgagctgagaaaatgggagtttcaatgaaattgcttattagtattattttcataccaatttagggtttttatgataaagtagtttatggtgtactttttttcttctttatcttttttctttctttgggtgaaattattatttggaaagttcatggcaatttcctcaaggtccacaaaattgactgtacaatgtcctttatgacaattgtttaacaaagtgttgttattattataaatataggtggaaatttgtcccatattgattttgatttcgaaacttaaacatagaaacaaaggcaccttaattatgttttgagaatttaataatttagttaaacaatcttaaccctttttttattattaatattggtataggaaaaaaagctggtttttttaataatttttgtttaaaattaatgattttaaaataattattgagcataaacgaaaaaaatattatttatattattagtcggaaaccaattaataaaattaatggtccataaatgtttaatgcaaaagcaccaatattatttggtggataatcacaatttacatatggacatgatcacatgatctaattctatgccacgtaattagaacgatcgaaatatttttttccacgtaattaattgttaagtaataaatatacatttatttatgttgattatttttaattattatagttatatatgcatttttatatatattttttctatacatatttgtcagccaaattaaatacgtaagtactattacgtattacatatatatttgtaataataagtaagtattatctctaaaaaaaaaacgtaaaatattataggaaaattctacaataaacaccccaaaaacttgaaagtacgggtacgtccgaaaatcctttgttgttattggctattattgtttctgtgggactagt

SEQ ID NO: 379454 - DNA, 3344 bp, Cannabis indica
aaaaaaaaaaaatcattttaatctcttctttagtttctaatgtgtcttcacctccatcaattatttttcactccttagtgagttgacattacattgttctttcgggttgacaactgtaacactaggaaaattaccgttcttttgactaacactcacagcattggtcaactgtcccacttgcacctccatattcttcatgaaagcagtttatatttagacaaatgagttctcttatgttactccaacctcgtttcattcttattaaatctcttgatggtctctgtcatgaaagtatccaaaatatcttctaatgactttatttattgagcattaaacccaggaggcggttgcaagatatttttagtattaccataagaaaagttctcatggtttctcaaaccttgatggtagtagttagacattggagcttctcagtagttgttatatgtattgtgcttgttttatactcatctcagtcccttgtgatgtagatggcatcaacattcgcaacaattgttagattcttctaagcggctagggcaaccacttaattagataaagtagagatttgagctactatagttgtcattggatccacttcatgcaaaccagccacctttcgtggagtatttctttcattaggccaattatagtgattagtcgccattcctacattaaattaatggcttcagttgtaagcttagccaataatgctcctccagcagcatcaataatagtcctagttggaccattcaacctattgtagaaaattaaaacttgcatccatttctcatagccatgttaaaggcaatgacgtaataagtctttgaattgctcccatgcttcatagagttgcttagaattaaattgtctaaactgccaatctcactttacaactgtgcaaacttcgatggaggaaagaacttcaccatgaactttctagccatatcatcccatgtagtaatagaacctgactagatattgcaaccaatttcttactctatcccttaaagagaatgtaagagatgtagtcttatggtatcgtcagtaacactatatatcttcactatatcgcatacctctagaaatatgactaaatgaatattgagagcttcaatagccaacccaccaaagtgattttgttgcaccatattgatcaaagcaaagtaattcaaaattattagcaaggatcacttaattagctataccagtcaaattttcattcaccataagtaggcaatagtcacggacaacctgtagttgtgcatcagctgcaacaggtgctgattggttgttattaaggccattgttcacattaattatgttatttttattaatggatgccatggtgaaatctatcctttttttttttgctttaaactactttaaagtttttgtaattttaggattcagtggtgcacgaggagtagcatttagatttcttcgcataaactgaatatcaaagcaacaaacaaaattagaaacaaagtaaaatctaatataaagaaaaaaaaaatttattaatattattagcaataatttaaaaactttcaatcccccgcaacgacaccaaaaatttgatacataatttttactgaaagcgtacaatgttgttatagaaaattttaattataataggttgtcaaacccacaatgaatgattattaaatattatcaattactatactttttaggttttatgctttttaattagacacttcaaagtaaacaataattaagaatgaatgaaataataagttaactgaaaagtaaacagacaaacaacgatttcaataagaaaataaaaacatagagcattgatttctctattccaaattatgaatctcagtttattggttgtttcaatttattgtataatttgtattttcaagagccctaatgtaatatattaacctctctcgagtgatgatagaattaacttaattagctaacaagatatctctattcagtattaacaaacaataataaagcaatacgattctctttaaatgaaattcaaacaattagtgaaatctctcaatctcacacatttcctatgtcatacaactctaagtctgattttaaattacctctctcaagcgtaaaatctaaaatctttgtattgtttaatggtgatcaagcattagcaagatgataattaacataaaattgcatacaaaaataacaagaacaaatatgggaataatctaaaaactttaattcaaaatctaaaatagtttcatcaatactctagaaaagagtgtttagtagtgtttagttcataatgacatacataataaccataatgacatacaataataacaacaataatcatgtttataattaaacaactaaatagaataaaatgactctaatgatagttgatgatgattgcttggaaactctttctcttacttcaatgtattttctgatctctaaattgttttttctctttctaattgtccaaagtcaatttacattattttttttatagggcgaaatagatagaaaagattatgcttaaaagtaggatttaaaatttaaaattgggctagacatgtcacttggaccttatttccaggatccctgatcttttttatctgccacgtgcgaaaataaatttgttttgtaagtgaggcgacatatcgcctgaaatttatcttcaggatttcctatctcgcttttgtccgcatgtcaaatttcattcgcttttatgagtttggcagcatgtcactggaataccaatttctgtttttaagttatttcaatcacattttgctttctttttttgacatatatctcgattatcatttttgtataccatattcataatattattatctttaaatctcaaaattgcacaactacaaaaaaaaaaaacttaaaaaattaataatacttttaaataattagaaatgagtgtacaaatatgtactcataaacattttttagtgagagatataagatattgtatcaaatattgatttacataaaaagggtttcttcttttgatcatcttcaaatgattaaacaaattcataaataatttttcagaaaaaaaaaatgaaaacactttgcaaataatatattcatattttgaccacttaaaaatatttagagtgataagagagtaattatagtgcaatattataggcatcgacaatatcttttataatttagaggtggtgttttacgattgcgattagttatcgatattctataaaaattaatacatcaaattgttagatactaaaactatatatctttatatattaaaagtgcctatctaacggcatttcttggtttaacagaatatactttaaaaataaaagaatattctgtta

SEQ ID NO: 379455 - DNA, 4753 bp, Cannabis indica
gatagatagagagagagagggaacgaaggggttcagtttttattacatataataaattttttttatatacatatatatattatttatttattattttatatatatatataaaaatatttgactcggtcaaaccgagtctttacaataaatgtcctaagttcttcttcgtctcggcttctatcagaggagaaggaatgctatcgagagtgtcttgaataaagataatatctggatttctagacgggatttaattggtacaaaattcatcgacttctttgaaggaatcttcttgagtgcgaataagggtcacaatcttgactgcgaccacctcatttaggataggatatctaaagttgatcaggctaaacttgttaaaggccctactcgtgaggagatccgtaatactccttttttcatgagtaacaacgaagctccgaggccagatgggatgtatctgcttttcttcaagcactattaggggactgtgggagaggatttttgtgaagcagtcttagactttttttggatgagcattatgcataagggggtcaatgccacgaacgttgttcttatccccaaggtccaaaatacgaaaagtcgagctaaccactatagacctatctctttgtgcaatgtcatgtacaaggtcatttctgaaatcattgccaatagaattaagcccattttaccctccctaatatgccctaccatgcttttgttccgggtaggaataattaggataataatgtgattgtctaagaaattatccactctttcaaccggaaaaaaaaagaaaagaagtttattttaccataaaaataatagaccttatgaaggcttatgacaaattaagctggagatttatttgttttagggcaccttagaagtttcggagttggatcttccaatgtataacaaccacctccctcaatatttgccttaatgggagacaattagggaagattatgccttcttctagtcttcgccagggcgacccctgtcgccttacctctttatttggactgcgaaaattttgtcaagacttggtaattgatgcctagtgtaagggcactattaaaggtattaggcttagtagggggtcctattatctctcataaattctttgcgtatgacctaatcttggttggaaaagtgaatatagaagaagtcaaaggctactggcaatgccttgataggttttgtgtctggtctggccagaaagttaatagctcataacctctatcttctttagtaaaaatacttccaatggtaggaatcaagtctactctgggaatagaatcccctaattataatatcaaatatttggggttacctccaggggcggagccaggacgaaatgtttaggggggccaaaccatattaaaatttaagtgataaatatttcaaatatatttaagttgataattgagattaaaatattaaatgtctctcttgcatataaaataaagcttaacaatcacgctagttacaaaaatagtggtcggtattacttggtttgaaatgagagaaaaaaaaatttaagatgatatctaattctttgtaaggcagttgtgttgatcttataaatttttaatttttatatttttgttaataaattatgttgtcggttgtggttttgctaactagttatattataatatttattaaaatctaataataaatggaaagtaataaatggtttgcaaactgaaaatgaaaattaatcactttaatattattagtattgttaaaatgtattatattgaccattctgaatgagtacaatatgtatatataaattcatttttcttattctttgacattatttttacttttcgatttcaatttcattgaagggaccatgtcacaaacaaataataaaaaagactcacatacattaaaaaagaaaaaaaaagaatatgaaaagaatatatataacatattttgggtgggggggccaaggccactgtaggcttgtatgtgcctccgcccctggttacctctctttagatccaaacaaaaggatgtcgacttcaattttattttggataacctcgcttttaaatttcagggttggaaagctaatacgctatttaaagcaggtcgtgccactcttataaagtctgtgggtttatctttgcccatgtatgttatgcatacgactaaactttccagccgcattgctgctaagattgattaatggtttgtgacttctagtggagattcgaaaagggaaactatggtctatatctaaaagcttgggataagatttgccttcctaaatctttaattttcaacaaattatatatattttatacttaaatatttatttacgcgagccaattaaattgtgtcacgtatacaaaatctccatgtggacaatactctctgtacacatggatagccaacatgacacttaatattaaaaagtaactaatcaaatccgcacttttacggatcaaattgtggattgaatttgagctattgtacagattgaattatatccaaaatataaaaatctacacttaatgcagatcaaatgcagtaaaatagtataaatttaattaaatgaacacccctaattatacaatatatctcctctaagttaatatattataatttggtcgtctactttatatctaacattcaatttttctgtgcagtaggaaaaattcctaggggcaggtggcatatatatatttattgctattaatataaattaatattatcctacatattttattttaataaataatatgaaaaaccgtacatgtacaattatcataatttctctgtaacataacactagtagtaatttttcttttcttcgtcacaagcgcgtggaactttcctttccacgcttataaaaacatcaccacaaatccctctctctatctctttctcctacttttcccttaccaaactaccttgtaccttttatatatatatatagcttagaacttgtataaatattcatgtatatgcgcatgcatcttcgcctaactctgtcatttcatttctccaaaatttctctctgtctaaaatctcattaattaatttatatatagactttgaatgaattcatagctaggtgatgataagatcatattaatggaagataataatggcattattaatgataataagtcaagaatacctggttttagattctacccaaccgaagaagagttgatttcattctatcttcataacaagctagaaggtgaaagagaggatttgaatcgggtcataaaccgggttattcctcttcttcctatttatgaattcaacccttgggatcttccacgtacgtttatatatatatatatatattaatttttgttaatatattgtataaaattaatataattttgtgttaattaatatttgatcagggtattcaggagtagcatgccaaggagatccagaacagtgtttttcttcatagcaaggcaagagagtgaggcaagaggaggtaggccgagccggctaacggagagtggctactggaaagaccaccggctctcccagctacgtttactcttccagaaaccgaataatcggactcaaacggaccatggtattctacaatgggagggcgcctcatggtaccaaaacccaatggaagatgaacgagtataaggctattcaaggagaaccaactactactccttctgcaacaatatctcatcttcctctcgtatgtttctatttttactaatattaattaattacacccaatttatatatatatatatatattcattattttatgataatcccatgattataataaatcatctcaagattcttgatatatatatttttagaataaatatgaagccctaattattaataattaatattatttattaattctacaaaacattaatagccttaattctccaatatccttcttctctcaaatcaatatataattttcacatcatgatctgatgttcatcttttcttgtagtgtattatatatatagtattgtatttagtattatcttaaattgtattatatattgtattttatacaatactatattaaattataatatccaaatattaagtagatataatttaatattaagtacagtactatattaaaatataatatctatgatacaatataatattatacaattctaataccatgctgtataccaaattaaataattttttataatacaatcattgagcgtatatatatattaatataacatatatgcatatacagacgaacctaattgaagcctaattagggcttatgcccaccctcattatatatttttcttttctttcacaaagtttaatgtatattttttcaaagtcttttatgtgtatattttggcatttatacaatatcattttcatatgttgcaatttagtacttttaatttcatgcaaattttgatatttatgtcccatctaaattttgttattaaatttgctcctaattaatgaacaaaatttctgagtgtctgccgtatgcacatatataaattatattttttaaataattgttaagtatacatataacctgttagggtttataaaacacttaagaaatatataaatcacagatccaaacatattcctaaaagtgctttaatatagaaaaccctaaatcataaatctataaagcctttgctaaattaaagaagaagaagatgataaaatatgagcggaagcactaacctgaagccattgttggagattgcagagaaggttttgatcttccaagaat

SEQ ID NO: 379456 - DNA, 3966 bp, Cannabis indica
tctctctctctctctcgattctgtaatggattcgttcgatttccatggcgtcgctgaggagaagacgagttcgacatcgaaggagtttttacaatcgcattataagtctcgcgaagcttttccgtttcgcggaactctgcgtcgctctgtttcttgtcatgtggatcttcaatcggctcccactcgccgtcgagatctccggtggttactttcgccaggtttcaagcttcttaactagtcctctcttcgttttcttgctctgtaacatcatcgttgttactatcatcgccaattccggaaaactctctgatcaaaaccagatcgccgacgatacagagtccgaactctacgagaaaatcgttaagaacagcagggactgtaaaaagctaaaaaacgatatcgttttgagtgagacggaagggacaacggtctacgaagacaaacaagtgatatctgaggtgaatacgacggtcgttattaaagaagctgaaacagatcacttcgatccgtattcggactttccaaaagtttacaggcgatggaaatcggagcaattcgagagagaatgcgtagtggaggaggatcgccatcatctccaacgatcagaatcggagaagtgtatggagatagtcgtttctgatcgcgaaagacatccgatggaaaatttagcttctcacgataaattgagtgacgatgatttcaaccgtacggtagaagcattcatcgcgaaacagttgaaattccgtcgccgggagcacggtggtggtggtggttgtggtgtagagcttcaacatggggatttggaatacgagaagtctgaggtgtcgtgttcatctcaatccacgatcaaaataatcaacggctgagattaatcgcaatccactactactactagtctactactactaattttgaatgagcactagaatttttagaataaagataatttctgatcttcttctttatttggctcaaaactaaaagctactactactactgctagtctaccacaactagtttttctgtaaatggttaatattttctcaccaaaaatggagtaaaaagttaaatctagtttattataaaaatatttactgaattattgaagaacaaagaaagaaagagaatttattctgattttgaaatcagaatatatattaatgttcttggatgagattaattagtgctgttcattaattggatcagatatatgtttcttttttttttttttccaaattaatcttgttaagataattgggttggatttatatataatacattactgttatgaacttatgagatgaagtaggaatagaattgaattcgaagttggaataaagtgagaatgtgcgtgaatatgctttgatatgatattgtacatacactcaaaaaagttatccaagaatgcaaatttcaaatgaaataaataatactatacataaaaataataaaaaactacgtagtatatgtaaaaataatagtactttagaagcaacaacataataaataatgagaaagaaaggacattaaaggaaaaaatatatataattattatatttttttcgtattttttttttgaaagcattttttttcgtacttgtaaagcgtaataatgcacataagttctaccgataaatttattgagccatatgtatttcttacctatttatatctaaagaacaaaatgattattactattaagagctttgttaccgtgtgttgactgttgagtataattgtcaaatcttaataaccatttccattataaatgggatgagttacacgtaatgataataaataagtgggaagggaaacatgttgtaataataataaataagtgaccaccatttaaaaaaacaaataataataataattaagtgaagagcactccccaataataaataagagaaaacaaaaaagaagaaagaaagaaaaaaaagagcacatatattagtataacaagagttttcaatcatatataatcaatagtaatgtatttatatcaatatctctcttgtttaaatgatgatataaagaaaagatcaagaaatttatgtatcataaaaggctagaatgaaaaaaaaaaatatcatgaatttggtggtgttatatacatcaagattattagaataaattttcaaaatacttaaatgataagatgattatatttctttcacttgtattaaaaaaatattaaattagattatatatcatatttttatataatattatgaaatgttaatttatactaaaatattatattttaatatgcccataaattaataccacatatagttttatattaaaatattgtataaaatataatttaatataatattatataatataatacgatattatattattaatactgtgtactaaacactcttgaattttatttatctcatatttattaatattttttcaattgatgcatagagtctctaagaaaatatgaaaagaaaataaaataaagggattattgcttgttatttcttgggaaatcaatggaatagataaaaaaatagcaactatatatgttgatcggatttcaagtaataatcacacttatattgagaaaagggtgtagattccaatcattaagttgtcaataaaagagtgattgttcttagaaaaccccccaaaaacaatatgcatttgtttaatcaagcttaattaatttctagtaatcctactaattaagcatgttgccccacacttatatacataatgaaaaatcataactaaaataaatctgtagtggatgaacagtattaattaatagacaattgagtcattaacttctggatttttgtactttataatttaactaatctatatacctttcaggggagaaaaaaagtcacttttaactttcccatcaagagattagattctaaaaaagaaagagatttttcacttactttaaatttgcatgctagaacttttaatccattttccaatatatatggcaacatgtgatgaaaaagtataagtaaatggggtcttctaaagaattttacgtatcttttatttaaaatttacttttgcctccattaactatcacactttaaaaaaaaaaacattatcaaagaagagcattgcaaggattttaaggtatccaattatataattgatgaaattttataaggaatagcaattttttctattatttattagattattaattaattatttttttttaaaaaaaatttttaggcatgttgctttacagtggctacaacaccatataaatttaacaattttaatatttctttctttcacctcactcaaccacgacctatacctgacaagcaacctccaagaccacccttattaaacttgctattgtagaaatactaaaaggtatagtaatatttagcattagcgtaatactatatcactatagcgtaatactatagcattagcgtaatactatatcactattgatggaattcaatattattaggctaactacttataaaaatcaaatttacagtggtaactacccttaaccctacatgtgacaagcaactcttacactaccctcatcaaacttgtccttagaaaggcacagtaatgtcaagcaccaacataaagtgtcatatttactgatagaatttaattttagattaactaaataagacattaactttacggtgtcactcgttattactaaatattagtggtgcaatgctcttaaaataagttatatgtaaaactcattattaaacaaatcaataataatatagcttatttatcttttttttttttttttgtgttattaagcctttaagttgctctttatttacttctaggaatatttattaaaataaccgatttaatttaattcgcacgatccaatctaatctaatctaattcgcaaagtatatggatattcacacttgtgcggattaatgttgattgacatgtaaaagtaaactgatccaattcaatccacacata

SEQ ID NO: 379457 - DNA, 2174 bp, Cannabis indica
aaataaaataaagaataagaaaataaaataaacaaactcaaattaaatcacgcgtatttaagattttcgcttttattgctttttttctttgcgggaatttcggttaaataaactatttttttggacctaatagccttcattaattcaaattaggaaattaagatataaaattaaatgattccccaaacaaatatacaaaaataaaaataggaaactgtaatgccgtatttaaatcactcaaaatatctttatttataaatgcattatattaagggcctaattataattaattgattattcatacgtatttctcaattcatcatcatggttaggagtagtgagagaataaggagaaagaagaatactagtgaagaaaaagaagcagaagaatcagcatttagaactattccagaagaattagtcatccaaatactaattcgtctttctgatcttcgatttctgattcaatgcaccaccgtttgcaaattatggtattctctaatcactcatgatcatcaatttattcctaactttgttcaatttctcaaccatagacgacgaagacaatatgatgataataattatgagattattatgccatatactatattgtttagaaacagtttataccatgacacaaatttttatgatttatattctgaagaatcaaaaatcattcatgaagatattgtgaaaataaaaaattgttacgaaagtgatggaactgttcgagccacatatcttgacatgttgttggtatcaggagacttacattctatttacgaattatacatttccaatccacttacgaaaacatggatacaattaccttctcatcacgtacgtcgttggctcgattgtggatttgttgctaagccaaaaattgatcgatttgatgataatgaagaatacaagtacaaggttgtgttatttgataaaagttataacaatagaattgttagagtgatgaccttttgttcagaaattggagaatggagtatttcgagctggttgccatactcgttgttgtggccaaatttggtagaatatccaaagcttgaagggtcagttgcaagtaataatggaattatatattggttattgaaagtaggattgaatgaagttaaaggaatattctcatgtaatccatttaaggaagaagttgatccaaaacggtttcgttttatagagtttcccaaaatttgtgttgagactcatagaaacaagaaggtttatagagacagaatttgcattggaattgttaaagggcaactgcgtttgtctttgattatgaatgagggagttagctattttcgattgagaatttgggagttgaataatgatgatgatgaagaagaattattatggtgtttggtacatgaagttagactcagaaaaacaacaaaattggatagaacatttgttcatgcttttcatccaaacaattctgatgtaattttcttgtcacgaaattataatttatacacataccaagtaagagaagacaagtataaattgcatggtagatttccaaatgccaagaataattcaaattttatgaaaacgtgtctacctgaatatgtacgtgcctttgttcttgagcaccctccttcttccattcctagtcccccaaattcatctccatggtctatttagtaaagcttcatccataatcattagaaccaataattcctttttctttctttattaatttcttgtcttatttctagtttgttaccagttactctatttttataatttcatcaattaattaagttttgtttattgctttggtttcatattaaatcatttagattcattttgttatttatatatatatattgatttattagtacttttgctaactttatgggatcaaaatctgaaaaaaagaaagaaaaaaatttaagaaaattgtataaaagacttattttaaatataattgtactcaagtttcaatatttgtttggttacattacaatactcttatgtatattttttgtctaccctttttttcttcctttaccttactctttttctctcctttcttatttatctcttctttcaagtttcaaaaataatttctgttacgcagataaacttaaaaaaaaaaatcattgtaatcaataatttaatgtaaacatttcaagatatggaaaacatatatttttttt

SEQ ID NO: 379458 - DNA, 4641 bp, Cannabis indica
gagaaagaacagctttgtcagctaaaatatgtcccttttaatacatttacagagctgaattattagagcatcatgtactagatatcattacacgagagacttaaatacagacattgttgtgatttgccttgtcgatatttattactaactctccaatctcatatgacatcattacaaagtatttctaacacaggctgctattgatcatcacaatgaaaagaaaagtcttcttagtaaattacagcacccttgacaattatctcaaatgagagtctttactgattgaacagtaaaaaaatctaacaagataatagtgaaaatcttgaatcaccaacctgtaatgagagaatgacattgacagcatcatataaacgatttggctgtacaggttcaccaacaatatctgatggaagttttgataatagaagagcagcctgagaagtgagacagagaaattataaaccagtaaataaaataaatgaatcacatggtatgttgagtgcaatcacttttaagccttctgctgtacaatctgagatgggccaaccatgatcacgggtggagaaaggccaagcaccttttgaaatgtggcgataccaataatcaagattacctgggcaaatcttctaaaacctataataaaaataaaaaaaataaagaaaagaaaagaaagaaagaaagaaagataaatacatattagtaaatagtcagctaaggagaggtggggaaaaaggcgtcaaattggatttggaagcattagttgaatttagaccacagaaaagcattgacctgcgagtttttaatgaaatcatgtgcctttcttaaagttgtgctgtattcttggacaagattggttgacatgattgcctgagcagcaaaagaagtgtcccataattgactcccattatacccctgcaataatgtcatgtatttaaataaagttaacatggtattcaaattgttagttgcaaaactcgtcgtgtttgaagcaactatcaaatgttattagaaggagctaaaattacaaaaagccaaaatcacaaaaaccgccagtgacttaggctaatggccacaagtaacttggagtctcactctatcacataataatcttattaagaacacctaaatagaccaagttattggcatcttccaacaagatgtgataacaaaacaaacaaatatcaatttccttgtaaggtgtaaaattctacagcaaataatatgcaggtatcattctacagcaaataatatgcaggtatcattctacagcaaataataggcaggtatcacgctatgatttacaatagctacataagcaatctactatctaaaagttaatttccgcctttgttcttcacttctatacaactcaaagctgtttagtactcagcacaaacatgaattcaccaaaccaaaagaaaaatgtgtaacataaatataagtgctagaaaaaagatgaaacatttcgacctgcattttcatgccatcttcagcaatccatagataatcattgattcttggaaggtgcaacttgaaagcctctgaatttggatcttcaacccaacagcaaagcatgtttaatacctgtaaatcacagtaataattatattccttcattgaaataagtaaatggtttatgtgttcccttcttaacagtagcaagttttaacagaaaaatattaccaatagaaaacatcgtcaataccttattcacaggtccaatgcaaatataacgagtattctcatcttcatagtgtatatgctccattgctgcgcagagtgccttttctctcaattttttccccggccaattcatcagaactggctcaacagccttgtgaagagatgcccaaaggatatcttgaatgagcggatgggggtaatacaaatcttcctgtaaaaacaaacgtttcactttttgataagagagagccaaaaagattctatcactaattctgaactccgagcaactaaaattggtactttatgacaaccatgaaatcattttggttattagaatcggatatgcatttttctgattgactcatgctaatgttgtgtatacaagaggaaactgtttgttgtggttccaatctgaatctagggaaattatatttaggatatactatgatcaagactcgaacaaatttgctccccaatatctccaacatgttgaatatgcactatgatacaaataagagcataaatggtatatctctagtaagaggcatgagctagacttgaaaaacagtatctttctgagtatggccaacctttgcacatagatttcgtgcctcgttccagtctatttcatgatacggaacagtgaagagctccttcctcaaagacaaaaccgttggtgtgattggaccaacaaacctcttcccgtacaagtaggacattggtaagtataccatccgacagtgacaccacatccttcctgtacaataaaaagaaaactttaagcatttctattttggcaggatgaggaaaattccatttcacaaacaagaaaagaaaattttcactcaacatatgtgaagtcattcggcatcactatgtaatgccacattggggaaagaccaaaaaaaaaacacaattgcaacaaatttggactttatgaaaaggagcgaagagattctcaacaataggagaatattagaaatcctaaatcctatagacagaatttggaatagaatgatttcaaagatataagacctggatgaataggaaggatgtacggaagaagccatatctctggaggcaggggattattgccagaccattcaaagacaccaagtacctataatcaattcatataagcatcgtgatataattaaatgaaaacgcgagagcacatccaaaagagaccactgtttagatcaagctacatattcaagtacaaagaggttggagttcatttctcaactgataaccacattttcccccatgatgtaattgcagtagcacccccatggtcaagaatccatttacgcccattctccattgccccttgcccatcattaggctcttcaccaagcaatcttaaagtaacatagctcaaaacggaaccaaacatagtgcttgacccttcaatgtgcaaaccccaaccaccatctttgttctgcaatttcatttgaatcaacaaaatttcagaactttgtacaacaaactatcgcaaagggtagaaaagctaaagaataagtgtgttcattggctcaagttcaatactttttcaataatccatcatccaatccaaatccttatttttatctataatagtccaagataccaatatattactaaaatagtataaaaatgaattagtgtgcagaataaagctaattttaccaagtttctatgatatcaacagatgatgtaattagctagttagaaattcgacatttacactcaactagtttaccaaccaccaaaacgagtcaacaggatcatttgaaaaacaaactgtagatgaaatgagccagttaactacttaagtgaggtttcttgtgaattttgcacatcataacgaaagtgacaggattatgaaaatgagattcaacttgcctggtgattgtaaaggtaacggcacatctctttcttatgctcttcggataagacagcattaagtgccccagtgatagacaaagcaattatctgactcattcaagaaaggcacagttcaataagtaattacaatgaagttgaatttaaattaaaatttgagatagaagaagaagaagataacgtaccaaaccaggcaaaagaaacatcggacctccataatcaccaggccaatgaccatcatgagcttgtatggaagaataaaaattcaaagacctaatcaaagtattagtaaccatctcttcagtaacctcttcgttatctttcactttaacctgcgccggcatctctttcgcacacggattctccttcgaaagctacaaaaacataatcgagcatttcgagtattaagacttgaatttgaaatggcagtgaaaatgtttgatcatgtaatttttgttttacctgaatgcgcatgagtagatcggagctgtgtttcttgttaaagcgatcggcgtggaagacttggcgagcagtttcgatagcgtcgaggtgttgggaatcggtgaatgtggaatcgaactcccatgtttgtcttccgacatggttgttgagagagcttagccatgaattggttccgccatcggcgatcttaagcttccacattggtacttcgtcttctcccaaatccaaggaagactctctctctctctctctctatgctctctctatagctctatctctgcaactctgttcctttttctctatttcttggtttttggggggttattataaagaatggaagaaacatattgaattgaattaaattcatataataatatggtcccaccaatttaaggaaggaagaagaaaaaaaaaattgttatcccactcaattgccaattggttttgagatagaatctcatgattctcaacatggtatcagagccatatatcccttgcgggcaaatgatcctatccgatccgcacctatacagatagtgacatgtcatcttgagggggaatgttgtggacattgtcccacatagaataaatggtagagaattgagccatata

SEQ ID NO: 379459 - DNA, 3511 bp, Cannabis indica
cccaatttcagctttttgtcccccttcatccttgcctcctttcttttcctaacacttaattctctttttcaacaataacaagcacatttgattagaaaaacacaactaacaataataattttcacatgacttaaaagttagcttactaaatagaaaatgaaactaaaacaaacacatttttactactctttcacaataattccagtttaaaagcataaaaaataactctatatcatagagttatcagtattttgtaggtgctctctgtttcaatggcaagacagtagtactaactttgtgttagcaccgtaaagtgccaacttgtatattccaggtgggatgacgtcaactactccgtactcagtggtaagtcatcctttggtgggatgatggcttatcatacccataggccaggagaaggggaatgtcacatgtggctgaaaattgcatcaattaggaggacatagtcattaatgatgatgctttatttggctttttgttgttaataaagttgtttcttccattatcgttgttggtcctctttccattattaaagccactattattggtgctcccctgactctgggagccttggccactagtgcttgctccgttcttgtttccattatcatggttgaggcctttggcgttccacttagcctcttccagtttaataaattcactagctctgtcgaggaagtctttcatagaatgagttgagttcctctttgtatctttccatagtcgacctcccaccgtggtgccccccattatggtggctcgcttaccatcctcacttaggttctttaccttggtggcttcatgcatgaagcattggatatagtcttttagtgactcctcgagcctttgcttaatagaaactaagtcacatagctctatcgatatttgcggggctaaaaaaaattggtatacaataacccttcaaactcatcctaggaggtggtcctccctaggggtagtttggtgaaccactgttgggccgtgtctgtgggggttgtagggaagattcgacatcggaggtcaaacctgatcccataatgatccatctggattttgaaatttctaacatcagttagggggtcttcactacccgtgtacttgaaagtaggcattttgaattttgctggaatggggaggtcattgatcctttgggagaaagcagaccctcttctcctttctagttctaagttagtgagtttcggtgcagcaagatccttgaccaattggttaactcatcctaccaagcctggatcaccggatctgaggccgcttggggttgaaaaacattaatgcctgtattcgcttggtttccttgaactggctcaagtggatttactatattcgaaccacgattgtccctattcttgttgagggcatctcgaaggtctccacggcctcaggggcctacacattcaaagactgacttggatcttggaattcctcctacattttcgcacagattctcaagttgatgttgtctattaggggcatacgaccctttaacttggcaaaccccagctcgagatttggttggccgttgactcaactttcagcttcatcgtcgacatgactatcggggtagttaggacaataatcactattgacctcggggtcttcctttctccccctgggcctactatttctcgggaaatcattgccctctcgtggtcggtcgcggggctgccactccctatgttagggtgtctttccaccgattctaccgcagtcaccatttttgtttctagagtttccgccaccgcttaaccttagacaaacattatgagagtcatcatgtcccatatagtgactgggtaggacttcttcatccgtagggaacggtcaattgtttttgtggggaaccctgttggagaggtgtctcctagccctctcttggttccttgggcattcttcaggtccatagaccaccctctcccgttggtttcttgaggtagggacttcctatggatatgctcagttgccttgaggtatctgttggttgtgggcatcattacccaacccttgagtgttttggttaaagtagcttcgtattaagtcaatagcctattgggtgcgacggacttggtcatcttgacgcctcctcatttcacgagcatgatcatccagctaagattggaattctcttccttggttagcaagacttttggtcaagatcgctcaagcttgagttttctcttggtgcacaatttggaactaaccttgcattcggccttttgcatctcgtaactgatccatctcggggttagttccttcgatatacacatggagttcattttgcgaactaaggatgcaagggtcctcgaccaatttgagcttggcccatgtcatcagtaggtcggataaaatttccagtattacctcttccggtggcaccgtcagtagcgccgcctcctacggtggtggcatttgcgtttggccagttgtttaagaagtggttgttgcatcgccattccccgaacgcaggggtcgttctccattgtttctgatgggattgcttgctaaaggaacttactggccattatccatctccgcattaggtcgttcttgagatcttcgggttaacaccattttttctggtgaaaaacttcaagatttcggctaaatctctcaatgaaagtagcaaaatgttgactgcatttttacccaaccgacgtggagtcgtaataaatgagatttaaactaaaataaccgtaataaatgcagttaatgacaccagaatttggaataaatgtagagaaaggacaccataatttaaagaggttcggccccggatgtcagtaatagcctactccccttgtgttttattaatctgagctataaaagtcaagaataggctcttgattacaaagaatgaaaagtgtttattttttgtaagtgctcaaatgtagatccccttcctaggtcatggatgatcccttatatagggcaaagggttggtgtttctcgctttaagagacgcgaccaacgcgaagctacctcaaccgtctccttgatttttggaggtagttgaagtttgatttttatgataatatcccgctatttttcgttagtttataattgtctttgagcctttaatgggatttgaacatttgaaatagtctctaacgatgagggtctcctaagggtgtgacccagtcattgaccacctttagggatgaagcccataccttggggtgacacccccgacacccaacttgagtagggtgacaattgtcatcgcggggtgaccccccgagacccaacttgaggagggtgacaatcgtcatctcggggtgaccccccgggtcctattgtcgattgtcaataattatagtgtaatgtggatgtccacatatacctttgagaatgtaattatgtctatggtaaaatgcaagacttgtaccatgagggtgtagggggtaggggtatacccctagactaaccctttagggggtaaggggtgtacctcgagactaaccctttaaggggtaag

SEQ ID NO: 379460 - DNA, 4874 bp, Cannabis indica
aaaaaaaaaatttaaatgttgataacctacaattacagatcaacaaaattaaccattatggttacataataaccattgagtagtcacccatttacaaatatatgttacttattaataaaaaaaacatttatgagtaatattcatatatattttatcattaatggacggcaaaacacacaatattatacagccatgctacagtataacattatatttatcatgtatatatagactgtatatttattttgtattcatgtaaattattgattgactttttattttactatatatttattttttaaaactaataatataaaaaatagaatttaaaatatttataatattttaagtattttaaatttaaatttaatattccgtatataaaatatctatacagatatctataatattttaagtattataaatttatattaaaatttccttatatacaatatctacataattttatttataaatatatataataatattgtaaaattaataaaaaatattttattatgtaatagtattgtttactgaaattatgtagagcttaagaaaataaaagatattaaacagtagacaaacaaattttttacgaggttcaggcgttaatgatgcttagtccatgagttaatagtattagtctctttgggaaagtgtttatgtattacaggtgtttacaataatgatctatgtattccccttgtttctctacttaggagaaagatctctagaaattttagcaaagtgtctataaatgaaaaattgttcacccctcactcaaagagaatgtggaagtttttataggcacacatggggtaaagggcataccctttacccacttagggtttcgtactccacacgctactaagactgatactgctaaaggaccatctgaccattggttggtaagaaccttcttcatcgtgtagcgtgtagctacaatgagggatttcgtacaaactaagacacgtgtcacgcaaagatctcttctttgcaatatactcattaaaataagactattgagcaaaaggaatgtccagaggtccgtacgcgcactaccatggcctggcatggggacaagatctgatttggtgtcagaaaaaggtgtaaccgtctatagagaaacttttatacaaagctgatattgttattgcttgcgggaccgctattgcaccccaggttcatcacttaaggaagttccatctgggagttatgtgtcacaactatcttctgagtccgagagatgttgcttgtccgcaaatggtttgttccatcaggtgtctagtgcatatttctaggatggctgagatgtccccagtgggatagcttatgagttatctcggttaatccttttcgctaatacactttgttccttaatcatgccacatgtctcatgtatgaaaatatggataagatttacccctaggctttcgacactctttgagttacgggagcttgtcatccttccccaggagtcatcgttgacacgtgctaacgatttaaatcgtgtacacatcttctgcatgagctgtactctgctaagggcaaatacgacatttacatccacttgcgtggcaaccacacggcactttgaaaatttcatctatcccctttggcctatgatgaggtgtcttcgacaagaaaggtggaatgtaaccgacgactgaatgatgtgaagagacccaccttgatggctcggtgggccttgggctaattatgttggacctcttatctcaatagccattggatcttctatagaattagaaatattgatcccgcaaaggccatttttgtttttaaaatataaaccatcctcaatggcgttcttttcacttttaccacacaaagcttcatattttctccctgtaacctttctccttttcaaccaacgtttgcatgcaggaggagttagaggctttggtccaacgattactcatcatccgttttgagcttttcctagacattgaacccctccgacttgaccgactaaattcctcattaggcaaagtgtacgatttttagggtagctgcaattgctgcgtcaactagcttcagggctttcagacaggcttcctcaacacacaactctttcctccttggacgacaagtaagggcactaaccccctgtttgaacgtttggcatttcgcgtctagggtagaaatttttgttcagattagggttaggactgtttacgtgccaaattgcaagttagagtgcgtgagagaaactcttgcccatacatttgtaaactgtgggattaggtcgattagggtgttggtctggtgattattttccttccacctgtcaattatttcaagagttttgcttttatcttcgtgtttgtgttggtagcaattcatttgatccagtatcttcccgcaagcatggttgcctctactaaaggtgttcccacttcttttgctaagaggaccgctgctggtaaaaatcaaaccacggcccccatggtggcacctggaacagagggggtcttagaaaccattcttgagaatgagcccactattgaggaggactcccttgtggaagtcaattgagagaagggggcaaggcacccctaacttctcaggcctacaataaatccatttgggaaatggatcaaaaagccaactactttaaatcttacgggatgtggcaagcttatgctgacgttgtcggcctttgcaacatccctggattaatgtggcacagaatttctttcatgcaagaatctgctttcgtcagtgcagtgagctggtctcacatttccaatggcgctcatctccctctgagaacttacttcgtaaacctagttgcgagaattgggatttcccctttccatctgatcccctcatcatataggcttttggcttggtggattgtattcttcaagatgaacaacttagaagctccttcttcggaggaaatcctttacttctacagcgtaaaggctaatcctatgagtacaaataagaaaaatttgggtttcttcagattggataagcatccaaattcttactgccctatctgccacactaatcgtactcacgacctccacgagtacttgttcttctcctccatatttcctaccaaaagggtgtcgtctcttcgcctaagttttcatctttcaggtactcttattatttaacttgaatctcgtttatttctgaatcttttgtgtttgtgtaaacccattagcgtgcacgatttttcagcagaactttcttgccaaagcgctaggatcgaggagatagtcaagaaggaagctcaatacagggccttctccaaagaacagctaaaggttgaggacttactgaagaccgaacttctctgtagatcttgcttgattacgaagtttcaaagcattgacacagtcaacctccgatgacaacgtcaacactctaaggagatgaaggaggctattgcaattgatttggctattataatcactgaagcagccaaaaacaaaaaatatcctaaaccatgactggttctcatgtcatcccgatcctctatatgaggaagagataattttgaagagatttgccgctgtgtatcctgatgtggggcctccgagagctagtacttcgggaagaggtgatagacccttccgcatcctctgtacccccagtctatatcgcatgtgttgggggaatcagggaggattcgacgaatacttgttaggcataactttcgtaggtaccccgtgaaggattacatagataaagtagaccaaatcattaagagcccaaggaatccaggagcaccttcagacactattaaagtggaccctttgatgattatctctctgccaaactttaaggagtatgatagcttgcttagtcatgggggcacaactgcttttgctcgtgggcaaccttatagcatctcactaactggtttcatccacgcataatattatttagtagacttcactttttgttactgccatttttttagtgacattgataatgtctgcaattttttactcactcatatcgtcgttacatgtgtagattctccaaaatgcaagatgttaaaatctttgatcagcaagatctcagccgctttgggcaaagccaagagcacctataaaggaggcaagggaaacgtcattttaggacgtgaaaaacacatcgtccctcatcctctttgttgtctaacgtctaggagattgctcctcccattaagactagatctacaatcccaggctcttcaacttgggcaggggaaagaaagactccaccaccccctgggaggtttctgaagtgcctgttgcttcaggagaacaagccttaaaggaagttctgcttgctagtggagcaatccctggcgttgtaccaaatgtagggggttttgatgacaacttggatgggcttggtttaccccaagagagacccccgtaaagtctaagtgcaagggatcgaagaacctccctaagccaaagtgctaaaaaggctaagcctttctctccaaacccggttgcgagtaatatatcctccattacaccacctcctctacaacaacaacaacaacttcaacaaccatagcaaccacaacaacaacagcaaccacaacaaccacaacaacaacaaaagcaactacaaaaacagcaatgactagccttatcccccaccaatttcacatagtaccgttgcagtctgctctacacctatcccggtcacctgtgtcccatcatccacttgggcgcttaactcccaagcctacctccactgacccaccttgtaatatcccgataagcctaatagtaaataattagggtttatatttttattatgagttaatcaggtaataagtgggattatgatcctactaatttattacagcaaaaaatttaaattttgctataagt

SEQ ID NO: 379461 - DNA, 4010 bp, Cannabis indica
gaatacattggtttataaaatctaaatatggacttaatctagtttgttactagtaaagctgagagctttgtttttctcttaattttccttcttgcaagtaaatatgaaaagctaggtagttgcttcaaatatcatgatacgaatgtgaggcctcctattaagtttacttatgctagaaggggtaagcaaggtaaattggcttaggcgggggtattttggtaattgtctttagtagtgagctaccttttgtatgggaatggatagtgtttttcggttatgcaatttgtaagagagaattctctaatgcatcagtagggagctaccttagctctctgcagtgtgtaatagaggatctcatttgatttcaattcaataatagctcacactttgaatcattctcattgtacctgttaatgtgtgaattcttgctgctggtgtaattgttgtttgagccttactgctgctgtgtgtagtttggttgctggttgttgttaactgagttgcaggttctcatcatatcacttattatttgaatttcctgatagatttatgcaaacatttttttttacttttgtaatggcaattgcaaatatggtgtttatcggttttttttttttttggcttgttgctcttctgtaggttcacttctggggtcacccattcatttactgacagtgcagaagacagagacaaacttcttccctttaaaaatatgtatataggtacacattggagtattctctcatataattacacatttaatacccgtttaaggtcccagatggtcgtcatgaatatatcactttttctcatttgcccttctggtatgaaacaggtgtaaatggttgttctcttaaaacaaaagaaaaccttgatgttgtgagggacattccaatagagaaactaatgattgagacagattctccatattgtgatattaggagtactcatgctggaaatacttttgtcaagtctgtttggccttctaaaaagaaagagaagtatgatggagaaagccttgttaaaggccgtaatgaaccctgcttagtgcggtaagagacagttgtgtgtacctcttctgtgctgatatgttacatggttatttggtggcaatgaatcttttaaattttagtaaaattggattatggatttcctaagatgtctgtttgaatcactatcattacactctatttattgacttcttcctatactcgcaataactattgtttccaggcaagttcttgaggttgttgccggttgtaaaggtattagtgacatagagcagctgagcaggacaatataccacaatacttgcaggtatttttgttatatttttctggagcaccttgaattcatatcacaaagccaccaaatgcatattctccataagtttataattgttgattgtattataatccctgtgatccttcctaagcccttcaacccaattataccattatctaaaatttcattatttgccagaatcattatcaaagcagttttcttttaattcagtttaaagtgtgagatcatgtgttctgcagggttttcttcccccaggatcttgattctgcagcagatgctcttctttcatctgggcacaatccatagccagttaataattattagatctgataaattcaaaatttcatgccaaagatactcatcattcttatggggtatgccatgagtccgttttttttttcccttatactaatataagattctccattacaatgaaatccctttctgaattgctcgggggttcataagagttatactcttccttcttgtattgtcttgctaatcaagtccagttctagaaataataaactctcaatttttctcaattaattacaaatctgacaagaagaacagaacaagtacaataagcttttatttattacctgaaaatttgctagcaaataccaattagtaaatattagttacgagctgggatttggagactcatcaaaaagggacaaaaggaaataacttcagaataattctctatgtgttaatgccagcaagcagctcatcattatctacagcttctattacaacttctggtaatggaggagaggcctgagcagctcctctatcagtggctatgtttaatcttaacggtcgtccttctacctcctgttttccatacatgaaaaaacaatttaacagtctcaccagaattaaaatagaactatagaacagagttgaataatatgatcacttagtatttctcaccactccattcatggtatctaaagcagatgctgcagcctcagctgtctcgaaggtgacaaagccgaacccccgagatcttccggtgtccctctcgtaaatgactttggcgctcagcacgcctggctggttagcaaaagcacttttaagagcctgagaagttagaccccaaccgagatttcctgcataaattttgtgaggactatccacaaagttcctgttgagctcccgtatctttggccccattagttccttttctcctcctcttggtacttctgggaaatttaccttaatagttctgcctgcaacttgctgtgtcaacagatgaaaccatagtaaacaacattttcaagacatatattgctgatatggttctaagcacacaaaatggaaagaatttaaccaaatgaatgacaaaacaataggagaatctttcactatgaagatcacctataattgttggagttatatatataaatacttacagaaccatcgaactttcgaatggcctccttagcttcctcaaaggtctccattgtaacaaacccaaatcccctgctcttatccgtaactttatcatgtatcacctaaacaaacatcaaataaaaatccaaaactccatacaaaaaccatgataacaattttttgaaaattgaataataatgaagaggaaagtctcaaacctcaacagaaataactttgcctgcctcagcaaaaacctcagccaattgtgtagaatttataaaataaggcaaacttcccacataaagtcttccagcactgccaccagagcctggtactttgggcctttttaattcattgtgtactactacttgagcaaattctagttctgggtattcttcatctgagtttggggtgtcgtcttcgagctccaagccatcgtatacagatgagaatgggcggaaatgtggaggggaagagaggagtgagatggaagcgaagttggggaattgggtgttgagggtaaggggtatggtgaggtttttgggataatgggtggatatgcgagtggggattggtgggagagaatgagtgattgagaggtttgaaattttgttgcagagagaagaagaggaggaagcggcattgttggccgccattgaagagagtatggagactgagaacagagactagagagcagctatcgactatttctctctttggataagactagtttctttctttatataatttaatgtattaatatgtgatgctgaccattattactatttccctttttcttattataacaaaatgaattcactttaccaaataaaaaacagaggtttttttcaatttaaaaaaaaaataataatactacaaaaatattttgagttgactaaataaataaatataccgtccaaataaaaaaattacacaaataccacttaaacacacaccttcaactcaggatccatgctttctgcgcaaccattgcacaaccacgcagcaacccaacgtaactaaaacgaaaatttaactagaaagaaaaccaccttctgacgacttcacgtgagaagattaccataatcagttaaaacaggagctatttcgaattcatgaaaaaaagtgtaaaaatctgttaagaaattaaaattcaaccggaaattcagtttaatttgcataaaactaatgtcctgactttaatttttagatctataaaatgcagatctcaaaaaattaaacaagagttcccaaacaacccaattcaatcataattcaaaaaaattacatcaatacgatagtaaaat

SEQ ID NO: 379462 - DNA, 6030 bp, Cannabis indica
agcatcatctcttgcgaaccatttccgaaccatgcttcattccattgctgtttataatgaaattactaactaagctcactccttcagatgcttctacacaaggcattggttgtgtattatctccaggcacccaagggtcaaaccaaatcgaagttgcctttccatttccgattctcctgcaaattcccttttgaaatttgtcacgaatattgagaatggccttccaaagtgttgtatctgacagtttcctctccaaatcaaagaagttcgagttgttgatgtatttgttgttcatgagttggcgccacagggagtcatcattggttagcactttccaagcccacttcataaggaacgccttgttcataatctccgtggttcgaaacccaaacccccattaccttttaaacttttatagatgtatataatgtaggctgttgcccaaaaatataaaaaaaaaaaaaaaaaaaaaaaaaagtaaattttttttagtacaacagtattcctatccatggttcaccattaccaaccaccaaatcctcaactacaacttgttcattacaaacactaatctttccagaacttgaatcaaacagaaatgtaaattatatatatttatatttacgactgaaaattaaatgctagttatttcagggctttctttcaataaacaactgcctgcaatggctagtttttatgtctagtattattatgatctaagttgtaatgttgaaataaacagtgtaagattcatctctaaagctaaacaatggagacaaaaggtaattccttgatgcccctttagccacaaagctgataggatggtacttggtgagtccttcattgattgcaaagctggctccagcacttgaagacctcctcaagttgcagcctagcttcaatctcccacctgcctcattattcacactatacacaaagcaacctttcttgctttcagattccaaagatactgactcatttcttccgtccaatcctgaaacaacctgaaaaattgatgaacctttgtcagttgaggcatctgtcactgtgaggtctttgtcttctccttgctgcactacaatcatgccaggaaaatcaaatggctccagcattactgattttccaaagatgtccttggttgtggataagtctgaagaaggtgagtctgttaagataagcctgaaagtagctttaagagaagaatctgtcccaggttcaggaagtttctccatagtgattgaattgtttgagtttgttaagacgagagttgagtcttcaaggtcttgggtgaaagacaccagataatcactgtaagaggaaggaattggagttatccaatctgaaggaaagctagtcgatccagtttttatgtcccaatcaccactgctatgagctgcaagcagataagggccataaagaatcgcctgtattgaaacgtactcaggccgatcatctggattattcccaagacaaaattagtgagcatatatagatatatatatatataaagttatgttgaaaaacttggcaaacatgtgaatttataaagatggctacccaatgaaactacctttaatgggatctgttcttagagtaattggaaggtcaagtgtgactgtgtcaccagggttccaattcttagtgattgaaagaaaattacctgaattattatatataaccaaaagttaaaatgtcagaagttcacaaacgatgcaacgctagaaattcattggagattgtaatccactcaacctggagctggtaaagaaatttctttagcatttaactttgcctttgcaccacttaagtgtgtccaacttggaactcgcaagtttaatgtcagtgattttcctgactcccctgaagaaatagtgaaagtcactcgaaggcgaggatcccatgagttaacttgatcaactttctgatcaagcacaacttttccaagtttccagtcaagggaatttggtatgtattggataacataaataccaggaacttgtccatcttcttcaaaatatattgagtctcctagctttgaaaatgattcaattcctgaaaaagatcaagatgaagactttcagctgaaccttttaagtaaataaatgatgtactaagcacaatccttacctgttccatagcagcaccagaatgactcaaatggctttccccatccgtggtagcttttgctcttggaaactccacgacctagtggtagcatgtaaatcattactcctggttctgttcctcgttggattcctagcacaccatttgtaagagccctctcatagtagtctgcatatgccatttctttagtccacctaaacagatgacgagagacctgaagattgtaaacatgaactttacttgaattaccaagcatatttttaccacaacctgcaatatatgtacattggcaagttttataatccaaactgaaacggatacctttagcatgttgtaagttgtgcatgactcttcattctcagtttgtagagtgtttgccaatctcttgggatcagacctgctcacagcagattaaagtacagccatcaaagaaagaaaaattagagatggattaaaactagtctagaagaactagcaatgcacaacgaaagaagtatagcaacttctcgtagctataaataaaagattcaggtgaaaggaagggttcctatgaatgtataattaaaactcaatgtgcttataaataataataccagaactcgctaactgatgttcctccagttgcatagctatgagatgagttcacgacctccatgaagaatgttccaatgtcctggcaatcaatgatagatcactactgactctcattttctttaccttctactaactaaatgaagttcactaataatatttattaaacccactgaattatttgaaattttaatttaaatgaactcagaagttcaatacaattttacatggaaaggaagtcctatataagagactaagcaattactaagaagcgaactgggcaataaaaatgatgcaagcatcattaaatactgaagaaagagaaattaccttataaagtggatcaccagtgatttcataccgcaattgagaaccaatcacaattgggatatgtgtattggcatgaaaaccagatatgtcatccgcctacaagcaaaaggcagaatttggttttatcgaacaggctttagtaatagtaattgttggaggagccaacagaaacaaatattgcttacctgaactgccagcaagcctaagaagcatggtttatcaaataggtgagccaacaataaatgctttggatttgcctgatcatattaacatgaaatttgcttgtcaagtttccattgtcctatcacaataatacaagtaaattccaaccacagaattacctaccgttatgctgtacagtctatacagcacatcgttcatgccaccagtttcttcattgagtgtctggtagtgtctttctactgtgtatttggagaccacattttgaacacgcttgtaaaagtaatcaaccatccaagtcatcatcttgaaagcttgatcattaccagctaatgcatattgatccagtagacctgctagaatctgtcaaagtaatgaaatcaaaaaattatattgtgtaacattgttttagggctcatacatgcagtgaaacaaatcaagtaaaactaaaccttgtgaatggtgtaataaggagcccagacaggttttatggcctcaaaacgatcaaatagctcagatggaaaagcagaaagatatccagtccctaatttctcctgacattcagatagataggacactacagcagacattttttgtttgagagtatcattatgtgtgcttgcccacatttgtgctgttgcactcaagaaatgcccttcaacatcataaaagcaaaagttctattataaaatgtaccaatgaacagagcaacatagtgaaaacatattgactaatgtgccataagataaagttatatatatatatatatatatacatataaatatcagaaacatatcattagctgagccaatacgtatttgtgtacttgggaatattagaattaaaagaaaaaccaacctacaaaatgaccccgtagctcaacttttgggtcctcccagcctgagtatggcgttccaggagttgccaaacctgctgtctttctaaagctccaaactaggctatccacatctagtatcaacagatactccaaattcgtttgctgtgccaccccatgcgtcgaagcaggattcaatctaacatcatgcaaagaaatttccttgagaaaattccctgggccgtcattaagacctgatttttttagttgccggtacatcattgtccactcaacttcgtcttcttccctcaaaatctttctcgaaagcaagtttgaccaagctgaatcgtctgatggtgtcaaatggttgtgtgagaacatctcttttccccaactctcactcttggatattgaaagctcgtatcgaagagtatgtgatgagagttgggttggagaatttgtacactccttactcgaacagaatccagatagcataaacactataaaagcaactaaaagctcaaaaactctaaaattattcatttttacaggaaacccagatgcgaaactacctcagctaaccagaaatcattcaaaagaatcaaaacaactgatttaataaatgcccagaaagctgaattcccagtacctacagatgtcagtgagaaccgatatcatatacataatgagaaaacagaaactccaagtccaatgattatgacataatccctgaagaagagaaaaagaaagaaagtaaacagtttcttaaaaggagcagagggaaagtcatcatgatgatataacaccatgtgcatgtttccgtatttaacactaagaagatcatctcgtgaaagctaagaataggttttgggtagagtaaaatatcgacaaacatcaattaattctccacataattaacttctactctaacatattttccttttcaactttacctagttttacccaactcagaactcgacatcaggtctttaaagattgcatctttcatgatgagagagcgtaatgttgatataatcgataaatggagtcattaactaactaagtcgttttgatttgttacatctttgagagaattttctcccatttcattctttagtccaattttttcttaattctgtatgtcctacttattcacaactgaaaacattaattctattctgatggcatttaattaagaattattttttttaatttatatttcaataaatataggaccacgtcttgagagcaattaaaaatagaaacacacattgagtttagggataatgaggctcgaactcatgacttccactacatcaaagtgacactctacggttgagttatatcccttcctctttcctccatggagaaacagaactggaaaaattttttgaatagttacaatgttaaaaaaaaattaaaataattacttgtcacacgtataagaaaaaacagtcatgtgtgcagcaaaatatgtaaatcatattcagcattgcaaactactcaaaaaattttaaaaaattataagggacacttaataactacatcgtacacgatcataaaaaaaaatgactaaaatactaataaatgttgaatgtaatattgaggaaatctaattatgattaattaaggcatattttataaaatatagattaataagggtataatgggtaagattatgatcttactaatctaattctgtggataatagggaattttactataaatagataaataagcgtaatttattaattacggaaattttatttaaatatgtgtgtaacatgcatgttatttataaaataaaaataattttaggttagacaatctcggagacccaattggaggtaagaaatgtcacaacggtatttatttactgtttaccgaatttttcggcaaccgaataattttagagcttaagaaagtcatgaaggtataaataacgtaataacaaacaagagatttttacg

SEQ ID NO: 379463 - DNA, 2542 bp, Cannabis indica
gtcgcgatgtttgcgtatatgatgggggcacttgaatagcaaatcttttgcctccgagtgtctaccctcctgaaaaaatgacttgaaaacatgaagataagctgatgaagttggatattctttcacactcagagccttcaaaaattcataagcatcctcaacagtcccaaactttgagatgtattgaatgaaaggttcagggtaaggagggtattttgtttcttcatcaaacgagaaggtccaatgcttcttcaaatttcctggcacctaaaagcttttcaatgacatttttgtatgtagcttgccaaggtcttaaacgacctttatccaccatctcaaccagcaaattataagcaccctctatcttttgctgactgagaaaaccatctaataatacatccaacaaatcagcatcggcctcaacattcttttctatcatattcgcgaaacatataaatgccttgccaacttcaccagcagcacaatgcccttgaattaaaatggtccaagtcttgatatcgggagtacatccaagttcttccatatcaaccagaaccttacatgcatcttcaaatctttctgccctacaatatccaaagaccaattggctataagtgaggttgtctggttcataccctgcatttttcataactttaattatgttttccgcttcttcgaacctccctgactttgtcaaagacctatgaatcccatcataagcagccttggaaagggtgtgtcccatagattcatactttctagcaactctgaaaaccaaatccaaatctggattttcacttgctgcaatgctcttcaacagaaggctacagtcctgaagcgatggcttatacgggccatccatcataaactcgtaaagcttcacagcatcctccatcattttattcttctgaaatgcccttgaaatctttatgtaattgtcaatatccatttcatgaccagctttcttcattttctcaaccacaatccaaaattcattaattgaatcacttcgactaagaactctcacagctgcattgtaagtaattgtattgtgttcatagcttggactctggtcaacccattgaaaaaagctccaagctcttgatgggcaagacctaagttccttaagaacccttataacaaagttatctgataaatcaactatgagctctgctaattttttctcaaccttgtcaccccattcttgccccaaaacaacactagccacctgttttacaacaccatccatggcattctctttaatcattctgttgtaaaaatgggacaaagcagcaacatcactagccattttttcctttttcagttgtgctagcattgtcaaataagtttcttcatcaatataatagccttgttctttcattttctttagaatgacccaaaactgtttcatatctttctgaagtaaaattctaagcaacaagctataaattgaagaacttgatctgaacccatctttctcacatacccatttaaagaaatccgaagcttttcgtgggtgtttactcagcttcgtcaaaacatagataactctttcatggttccatccgagatgcgagttatctaactcgttctccaactcagtagaccactcgttggctacaatgaggtccacaaccgagtcgggttttgaagaaaaggataacctttgacaggtgttgatgaattgagaagaagaatccaattgattttgaacagatggagataggtgagaaaactgaataacctgagaaaaaggtccccgagttgcgctgcgaatctgagctgagatgtacgagtttgtgagtctgaggcaggtgagtatagtccttgctcgattcatggctgcttcggcaattctcacacggaagaagtcaaaaagctatgaagttttacagagacaaatgccacttgcccattttcaagctctagggtttaagatcttaagggtttaagacccgaaattgatttaaaagttaaggcacctctttttggtcgggtcgggcagggaagggcagatccggtttaagatctttgggttgctattatctgtatagttccctcaatttcgaaaaatgacactcatttcagttaagaagaaaacaattattcacaatgcttaaccattttaatagtagttattaaatctaagagtattgatatcttcacataaaaattacatacaaatttaataagaagtgtaattaatttcaaccttttaaaagtgacttgtcaataaaaatatagggatatgatgattttttattgtactttcacggattgtacttcgtgatgtacggcagccgtcagatgagggagttatttgatctgacagctgagattaatctaggggtaattagggttaaaaagtagaaacgtaccctgacacacatttaatgtaccctgagacccatctaatgtaacacagaatacattccgtaaaagtacatcacgggacaaaatcatatccctgttaagtttgtgtataatttatacgtgtactatatagggtgtttataaaatagtcgatccaattcaatccgca

SEQ ID NO: 379464 - DNA, 2042 bp, Cannabis indica
ttttcacgagcgtaccaaacacgttgacatagactgccatatattttgagacaaagtaacacaaggaatgatcaaaatgcttcatgttccatccaaaggcaacctgacagatctcttcaccaaacttctctttcctactcctttcgaagacatgcatcatctccaagatgggtgccaaagatctctacactctatcttgaggggggctattaaaagttagtagagtttgttaagttagctaggttggtatcataagtggactgattctattttgatcagtatagtttctagctatattttagttgtgtctttcttgatggctcatagtctatataagtgtaatttagctcatttctcaatccactgagaataatcaataagaaaagttttcttctctctctgattctataaaactaatatcctttgaatttgcatttgtacctaatcgtttggttgctggagatttttcggtctcaagcttgatatgtctaaaattgatgatcatctggaatggagtttcttaaggtaaactttgaaagccttcaatttttttttaacgtttcatacacttggtttctaagtgagtttcatcgtggctttcttagtcctattaaaggggttgaaataattctcctcctgtaggggcttaagacaaagagacacaatatctcgatatcttatcattatttgtagtgaggtgtaatgtagaatgttcctcagcgacaatggttagggctcacttcatagatttaaattttgtgctcagattacctccattttttatcttgtgtatgcgaatgaaacctttgttttttgtaagtctaatttagtcaaagttgatgttgtctatatatccctacaaacttattatcgttggtctaatcagtttctcaatgtgcatatttttttagtattttctagaaatatataggccaatatcaaatcatcaatctcatctttgttaggcttcaaagagttaaataagcaagataagctcctcatcaaccccctcttcttctctaatagtagaaataaaaaaaattcctatatgagacaaagtattaactttaggatggaaggttagaagtgcaaaatatctatcccatgcaggcagctctaccttgatcaaatttgtgttcctattaccattatttactctatgttaacatttcgctccctaaatgcttttgtgataatttggacaatgttatgcaaaggttttggtggatcatgggctcagataaaatgaggtttcttgtcttgtccaattggaattctatctacatgtcgagagaatgtgggggacttgaccttaagaaatttaaagatgtcaattttttcttttaaacttgattagagattggctacttcttctacctattatgttgcaaaagggatgggagtttatatgttgtgagagtttattcttagtagttaatgacctctctatggatatttataactcccttaaatttcatggcaaaacaaggagtagtatatataggttttccttcaatccaagagtgtgaggaagtagtgttttcgtaaattattcgcttttaaaccattatactcgatggattctcaagattttaaggccatggtttgttccaaattcattgaaaatgatagaaataatttagagtctgccatttcatatgagcaaactgatatggaaagattatgtgaatggtagtttctctatcaagggtttatgatatgtttttgattaagagttggcaaggatctcatgacagagtttgaaagcatatttggaagacccttatgcatgaaaataccaagttcttttagtgaaaaatgggaaggaacaacttgccatggagacaacaaattcaaagtcattggctataatgtagattgtgctatatgctgtgtttttgcgtcgattttgacatgagttgcctctttgagttttattactggtttctttctaaaatctaaaactttttgtttctactttctatttaagatttagttttgtgttttcttttatggaatttttttaatttattattattaaa

SEQ ID NO: 379465 - DNA, 2987 bp, Cannabis indica
ctaagtgtagattattagcaatattacgaacaattgctccactctctacttaaatccaagatagagagtccctcaaaacctatacctttgtaaacccaaaatgccacaccaaaacataaatgtttccaaattctttcttctgctcttctctatcctaaaatttctgcgatttctttcctaccacatagcccaaaaaattgtcaatattgctgctgttcacaaggttgaagcaagctttgctcctttcagcatacaagccaacagctgtgtacaacattgtgtcatacaccagattatagtgaattcctcaagtagtttagcctaaacaaaaccaatgaacattttcgtgaaccaatcatgcaactagtatcatacttcaagagtgaagctattaaaaaaatgatactatgtttacccacagttatatatttgtgacaaagtcacagaataggtataatctaacacgttaatacctaaaacccctctattataatcccgtttgagtgtttctggagaagtatcgatatttaacaaaaacccacttggtgactattaatctgatgcaaaacataatgagattacaagataaaagatcaagtggttgtgtgggtgatcagtgtgtctgatctgaatggtgtggggttcaagccccagctcttgtacttgtatcttcaaaacaacttaaatgacaattattccagcccaccattcctaactattaattaataacttaaaagacacctctagccacaacttctaactaaaattacaatatacacgttgtataaccaaagggatacataacataaattccccaggaccagttaatcaaaactaaaggcaacttcctggtgtactgcagttgataagcttttgttttcagaagtcagagtggataattattacatatttgaaagcatgtttctcataattaattttttttaccaaaaaatgattctttgtattgtaacatgttcatctgctccacctttttactcctttgttttttgtctaaaaaaacctattcacaaacgccaactggactttgttaccaaggagcagtgaatcatttaaaaaaatatatcggtaattctgatatttttatgctatttattttcctataggaatattaaaatcttttctcatttatcagttttgggaaggtatttttaagtacacaatggcgtcatggcatacaagtatacagaggaaaatacttcctttaaacaccaattttaatgaattttctcttagacttctatgttgcatcatgaactcaactcaagctttatctagagaatatacatcatcttttcttatatatattatattacatatatatgtgtgtatgtatatatatacatataaatacatcatctcagtttttgtagaagaaaaggcttgcttagaactctatcgagaaatgacagtaagacatttaggctttggatatcatcctgcagtattaagatttctcaatattaagacatttataaaaagaactaaacagtcaaggctatatctaaccagtactatatagaaagccaaaaatggattacaaaatagaaagatgtattcctcctccactaagacattaattttgaatcacgaacaactaccacaaatagctaagatgacttatatcaatttagtggcagttccaacttgggtatatacatatgtacacattagcacagacatgcagtaacactaagaagctaaaagaagaatacctcatttgagtgtctatgaaggacatggcatatgcctataaactagaaagaaaagaaggcaatgtgagttgatatgaaagctaaacatttcacattgccatagggatatgagctaaaaggatgaatcaatgagaggacctcaataataatgacatttgaattgttagtttagttacaagtacaaacatatggtcggcgaaccttaatatcagatgccataaaacaccagctagataaataatattagccacagtgatcgttaggatcaattgcttcatccataaaacgaaataaaatgatatctctataaaaacttttagagcatattcactgaaatgaatcgctttccaaaatcatactattagtattgatatttactataagaatttatggtcaccttttcaagcttgtacttgatcctctcttcggcattggcgaacttctgctttttgttacccttcacaccgagcctacgagggtctctcttattagccgattttctcacctgtttttctcgctttctttgcagcttcaacttcttcttcgtcttccacttttccttcttcggagggtccacctcatgcgtttcaaacttgagtttcccttgcgatatgacaagattcaccgaaccatggctcaagtttctgaaaacccatgaagggcttgaaaggctgggatgtaacaaatgtttggctggacgaaaaattgatgcttgcgttggggaaaccggcctgtgagatagtacacaattggcgggaaaaggggtaagaatacaatagaaagctccgttaaagtcagtgcttttgggtgaagaaaaaacataatttgcggaaaatggaaaatgggtttgaggggtttagtgtaaaagtgaacaaataagtgtttggatggtgggagagtggaagaagaaatcaaatacaatactgaaaagaaaagatagttgagaggtaaagagagagtacctgagatagagagggttgcaagatgaggttttgaatagagaggaataagctctaaagaacctacgaaacaaaatctttgccattgtctgggaaatttttcctgtgccaggaagaaagtttcagagttttcttttttgccatgtgtaagtagattaaaaaaaaaaactgccccttatgattttttttctctttcgaatacagtccccttatgaattggaaagggaaattttactcttacaaagtggggagtgtgattctcgtccccgtcgcgtttaacattcagggacaaaaa

SEQ ID NO: 379466 - DNA, 2790 bp, Cannabis indica
aaaaaaaaaaagaaaaaacatgacttaattgtatatagcatggtggacatttgtcaaccattacattgaagatagggggagagagggacacaaaattgggacacggtattgatttgagtccctcttctactactgttataaaaactctatctactgcatttgcatttggaaaaaagaaaaagagaaatattaggcgaattccgcgaggaaaatatagtccatttgcaagttgaaaatgagggaaacaaatattccttatctctacaaaaatttgcaggctctactgttccatcactactttgtaaacttcagaccaaagtttcttgttgtttagcttagtttctctttcaagccaatcacgacacttggttacacgaaccccctaaagtttcggtaattacatggagaaagagtaacttttcggcagattgaacaatccaaaatatgggtttttcaactttgggcttgtgttctcatatttttgttggaaatggtcatggaaagaatgtaaagttccaatatttcaatgacataggaagaagcacccttagtttcaagcttttcaattctcggcgtgtctcagcaaggccactctcaagcaagtttgaatcgattgcgttcgaagaaagaacaagcccaactgaggtaaatcaagtttaaacatctcatttttctaaaattttatttatttttaacaattactcactttctgattctttcaagtttgtcccatttgaaattttgagtgattccggataggagtagttgagcttttcaattagatgtggtatgtttcgaaatctgatgcaagaatctgagttcaaaattggtattgggctttatgactttaatcgctattacaacattttctgataaacttgatagctctctcattgtttgaaaggtcaaaaaagaaatagaactatgctatgaactcatacgcagactggggaagggagtagtgtatttgggttcatcaaggatgggacctggtcattcacattactcacaaacacaagaattgggaagagaggtgagttctatcttcttggtttttctattttcatgaacacatgtttaaataacaagaacacaaataagactttcaataattagtttttcctttttccatatgctctactgtgcagattgttacataagctcttaagtctgttagtgggtgttacaattatggtttattgttattagttggattcagttagtgtgttagctaaattcctggaattgtattatttatgaatacacaaatatacaattctcccaattaccttcgtttgatttctcacacagattgcaactcttttggactgtacaacttggtctggagctggtccgggactaatggatgctgctactaaaggtgctttagaagcaggaaaaccagttggtggatttaagattggtaaagaagctggggaatggactacatcaaatttccacccataccttccatcagaagcatatctaacttgcaggtatgtgcgattaaatgctagaaagttttcgaaaataaggcttaaatgcaggtatgttgccccaagttggtttaaatgctttatgaaatgcaggtttttctctgctaggaaacatggtttggtggatgctgcagtgaggaggagcatcacagaccgaacagctgttgttgctcttcctggcgggattggaactctagatgaaatgtttgagatattagcattgattcaactggagcgaatcggatcagagcatccagttccattcttgttaatgaattatgattcattctatttgaagctgctggactttctcgatcattgcaaggtgtggggtactgtcttcgatggagaggttgcatctttatggaaggtttgcaataacaactctgaggctttagcttatttatccaaattttataatatgactactggcgatagagatggttatgaagccgaatcgactagcgggcatagaacaatttgttgataggattttgattttatttacttgttgcaaagagattgccctgcaactaatgcttagctgatatctcaaactgttgtagactatttgaatctggttgatggaatgctcttattttgttttaaggataccatcataatatattacctatctatactaaatattttttgtcagacttgcaagacttttgtattcactctacagcctatctgcattcctgtctgggtttccttcataaagattggttattcatgtggaaaataataatgaagcatggataatgtataaaattataccagattgtggaatatgaagagatgatgcattaccaaaagaagttggtcacattgataaacttccatagtatttcagctgtagataaataatctgcatcgtgtgtaactctctttagaaacagaggttatatgcatattattgggttctctttgggaatactagtgaagtaagtctaaaactccaacttctccctataattttggaggaatcagatttatcagtcctcaaaaaaggactaagggcatgtttgaagcattgggcaaaagttttggattggacaattttgttcctagcccatgtttggtgcattcttgagacttggaaaaattgaacaattttatcccctcaattggattagtcccactaggaagggatatataattcaccactgagtaggttaaaacagtcctaattgcgactatatataaatatctttatatattaaacggcaattcttggtttaacgattcttggtttaacgattcttttttttatttagccttacacgattaa

SEQ ID NO: 379467 - DNA, 1527 bp, Cannabis indica
aattttatcttaggtcccatataccttattaggaccagtcctttgggttcggggtaggagtttggtatcaaggttcgaggttgagtttgggattggggttcgtggttaggattagggttaggtttatggtaaatataattttacataataacctataagtacaagttaataccaaatattgtgtattgtattgaaacaatactatacagatacaatataatataagagtttttttattttttatttttacacttcaaaaatagattttcttttttacatttttatagaaatccacattgaaagttgaaactcacagagcaaccaacagaataacctaaatcgcaactgaaattcatatatagcaatccacatagaaactaccagaacaactcaaaccgtaaattaaaaaatgatacatgaactaattcccttattattataatacaactcaatataatactatacaatacgaattacattataaaataacttagtgtaccaaagatacccttatattattgatgagtacattctaaaaataattttgaaaataaaataaaagaaagccaaagcacttctatgctaagtttgctcactacttttcaaggaaacactcatatagttttttcttttttaatttttagaaaacaaatttaataaataattattcatgtcctcgtataccttttgaaatgatacataggaactagtgagaactactcatatacaaacacgtgtgtttgtatatttgtattgtattgaaattaaagtccttcttaatttcttcaaacacaatattacttcatcgagtatcaaacctttaagtgctttacattggattgaaccaaagacccttaattacgcttaattaaaaaaaattgagtttacataattaagttctatgattttttttaacttgataagtattcaatattagtaaaattataatagttttgtcagtataaaataaattctatatttcaaattattaagtctgaacataaatatatagcatgagttacctctaaatcttattttaatatattctaaacgaaatacttatgccactactcatggcctgtcttaaaatttactgagctagaagaaaaatatatttttaggcccttatatagagataaatatgatcttttttaaaatcaacaaaaaatgtgtaaggggtgattttttttttttgagttaccaaggtaggtgaatcttaaaaacatgcttaatttttctatgctcaaaaccgagcctgctactaccaattacaaatacaaaacttcggatacttataccaaaattatcccttaatttaattaaattaagataaaaatattacctaggatcctcctcacaaattcacacgtacatagtaattgtagtaatatgaaatcatgaatagtagtgtgttgaaatggtggggtatataacactgtaattatttattgcccactttccattcattgcttcaattttcatgccctaaaatcgatgtatatacatatatacatatatgtgtatatg

SEQ ID NO: 379468 - DNA, 2615 bp, Cannabis indica
ttaaagactctttcctggaattgaaaaaaaaaaaaagaaaaaaagaaatttgaagtcgaaaaaagaaaagttcagtacctggagtaaccgggtcctctaacttctcaattcttttgcagtttcgaagtgttatagaaggatcgttttctttagatttaagcattacaacaccaggacaatccaacaatttaacattcttgtctagctgaacctcttgcattgatcttgtcaatccaggagtggcaccaacattgacaacatggcatctcttcaaactattaatcaaactactcttaccaacatttggcaagccaattacacccactgtaatagattttttgatctgccaaggatatattgccaagcagattaatactggaaagtaaaaggatttgatttacttgtaatttgtaaatgtatgcaaatcatgataacttacatcgtgacttctcgaataattttttaacaatttaaggagagtatcagccccaagacaatcgcttgtctgaagaagactactagtagttttagctgccttggaagatttccatcccaaatttgatctctgctcttgagtactgcacttgaaagcaacagctggcaactcttctctgagataggtgagccatttctcaacagcttcgcgaggaacaagatctgaaaatgaagcacaatttcaatcaataaaagtctacaaactctacacctataattttacattaagcaattggcagagccaggaaacaacttattacaaacatagattacagaaacacaatcaacttaactcacacaaatagcagcatctaaaaacatgtctttcttttctgtgtttgtaatgttgcatagtcataagtacaatgtaaatttttatatttgggaacgaaaaatgaatccaataattaccaattttattcagcagcaatacaagatgcttagtaggacccgatttcatcaccatcttttccatatcaacacaacgagtacccaatggatctctagcatcaagaacctccaaaatgacatctgaagcttctacaactttcaccaactccttgtaaaaagccctatctgaactatctgttaaacaaaaaaggcatcaactttaaatgagaagaagaagaagaagaagaaaaggcaattcataatcaaaaccaaactcttctaatacataagctcaagcattaaacacaccccggtttttcccaaatactgcttcatcgtcaccagtcttttcctcatcaatggaagacaacttgttatcatcgtcatcttcatcttccaacaatcccaactttctcttccgagcctaaaaacaatcataaccagctaattagaaaaaacccagaaagaaaacaattcaatcaagttcagttcagttcaaataaaaagcaataccctttctttacgggcgattttcttttgctccatttcctcaatagcccgagctcggcgagcttcgagagccttaagctcctgttccttaaaaggccagtcattgggaatacctgggtccttctcgaccttgctctttcgattcacaccaagcttcttcgcttcctttgccttcttcttatggtgctccttaaccttccttatgaccttgtgcttctgcttcagagaaattctcttactcttactctctaccaaccatggaaactttaatcaatacaaaaacactgaacaataaacaaaaattgaggaatcataattaaacactggaactgaaatgtaagagagattgatatagtttttgcttacttttactccttttcaccatttttggaccttggtttgatgaatttgatacaaatgagagaagactaccgtttgcagcagcctctctatagttttagggttttggcaattgtagaagaaacgactaacttttgcctttctcctgtttagggtttttcaattggatttgggctcgtacggagtttactttgttaaggcccaattttaaaatgaacacaatatttatttacagttttgtttttcagaattaccatatttttactcatgtttacagaattatgtaataaaaaaatcagtaatcaatttaaaatattccttactattaaggttgtcttttttttaaaaaaaaaaggaaaattcgttcaaggttgatcaaagggcaaaagccctacaagtccaccagaaaaattgcaatctcactaagatatgacaactgttggctaatcacactgattcgaaaggagtaaaaagctcatggctcatgtaggagcatttagagggataaattgccccaaaaaaaagtataaggctaacaccacaaaggataaaaagtgaacaacaatcgaagatctaacaaagctaaataaataaaccaaggaaaaatataaaagaaaaacagcttcaatggtcacctcctgaacccaaaggaagaaacacaaaagcccaaaacaagtcaatcaaaagcagaggagcaccaccatctttcaacaataaaagtcaactcttagtctccagttgttaggggtgtgcagaaagtcatccgatccaattccaaccgaccgatcaaattccatctgatccaatagaatcggatatccaatcataattagatcggatcggatgcaaattttaaaaat

SEQ ID NO: 379469 - DNA, 2089 bp, Cannabis indica
agtttcacgcttctctttaagtgtcaagcttctttcctcagcctcaaattcattcctcaatctttcttcttcagcttcctaacaagcaagtggagaaaatgcaataagtcccataaacaataatggtcaaccactagaacaacatgaaaaagatcttactgcctctgctgcatctttagcagctctaaatcgtctagaccgttgctgattcattttagctctaggtgcaacaccatctgtaaattaaaggttaaaataattattatcaaaacaagccatttaatattccaataggcacaaaattttattgagtcagctggtttaccctatagccacaacaaagactaaaattaacccttaccgattgccatatacagaagttttcgagggcgaaccaaggtgaagagatgatcaatatactcaaatatggatttgaacacatcattgtaggtagcaggagcaggctacatgacagccaacaacaaaaaatcggtaaaacccaaagaaagttttaggatcctagtttcaactatatataaataaatggaaacacatgaaattcaacaatcaacaacacaaaatacagggaaaaggtctgtatagcatttttcccatagagcactgaactccacaatttcatcccttccttttctacaatcagatcacaaaggaatgatacagacaacaaaatacaacaattaccgataagtcttaatgaccccgccccgccgcccccccaatcccccctccccccggggaccaatttctatcctgaaaaacaaaagttaatagtctgaaccaaaacctatttcgcttctagcccaatacggtagtcctaacttgtctaacgaatttaaccaaagctaatactttgagtgtcaactttgcaaacttcaaaggaaatcacacactgttcgattctcttacgcagctagttgaagagaaaatccaaatgaaagcccttgataaattggaaaacttcttcctcagtaactttccctctcaagattcaaacttgtcgttctacctctccaactatactgaatgcttgcttaatgacaaaatttgaggaagaagaagaaagaaagaaagaagaaaaagaaaaagatcaaaccttgccgtcaggatgaaaacaagggtggataatgccattcatgtcgaggtataaattgtcgaattccatgccattggggttaggtctggagacgtcgataggtctggcgacgccattggagtcctcgttcggctcttcctccaccacatccacgatcgagagtgggtaccgatccgccagccagcggtaaaacgcaggaacgcccattaaaacgacgtgtcgttttgagttggtacagttggatctaactctgttgctgggctgcggagccttgaaagttagaaagggagaagaaaagggtacctaaaaataatgactcaaagaagaagatgacccgagatttgcttgagtatatgctattatgaataataatagagcaagacaagcaagaagaacggggtggaattggaaatgtggtaagaccataatgcccttttcttgaatttaacttttcattgactccctgtttggataacataaatattagggagttgtatgtcctttcccattaatgacgtgtcttaagaagttaaatcctttgtattgtatgtagctcacaaaaatatcctaattagtcacaagttttgttattggtattgttatatgaggagattaccttttttctctttgtaccacttgcgaatttgaaatcgtggttgctaacctttgagtctctctaggagactctgagtcgttcttcgccggactatgaaggtttttcggtgtcttctcaggggtcgtcatacagcttctggcctcctctggttgtctaccatctaggcaattacaatacttgagatgttatcagttcatgcagttcagtctgatgggggttctgttgggcttccctatttctgtctagtgccactctgcctcagcttaggtttttttagtgcagtcaaagtgtgtttttccttgatttggattgtttctttcttagcttctttgtttgagtttttgttggaaatattttac

SEQ ID NO: 379470 - DNA, 3096 bp, Cannabis indica
aaatttaaaaaaaaaggttaaaagcagatctaatagatgagctaaaatagctaaaaaatttaccttatgaatagtgcttagctaaatgtagcttaaagttatcttagttttagtgcttatcaataattttttttattattttaataatgtattttatttaattctaattagtgtaaaaataaataaatattatgtaatatataatattttattatttgtgtgtattataaatatattatttaaatggtttagagaaaattataaaaaaatctaatgtatggtacaatataaatttgtgaagtaaaataaaaaaaaagtaaaattttagtgaagtatttaaaaaaatatataataaagaagctattgagaagcaagattttctgcattttgttgaaaaaagcatactttgtctataattattagtttttggttaagaaagtaaaatagatcaaaattattaaaatataattaaaagaaaaatttaaaatttgtttgtgaaaatttgtaataacactttttgaaaaaatttattgcagtagatgatccaaactaggttagtaaagcttttttaaagtactacactaatctactggggatgagaatgtctaacatgaagccagtgattataaagctgatgcaacaaggtctgtgactaacaaaggaaaagcaaggttatttagagaagaatttttactacagtagatgttaaagaggccttactcagcattcccggatgtaaagttcttgggctagatggctttagtagttatcttttttaaggataattgagatctttttgaggaagatgtgaccagtgaagtactctcctttttacatacagacaggttgttgaaaaagttgaattctacatcctttacacttatccctaaagtgaagtgccgtgaaagtgttagtgactacataataattgcttgttgtaatgtcatttataaagtggcatcggagatgctttttatgagaatgagaatagtgctaccagaattagttgcttagaactaaagtggcttcataaatacatagcttacaacataatggtttgttaagatttggtaaaatattatggaaagaaaagcacaaggtcgaattgtatgattaaactggatctaagaaatgcttatgacactttacagtggtactttattgagaaaatgctggctgctacgaattttccgccaaaattcattaactattgatggtatgcattcgaacccttaaatttagcttgttttataatagagcaatgcatgttttttttgaagctaagagggggctcaggtaaagagatccagtgtccccttttatatttgttctgtgcatggaatatttctcccaaattttagcaaaagtggaaagaaaaatagattttaaataccatgataggtgctcagatatggaacttaatcatctttactttccagatgatgttttatcattttgtcatggtaattttaaatttatttactatcttttacaaggtctcaagctattttttatgtcatccggattatttctaagtgaattgaaatcaaccttgtaatgttgtggtatgaaagaggaagaagtgcaaagagttctggaagcttcgggttttgctagaagtgatcttctttccaaatacctgagaatttcaatttgtacaagaaaattgtcggtcttagaatgtgaatccatagtagagaagatggttcataaaattcatatttagggtctcggaacctttcctttgctggccgaattacactgattaactcagtgctcatagcaatacattcctattgggcgtaaattataattcttcctaaagctgttatgaaaaagataaataccatatgtaggtcctttttatggaaaggctcggttgaagctaatagccctggttatctagggaccgtctttgcaaacaaaaaatagagagaggtcttggcttgaggaatacaatgttatggaatgaagcagctctggggagatatgtttgggctatagctacaaaacaagataatttgtgggtgaaatgagtgcatgtcgtatacttaaaaacactcaaattggtgggactatcaatcaaccatagataacagttgtacctggagacaggttgtgaagcttaaagaaacacatagaagaatccctcatttgcagcctcttgtggtaagtaatatagtatccaccaagtgtataaactcttttgtgatgaccaaggtaaagttatatagcatagagaagtttggaatatgtataatataccaaaacacaagattattttgtggctggctgtgtaaaatcagcttcaaaccagaagttgtctgctaaaattccagatttgtcaagatggaacttgtcttttatgtggcactgatttagaaacaattaagcacttattgtttgaatgcccatttaataacaggtgctttcaagatgttaaatcttagttgggatggtaaggaacggtcaacccattagcagcttctttgaggtggatttctcgggcaaaaatttccaagtttaagaggaaagtttttgctactatagctgctttagtgtatcaaatttggatcaatcggaataattgttattggaatgaatgcaaacagtaaggagttgtgtacaacaagtaaaaaatgaatgtaaaatagagaatccaaagcttactagtaacaaagattacattgattgattcaattctttacaaatgtattagttatatgtacaaactttttaaggtgctgattagtttgtaaatatggatgattttgttttttggcaatacaatttacctaattcagacccatttctctatgcaacgttatttacaaggtcatattcaaaatagttacaaatagaatcaaacctatccttccttctattatatgccctactcaagctgtgtttgtcccgggaaggaatattcaagataataatgtaatcgttcaagagattatttgtgacagtcagtagtcccgtgatccgtaaggggaaataccgggtaagctgtgcaatcccacatcgcctagggaaggtcaagtgggatgattctgagactgtgtaggtatgggactacacagttgaagagggctt

SEQ ID NO: 379471 - DNA, 3467 bp, Cannabis indica
ctctttggattttctctccttttcaacattttgttcattgcagcattgacgtacttgaaccgtaagttatctctttataaatttagcatgatgagtcttatgtgtggttaaatgttaaaatgtaactggggttgataaatcatcatcttttcttttgtggaaacaaaaaatgcagctttgggagattcgaaagctgtcattgcagatgaagaaggggtgaaaaggagaaaaactcaatcctttagtaaagaaggtttgagattataaatatactttaacatgtgtgatatggtgacaaagtagaggaataacttgatttttattatgctttccttagctaaagtaaacctttttcgaaacaattacaggcattgatatgaaactgaggggttcttcagagattgttggcgattatgagaatacaccaaagagaggaatggtcttacccttcaaaccgttatcactcgcattcaaccatgtgaactactatgtagatatgcctgctgtaagttgatacattattagcatttctttctctggttttgagaactattgttttacttatgtgaagcaaagattgagatgtatatgtggcctgccataccaggaaatgaaaattcaaggagttgaagaagatcgccttcagctgttgagagatgtcagtggtgctttcaggcctggaatattgacagcattagttggtgtcagtggtgctgggaagacaactcttatggatgtcttggcaggaaggaaaacaggaggctccactgaaggaagcattagtatttcgggttttccaaagaagcaggaaacatttgctcgagttagtggatactgtgagcagaatgacattcattcacctcatgtaactgtctatgaatctcttctctactcagcttggcttcgtctagctaaagatgtgagcacaaaaacacgaaaggtatgctgaactatcatcgatactgaagagtctatcttcgagatatttgcatcaatggaatgttactgtttgaaagaaaaaaaaagaacatgattcttactttgatgatatgttgattgaaattttttgtgtagatgtttgtggaggaagttatggatttggttgagctaaatccaattagagaagctcttgtaggccttcctggaattgatggtctctccacagaacaaaggaaaaggctaacaatagctgtggaattggttgcaaatccatctatcatcttcatggatgaaccaacttctggtcttgatgctagatcagccgccattgtcatgagaactgtgagaaacaccgtcgacacaggaagaactgttgtatgcacaattcaccagccaagtatagactctttgaagcttttgatgaggtacatattccttcaatctttatgtctatttctcatttgtcaatatttgtttgtcttacacatgaaaagtaatgttttcccttgtagttgctactaatgaaacgtggaggacaagtcatttatgctggacctcttggtcgccattctcacaagttgatagagtactatgaagtgagtactagtatccatatatacatagaaaagtaatagcatttgacaaattatatctataacacattacaggctattccaggggtccctaagattaaggatggttacaaccctgcaacatggatgcttgaaatcacttcccctcttgttgagacacaacttcgtgttgacttcgccgaaattttcgccaactctgagcttaaccagtaagtccaactctcttcaattacaagaataatgccaagaacatcattttctcttatccaacattgaagtgattgttgatgttttctttaggaggaatcagaatcttatcaaagagcttagtactccactaccaggcactaaagatctctactttcctactaaatactcacaacccttctttgttcaatgcgcttgtttttggaaacaacattggtcttattggagaaaccctcaatataatgctattcggttcttcatgaccatagtcattggtattttgtttggtcttattttctgggacaagggacaacaaatgtaagttttagttagttggtttcagttttgttttccttgtcatgttataatgggttctatgtcaataattttctttgtaatatataaaaacaggacaaaacaacaagatctaatgaaccttttgggagccatgtatgctgctgtacttttccttggagccaccaatgcttctgctgtacaatctgttgttgccattgaaagaacagttttctaccgtgaaagagctgctggcatgtattcagaacttccttacgccttttctcaggttaataagaaaaaaccatgaatgagaaaacttacatttagtgtgaacaaggttgtcttttttaaaacaaaaaatcatgtgataatttcaggtgttgattgagacaatctatacagcaattcagactatgatttacactcttctcctttacttcatgattgggtttgagtggaaattaggaaagtttttgtggttctactatttcatattgatgagcttcatctacttcactctatatggcatgatggttgttgcattgacaccaggccaccaaattgctgccattgttatgtcattttttctcagcttttggaacttattttctggctttcttattcccagaccggtatgtatatataatatatcattatattactaagagtgtacttatcaataatgattttgatattgatatatttttccaaattggtgcagcaaattccaatctggtggaggtggtactattgggcttctcctgtagcttggacattatatgggcttgttacatctcaagtaggtgacaaaagtgttgatttggagttacctgggcttggtactattattccattgaagatatttcttaaggaaaatttggggtttgagtatgattttttacctattgttgctgtggcccatgttggttgggttcttctattcttttttgtatttgcttatggaatcaaattcctcaatttccaaagaagatagttatagagaatggagtttgtaattagtcattattaagagtgataactttgatttgaaggaaataaaattaatgtatatagataatcttctattttgtgtttttgcagaatgtgttgcaaaataaaacaacttggtatttaatttaacccagtgctataattcattgtaatgtgtattgcttgttgtatctttgtgttttaatattacatagatttgttattgttgtgaatcaattagcataattacaagaactaaacttaatcaaaaactcaaatttaagagcagaggaataaaaccgtaatggacaaattcaatgcaccataattgagagaaaaacttacgattgttttggtaatattttttaattaattttttgttttttaattaaaaaagtaaataatttttttttaaaactgttctataaaaatatttttatt

SEQ ID NO: 379472 - DNA, 1869 bp, Cannabis indica
gaattcagtctgttcttctaagggaattaatttcatcatccattgcagacttccacattttactatcattgcatctcatggcctcttcataagtcttggtttcaaagtcacctaggtctgcaatgttcaatgcatagagcaccacatctgcaaagtcatatctcagtggtggcttaaatgccctcctcttatgatctctgaccaactcatagtccatgtggttgtcttcatcaggttcagattcactatctactacctcttgttctcccttatccacaatttcttctattgcaacatggatgatataatctgttctttcaggcggcaccaccttaaactgaacaccctcaacattcttactttttgatttagcatgggattctaatgtatccttacacattttattttctttaaacacaacatctccactgacaaagtactttcggtggtcacctggttcaatgctccataatttgtatccttttacaccctctgcgtatccaattattatgcactttgtttctctaggctctagcttaccctgcctcatacatgagcataagccacacatccaaatattcttaggtgtccatagggtgcattttgtcctatccatacctctatagggattttaaagtcaatagcagatgaaggacatctattgattaggtagctagctgttactatagctttaccctaaaaatttttgggtagaccagaactaatgatcatgcatcttaccctctcaagtaaaaacttgttcattctttttgccaacccattctattatggtgttctcataactgagagatgtcttccaatcccttcttgcttgcaaaaacccttaaacatatctgtacagaacttcaggccattgtcaatcttgagttttttaattccttttctagtttgattttcaagcagtgatttgaattacttaaacttaggaaaggcttcatcattagttttcaggacatacacccaaactcttctagaaaaatcaataaaggaaatgaagtacatggctccacctctggaaactattttggatggcccccacaggtctgactgcatgtagtccacaatccccttggtattgtgttgaccaactccaaatttcacgctggtggactttccaagcacacaatgttcacaaaactccaactcttgaatgttatctttaccaaagaccccattctggtgcaagaccttaagcccttctgacttatgtgaccaagtcattgctacattcttaatgtccttgattttagcattgatttggttcttcatagtgtttcctttcataacataaattacactcattgatgatcccttaatcactaccatggatcctttcattacttacatcataccatgctccatcttcactaaacagcctgaatgatccatcattgcaacagaaattaaatttcttttaatctcaagtacatgtctaacctgtttcaaatccatctttgaacctccatctagaatttacttgactgttccaatcctagatatatggcatgatctattgtccccaagcttcacataacctagtttaatctcttaataatcatggaattggcttctgtctagaaatacatggaatgaacaacttgaatccaggatccatcccagatcagattctccatttgaaataactaaaacttctgcactctcatagccatcattgtctggacaatcaaatacaatatctgcattgccactcttgtttcgattatagttctagattagatagtcttttcttagatgagatgtttgattacaaatggagaatctgttggaaattattttaccaggatcttagatctactcacaagtttgttgattaacaccctaaatatg

SEQ ID NO: 379473 - DNA, 3856 bp, Cannabis indica
aatgcatttacaagaaagaaaaagaaaaatagcaatagggctattagagaagtagcttcgtttctcgtcttctttgctcaatcaatataccgatattttggtgttttaggcgtagagaaaataaaactaatttatttacaaaaatcaaaaagaaaaaggaatttatttacaaaaatgacacgagtcatgaaatgttctcaaagacttagcttagtcatcatgaagctcaaatgcttctttcttcttagctttctccttttcaagaagataaagcttctctgcctctggcatagcaagaatgatggagtgaagtttagagtttaactcatcaaccttttcaatcagtctatcatttgtgaacattcccaaaatgacactctttatggttgcccaactttcaattaatggcaaagcaatgatcactgctgagccaatggttccccatgcaactgcaatgactgcccagaatgtgaaatatccaacactgaattgccctgcataaaacccaaaaatgatataaacaactgatcatcaatatagaaacttggagaaatatgtcttttgttagaaatttacctgctgggagagtgaaaagaggccataatataacaatgacagcagtaaatccaagaccccatttcacaatccatgattttgcttttaccaatttctcctcattgaactcttcacctggaagctcagtactattttccttctcaacaactgtgatctgcttagttgtgtcccaatcatagttctgaggccacacaaagctgcaaacagcatgaattgctccaccagtgagtattgagacaaggttccctgcaagcattggtgcatttcggcctgttgtgtcgagatccacccttccatactcgattttcgtgactgaaagccatgttatgatcccaagaacacaaccggaagttgctcctaggattgctccaattgcatttgcttttctccatagaagcatgaaagcaatgggaagaacagctgagccaatgatcactcccattgccaagtacatccaaccaagtgacactccagccttgtttagtatcactgcaagaagtcccatgaaacatccaaagccaaagatgacataccttgatacttggagaattttcttcccacttgcttctggatttatgtatgttcgatagatatcatacgtgcatagcgacgagactgctattagctccgacgaaccagcagatgtcacagccctgttcattgcagcatacatcaaaactcatagctcaagaccatgtcaagcaaggtactcacactaccaatatactgaactttaatatgcagattttaacaatattttcaatgaaagaatgaaagagagacaaaacttacatgaaaagcatagtaagtaggagaacagaacctcctttccccatcaaagcaatggcagtggctggaggaaccaatccatggcttgcttcagattgtgataatggcaaatcaagggctacagctcccaaaccaagtgatgttgctaaagcgaatggaaccgcaaaccaaaccagcccgcctaataagtatcctttgtgagtagatgaaggccgtgctgcaatggcactcacccaatacccctaaagttttccaataagtattcaaaatgaaagctagtcaagttctgaactataattcatatgttggtattgcttgaaattagttgagaagcttacattatcaacaaaaacagtgccaaagtttccaacaatgttgataattccaaaaacaagaccaccagaactcaacattgttaggtatgatcctttgtaatttccagtaacaggaccacaagattggccatgatgagatattggctgctgacatattcttgatttgctagccaactctagtagacggctgtgtatgacactcgggctaccaagctcgctgctcgtcacgtatacaaggtagacaaatattaccaaaaccacatgaactgaaaccaaataacaagctaaagtctaagagcaagacattgttataagaaaaagaatgaaagaatatcaaagaacagaaaaattggcagcaacaacaacaaaaatagtaaatgagagcacctataactgaatgtatgtagctagccaagaaggtagctttcaatcctcctgctaaagtataaacaattactccaagaggtattaggaagctagcagcataaatgtttactcctgtgagtgcatttaccacagcagaaccgccgagaagcagcatggccgtgacaataatattcgtcataaaacagaaagtaagaaagacaatgtgtgctgcagttccccatctgaaaaagaaaatgttctcatgaaaattaattgtatgttatatattttggtttgagatcatcaatgctgcagcctgcatcacctaccgagcttttactatttcacaaacagtatgagcatgaggagcctttcttttgatttcaatagccattataccaaacaagagcacctatcagtgtaatcaaagatgtaaagtcacattgtgtaaaaggggttttccatattgaatatttttaagagtaaaattggtgtgaacatgcctgaattgtagccccactagcataccagaaaggtccactaactccatactgccaagctacatttgagctttgtaagattgttgctgcccaagtccactattaaaatcattcacaaaaaagtctcttaatgttgatatccatgttagtatacaaaaaaatatgtggttgatttaggtgatttcttacttgggatacaatcacactggcaataagtcctgttttaacatttctgcctgcagtgttgaaccattctgaagtgtgacgagaaccaacatatctcttctcaagccacacctaatcattcaaaccaatacaacaaaaatcaaactatgtatttgcactttgtaacttattataaaacaaatttctcagattattaaagaaagggtaccagaaaagaagtgaagacagcaaagaaggcaccaaaaccaagaataattgagtagcccacaccttgattaagcacagcttttccttcaaagaaactactctgtctcacacagcttccatccccagaaacatggtagtatttctctgagaaaccaaatggtggacactgtaaatgggaggctgccattgagaaactcagactatatttgacacaagtttttgctctaacctactttgtttctcttaattttgcttgaaacccaatttgtattcttgctaattcattaagatcatgaaaaaagaagaaaaataaaatgaagaactgaaaaatctttgtggactcaactaccaccgcaaagtgatgagtcaaactaagaagttttctatggcagtgtttgatatgtttacactacaacatgaggcttgtttttttgtttgtttgttgtgtacacacaaataagattcttttgtttgttttaaaatgagttattagtactggttttgaataattaataaattagattcttagtatctattttgttagagatggaatcaaccaactgttactaccgaatcaatcgtcaatttggactatgattggtagatatttattgagtcagtatttgattcaccaattgggtgatcactgatcactagtgtcccaatgcaaagtctttggatgaaaagttgactttcatttactattattatttttgattaaaaagtggtttattttaaagaaaaaaaatatatctattttgttactctccccaaaaaaaaaaaattagttcaatttgttgctactaattatcaaaaatttattttgagctcttaccccctttgagcttcttcctcttgatggtattttgttgtacccaaaagtgagtgttttaatat

SEQ ID NO: 379474 - DNA, 5986 bp, Cannabis indica
tttccttccactgattcttttttagcaatttctactctagttcggaggtctttgtatagtcaacagtttatctttgctataggtagctccacatgaacctcagatcttaacttatttttttcaattatcctcaccaactgccactgctaggctagacagctccatgagttcaaaattttatggtaatgcttgttagggtgccaaaagggtgtgttgttataacttattgttgtacttgacacttatcattcatagagctatgctatcatcttgccataataaattattttggattgataagtttttttcagctcaaccttcctttgttttgttggagaaccactcccgtaattaattgcttaagaccatcctttattgtaaataatatatggtttgtttttctgtttattgtttgactaatatttgtggcacatttgcttcattactctattaatgtataattggttttgtacttaaacaattgtcttcaatttgtgcaaatttgtttgccttagtaccacactcaacataagtttgatgcattttatggaaggcttctcatttcatgttttgaatttacacaattgttttgaatctgattatagatataccttttctattttgatcacagtacatgtgtaggatttaatgttgacaagagagtatttttctagtcaaatcttgtgtgtttgttagagaagccatggatttttagcaaggatgaaaaaaatcaatattattggcatatttttgttgaaaatatctgaatttataaggttctgatatttttttagtaatctttgtagagaatcttgtaaccacattaatgattctcgtaactatagaatgggacctaatgatagttattaatcaactatctgcaatatttatactttaaattattcatctacttgatttggttggtttaatattctaatttacatgtacatatactcaaagtttatatcataatataattagtattgattgatcaagaccatatgaaagttacttttgaacctctaagagtttgttttggtattgatatcttattaaatgtgtaaaatattattatatttgtatggttatgtaatttccaatatttttaaccctgattcctagtggcttgttgttggttatggaacggtgcttctataataaaattgtttgtgttaatcagatttgtagcttatggatgtctcattatcttctcattctgcatgccaggatatatttaagaaatctatacatgaatctgagaaggaaaccattcacagtggcactaagcaagatgatattcttaaaaaaggttccattaaactctgcatttttaagtactaagacactcctccttcccacttatagttatgcattaacgtgaattattttcgaatcaatttgtaggagtcacaacaccagctaagaaagttccacagtcttctcccaatccaagtgtatgaatgttcagtcttttgcttaaaattgttgtaacttgctattcattttcgtgtgttttatttgctttaatgaatttgaaatttgtaacagatggttggtgctggtggcccaactcacataacaaaagatatgaaaaatgttgatgaaagtggcaagcaatgtgaactaaaatatgggagctactgcatttggagtcgtgagcacaaagaagagatgaaggattcaatggtgaagaaattgaaggaccgattatttgtcgcacgagcatattttcctactattgcgaaacttcccgcacaagacaagttgtctcgggagttgaaacaaaatattcaggaattggagaaaatttttagtgaatcaaccactgatgctgatcttccaccacagtaagtttctaaaaacattttatataatttcactattgaccatctgagttaacagctacccatactaccaattgtcacgtatatttttcagttgacttttaatttttcaatgttttgccattaattattcttaggtgcatagtttgctgccagtttcttattttttctgcttggacatttatttgagcaaggatttctaaaatttctttcatggtatatagagatgattaaacatgagcataatactaactgacgaccctgatacggaatatacataaacagattcaataatagcctccagctgaattattcttttacttctccttgatccataatgtcaactatccttcaagtatgaaggagccaacaacttgctccttttctgaatatatttgttgcaatgtacaatgatcaggctgggcatggtgggtgtgaaatcttgtattgattaagggtggtgtattaacatgtcattgtatatatttgatgttggctttctctagtagtaactaaagaaatagatgaaacacaaccttaaattctgatctctttttagagattttaattaatttggttagtttgtgatcctgattgcatttttttttttaatgatttgcataagtagatccatttaaatttgtttgatgattgtctagacaagatcaatctatttaaaaattcccttgaccctagtgatcgagctctagctcttatgacaagttagctttagatgatttgcaatacactaatagttatttttttcatgttccagctttttatgtttgtatggtttttgaatgttgattagggtggagaagaagctaaagaggatagaagctgtaatagcaaaagctaaaacattccctgtggactgtaataatgttgataagaaattaagacaaatatatgatatgacagaggatgaagctaactttcatatgaaacaaagtgcattcctctaccagctggctgtccagaccatgccgaagagtcttcactgcctgtccatgagattaactgtagaatattttaaatcatcaagagagacggagctctcctccactgagaaatacagggatcctgctttgcagcattatgtcattttctccaataatttacttgcatcatcagttgtgataaactcaactgtaatgcatgccaaagtatgttcagatagtctctctaccttctcttgctgtgcaattctttttcacttttctcattatggcactgataattctttttccttttttcaggatagtgtgaatcaggtttttcatgttctaactaatgctcagaattattatgcaatgaagttatggttcatcagaaacacttataaagaagcaacagttgaagtgttaaacattgaacagctttatccggacaacaaaaacatacatgtgtcgttgcctgtggaattccgtgtttccttccatagcattgacagttcttcacccattgcccaaagtagaacagaatacttgtcaactttctctaattcacactatcttctacctcaaattttccagaatttgaggaaagttgttgttttagatgatgatgttgttgtccagaaggatttatcagccctctggggcctcaacttgggaggaaaagttaatggagcagtgcaattgtgttctgtgaaattggatattctgaaaagctatctgggtgagaaaagttttcacaataactcttgtgtttggatgtctggcttgaatgttattgatctcgacaagtggagagaactagatcttactgaaaagcaccgcacattggtgaaggaggtacgcaagcaacaagcatctttgcttgacaaatcttattagttcatttgtgcaataatataggctcacaatttaatcatatttatttaaggttgctttggcctttcccttggcaagagtctactaactcaatttctctgaatttcttctgtgttgattttgttttctaaatctactgtaagctacttacatgtttttgacttttatcttattctttttaaaatctatgtacagttgagaatgcaaggaccaagtgaagctgtagcattgcgtgctagtttgctcatctttcaggatttgatacatgttcttgatgactcgtgggcattgtgtggattaggtcatgactacatgcttaatatgcaagccataaaaggagcagccgttttgcactataatggaaacatgaaaccgtggcttgaattgggaattccaaaatataagcattactggaggaactttcggaaccaagatgaacaattcttgagtgattgcaatgtgagtttatgacaagcttgactgtgttggttttctggtagagattcctggagacagtgctcggaagaaatttgtggatgttgattttgcagttgctgaccttattcatcaaaaaaccccaaagggtttatgatttggaagtggagattgccatcttgagtttgacgaacagtaaattctaatttttttggtaaatataattttattcacttttggggagagcacaagggacaaagctctctgatggcaaccaaagtgtcaagtcaagagtattagaggaattgaaatgagaatggcaattcatctagaaagtgatttaagtagccttttggcttattttgtcaactgactgggagtggagaagcatacaaataattatgtacacgggaagttgccctggatgtttggttcatagatattcaacatgccatttcacaatataattcactattggctgtaaagcctgactagtattgtatgccttaaaaggaaatcattcttctaccagggtttgtattttatttatttttaacctttttcctttataatgtgaactagttttggtcactcacgtgtgtgttttcttttcttcttattactatccattgtcgagatgagagaaactacattttcatttagtctaaatcagtattagattgtggcatttgtagaatgaactcttgatcaaatacagcaacttgggttattgttaattaaatattgacacgatgagatccagaaaaaccaaaaatactggcagtggtattacaacatcttcagataaagcacttgtccatttcttattgcagacttataaccacgcggggccctcgcccagagtgtgttaataattatttgaacctttggcttggaagtattttccttgacgaatacaaaatcaaagaaagacgaaacatcaatttagtacagacaaagattagcgtacaccgtggcaagcatttctatttctagaaacgaccacttgataaaccctctaaactccaaaaagtaatgagtacagaaagaaagacttaaatttttgctgactttcataaacaagatgatcattctgcagattatacattatatatccttaccttccacattgctcagactggaaagtatttctcatagtaactgtaagaacatctcttcaactaaattttaaaaaataataataaaaggagagattaatgactagtgtagaagggatagtacttttaagctctcttgggatttttcttttctttttaaacaagaaagttatctaatagtgaagagttgtgggcgtggcatggtatggtggcctccaagccgaagctgtaagcaagcaaaggtccttccagccaagtttaagggttccattgtcctccaccaaggtgtagccatctgaagggaacatgccgagaagtagagtggcctgcgtggcagcattgcctgcaagagagatgccgcgaaagcctgactgctgaagcttttcccgccaattgtggaacttgacgtccctgcttcttgacggccctcccacggccaacacgttccttatctccctcgatagcagctgctgctcaaccacgtgccgctcctcactctcttcgtcgtagcttgctcctagtgagtcgaacagcgctgagtagtagtgaatcgcttccacaaaccttcctaaaaacgatcctgcgtggctcaggtcctgctccaccactgttaccacttttggcgccaatctgatgtaacataccatataataagaatagtgtaaaaataaccatgatcaataaggtttaattaatgaaaaaatttaacatgtttttttttacttttgttcttttagcatggaacttgaagctt

SEQ ID NO: 379475 - DNA, 3444 bp, Cannabis indica
ttattcaaatcttgatggttctgcttttccgcgtaaaccttcaccagtctttttaaaaaagaacttattctcttccctaaaattattaaacgtcacacacatatatataattaattataataattatattctattaccatgatttggactgctatatatactcctaactagtttccattcttctcatgcattactaactctcacacaatatattgttacttataataatttgcattaatctttaagagcttgtgaggaaatggtcagaagcacagtcacaaaagcaaggatgttgttgcttaggtaaattaacatataacacaataatgtcatatatataatgtttagtatttatggctcaactaatttatgtgtacgttacaaaatatttgtcacttttaataataattttttttatttttaattacaataaaacttgtgattaaatgtacatttgttgtgactaaaaataaattaatgacaacttgtgtctaaatattatgttttagtaacaagtaacattttgttgtgattaaaattttcatttaatcacaaaaaatttatattgtgattaaaaaattagcactaaaaatactcgtttttactatgaatttgatcagttcatacatgaaagcgaaacaagtgggagtggataatcataacgggcgggcgcaatttagcaagctgataagaggaggagtagcagtgatgaaagactcatcatcatctcatgaaaacaaagatggtagaatattaggtaataataataagatcatgaattataattataagagagatgatgaatgtgaacatgatgatgatgaagaggaggtgggttcatcatcgtggtcgaaaacgaggtcgtattggagtcctcatccgtacagtgggatatatgtaccaaaaggacatgaatgggtggtggatgatgtgcccaaaaatgctgcctcttttggtgatcagacttattggctaaggaatgttgatggtgttgataagccagaccccgatcttcccaactctcctcatcaatattactacagtaccttataataataatatacatatatattatatatgatatgatgatgatgatcgtaaactaattgatcacacttcaccactctctagctaattaattacttataataaaatagctgcatgtattaataataataatcatttgattttcgagtggtatatatatatattggtgttgtgtataacatatatatctagtaataaactttatttagctttacgtacgtatacgcgagcgtattgtatggcataattattattattaatgaataattttaattagcattattattatgtgttataacgaagaatgtttagcttacattaaagccgatctagtctttgaaaaatcagtcatatgcccacttttaaaatttattttttgacgggaaaattccttaaactcaaattctattagcaagcaagtaactgagtatgtccatgtgtattaatggcccacctaaaaatatttaaaataaaaataaattataaattaaattaatttaataataaaaataaatcaaaaaataaaaacaattaattttttttcttttttcctccatatattttttttccaccagattgttttcatcattcttcatcaaaaatatcactatcacctccaccaccacctcaacttctttttcagatccaaaacaaccacaactatcgcacctccactacagttaaacacaaccccacacgtcagatccaaacacaatatcaaagaaacctaaacagtaaaaacttcccacaatattcaagaacttatttactgaagagttcacaccataatttttcaagccagtctcaacactcaagaatagagtggctattagattctataagataagtatatttttgtatcacaaaatattctcaactcatgagacactataattaaaataatgaatgatcgtaaactcacaccacactacattatgggtgtgtgagactgaggagagagagagagagagagtgtgagataggagtataaggacaaagagaggaaataaaaaatcaattcataatttctctctcctttttaccgcatatcttagcttattagtttcttgcttgtttatattaatatacatcatatatataatgttataaataaagtcttttaattaattctttaaaataaaaaaatatctaatttaacttaaatttaaggaaatttgcagcaaaagtttcccaaaagttcactttgatactgtaactaattagttatatcaagatgtatacaaataagtttttagagagtaaccaaaatgtatctcaaattatatgatataaaaataaaatttttttatgtaaaggtaattaattggtttcttatcaatattattagtaactaaaaagttacttttaaaagtataaaaaataaaaaaaaattgaaaaataaaacataaaaaatataaaaaaaaatataagatttagctaacgtggcacgtcagcaataatatatagtaacgttgttattaatattgttaattagacacaaaaactagaggtattcacggtgcgggttgtagccatttttttaaaccaaaccacaaatgcattttttataattttccaaaccgcaaccgcactgcgagatcttaaaaccgcaaaaatcacactacgaaaatacggtgtggtatggtgcagtttgagcagtctatactatcataattatcaaacattataatgaaaattttaaaatcaaactaataaagttttaataatacaaaacaaaaaatcttattaaatttttaacacgtacaataattatcaagttattatattaaattatttctaaaaaataaagtaatatacatatatatatataatatatgtgagttcttatatgaaaaataaaataaaaaatatatcgtaaaaattggtgattttttaatatatagtgcagtgcggtttgaactgtaattattaaatttaaaatcacgaaccgcattgtaccgcgtgatttggcaaaaatacaaactgcaactgcaccgcaaaagatttcaaactgcaatttttatgcggtgcgagcaatttatacaatttgaacaatttgatgaacactcctaataaaaactatatattagtgtaaccttcccttttattgtactcttggtcttggattctatattagctaaaaagacaatgtgagaggactttaaacctcataaacccattagcattaattcccaccaaaataagcttaaatatatgttaaaaatattttcatatacacgggtagatttaggatgtgataggttgtttgtgttgtgttgtattatataattaaactaggaaactaagccgcgcttcgcgcgggttcgacctaactttaataatattttaatattttaatttatttttgtaccacttgagttatataatttataatat

SEQ ID NO: 379476 - DNA, 1893 bp, Cannabis indica
aggtattatgtgttatgaggtatgttgttatgaaactagttttctttttaatttatgttttagtatttaggaactaatttcctcttattttttttaattgtaaactatttgagttattacgtgttacttttcttatttattatgttatataaccgattttattttagttataaccggtttgagttatttcctattatttgtttttatttattataatactattatagatccggttctattttaattataattagtttaagttatttgtgttatttgttttttttattcattatgttacagaatcggttatatttaaattataatcgctttgagttatttgtttttattcattatgttattgaaccggttctatttttatttatatttgagacatctacttttggtgactttttcggcgaagataacttgacaatttttttggcaacagtgacttttcggtgacttttccggtggcaataaggtttccagcacctttctggtaactttttcggcgtagataatcttttttagtggaacttattattacaagttttattaaatttttttattattattttttttcatatttttaagtgtaattattttttaattctatatttttttgcgttatttatttatgcctataccgcattttcctatatttatgaaaaaatcccatgtatataaccgttgtttcccagcttagtattttggcggattcctctagaggaagaagattgtctgcggggctttctccattcaattttcttttccaagttcaattttcctttccagctttattattaatcaggtaatatacattaatatactctgattggactttctatttcttctttccttttccaatcgggcttcattgatctcattgttcttcccaaacccataatgggtcttgttttttttttttcaaacttaattcttgttctgtctagttttacctgaaatggattaggtctattattagtgtttcatctaagcaaagaacataaaacaaaaatcaggggtttatagggttatttattgtttctatcgtaggtttgctaactttctctagctgatgtttcatgggtggcgactattataatctgcgtttgcctctttgttgaagatgggacatgggtcggtgaaagtccacttagttctctgagaaatattcaagagctgtttggtttgaagaaccagattttcaatccagtcaggttcgtcttttatttcaaatgtaacatttttgcaagaagaactgtagcacattctcggcttttatttttgtgtttagtaatttattttgcaacagttttattctctaattaatatcatgagctctctttttgctgtttggtttgatctatttactatgaaattgctgaggagtgaatcaacatccattaaaacaaaatatattatctattatagttgaagtcatggaaatatggggggttaagtctattgtgtataatatacttaacagctttgtggttaagtagtttctgaaaatttgtcatttcgtttcagtttacactcaaataattgtaaattagttgtaaagttcctgaaattcgtttggaaatcacagctttttaagttctttagaatctagattatgttctagctgtgtgaacaaaaattttgctaatcatgaaagaaaacaatgtttgagaagggaaattgtatatacagatataactcataggaatgatggatttgttgaaattctgggtttatactttgaatgagtactagttgttatcatatagtgtatttttcttttgatgacaaaacttaacttgtcaaatgtgtagcaacatatgctatttaacaacttttttcttttttaaaaaaaaaagagaaagagaccacttgtcttagaccggc

SEQ ID NO: 379477 - DNA, 3200 bp, Cannabis indica
atctaaaaattaaataaaaaaatgagatatcttaatcttttaatcaagaaaaaaattaaatatttaaattacattagtttttcttgattttttatatttgaaactatattttttttatataaaaaaaactttaataattgttaaattatttaatattttaaatatattttaattaagtttcataataattgttgaatcaaaattattttgagaatgtgatgttgacttgtactatcctagtcaaacttttttttttctgttatcaaatttaatacttggatttccttacagaaaaaaaaaatacttgagttaataatgagtaaaattacaataaattcttaactgtagtaagtcttatcacaaaatattttacataagaaattgtatgttacaaaatagattacttaaatttatttgttcctattatatccctattaattataaacatagttatcataatatatatgtttattaggggtggtaatttgtattgttgtgtgatatttatatttatattcatgtttaattggtcaattctaacatgacttatatttatttcgtaccaaaaaatctcaataccctaacacgaccacatatgtgactatagttatcttacattacatcaatatagttagaattgcacatttgatttttatatatatatttttaggctctacctaacatgtgaaatggtgaataaggatgttgtaatcagcttaaaacataatcatgaaattaaaagtaccataagttcttaaggcataccatcagaaaaacttctttaaccaattgggtaataaaacagcagtagcaacgacaatatagaagttaaaataaaatagcaagcctaggataggactgacaaaacggattagatacgataacacgacttgaaactcgcacgagagttagcgggtttggatttaccttaaatgggttcaggttgactcgtctaaccagtttaataaatgggtcatgttcgggttgacacagctaacacgaaattgacctgttaatgacctatttaaagttattttagtactttaatatgtcataaatggattataaacgtgttgaatacttcataaacatgttattggttgacatgtttaaataagatatgcttataaacgagttacacgggtcgtgtcgtgtcattccgtttataaacgggtcgtgttcgggtttcattttttgacacgattattaaacgggtcgtgttcgaatcaagcatgtacatgttatacatgagtctcgacacgacacaacacgacccgcaaacacaaattgccacccctataattatattaattaattaaataatttattacaattaacataattcgtaatatcaaatataaattaggtattttatatgtaatttttttctaattaagatttttttatgagaataaataataatatattaagtataaattaataataatatattaaatataaataggtcaattcatgtcaattttatatatatatatatatttatatatatatcacacggattataaccttaacccaatctaaataattatcttgtcattcgggttcaactcaatttcaattttttttatgagcttaacttacaataatttggtatcatgttgttgtgtggtgaccttaattacacctctaaattctaaattgtccgttataacactaataacattcatatttccatgtaattaattcaaacatattaattaaaaacaaaaaccgaaattgtagaaataccgaccgacgaaaggttgagtttctgaaaagatataggtgttaatttgttaaggaccacctgcatttcttttttcattttcattttttttttaatattgtacctatatttttgttggtgtttttatgtccatataataaatttaacactataaaataataataataataagtacatatatgatatatggagattgaagtgagagatgtatataaaaagagatgaagtaggtttgctcatattaaagatgattcaatttaaggtatctcaatctcactctcctacacttctctaacttctcttaatgctttgtcgccttgtatgttgccaacgacaaagactctatctgtgttttgtatagtataacacacaaaaaaagcacatattagacactattccctctctcttctccttgtgtcgttttttattttcatttatgggtccctaccattttctaatatgtaatattaaattctttaattagagagtttaggaaattttagttaaatttatcgtttcaactttcaaatcccaaatgatgaacatcattaagaaacagcatgcttacgaagttattgcaaatgaatatacacactaataaaaactcaaatacaacttgtaatattttaaaacgggtatgattcctaacactatacagataaggttcaaaaaaattatttcaattattaaatcatatatggttatatatcgatgagctctactagggtcaagaaattgtagcttagaaccacaaattatattatatagtgttaaaatttattgaaacatttaaattggacccaatattgtttgtgacagaatcacatgcatttcccccaaaaatcaaacctctactagagaacgtaggtccaacattttgcttcattttttttattattattattatttttccctctacgaatttaacttaatattattaaatttttcttgaccgcaaacttcgccgaaatttcacagcagaattaaaaaagaaaaaaataaaaaagaactcaacaataataataaataaataattctgagaataatgctgacatggcacaatcacaatctttgaaggtgccacttgtcaacgacaggttagtgacatatgggcctttaatgggccgtggtatccgtcaatcagctgacccaatgaaaagtacgtctcctgcgattttattcttttccctcacgatgtgcctttctttacatatcaaatctagaccgttaaatatggatttatcgataaatctgtaccgttggatcagtagctagtgtatacagtttacttattttttatggagaaaaaaaaattaagtttgtgagaagacaaaagataaccaacgtgaaggtctttgttaatcggttagggtagggctccaataaaaaggcacagccatgttagctggttttttatttgtttattattattatttatattaatttttttttt

SEQ ID NO: 379478 - DNA, 3560 bp, Cannabis indica
gtgcgtgtgtgtgtgtgtgtgcaaactgtgtttttgggaaggtttgaggacatagcttcgagtttcttcgaaactctctggtagggtttttttgaagctcgaacctaagatctaaagtgatcgagaaggttcttagtttatgggttttgttttaggctaaaacagagtcgttttgggactctttgacttgctgaagtcaaaagaagtaaaggtcgaatatgaccttggttaatactggcaatgttttgttggtgtagggcaattttgtcatttctcaaatccctacaataagtattgctattaggcactagtagtgtctaacaccttcaataggtggtgtcctacgattggttagtaatatttcttaaaagttattttttttatattatatgagactcgatatttaattacaccaatagtactataacattaaggaatattctagacacctagtaccagtagtactttttagcaattttcatttattatatatgaatatggtgtgtatatgtatttaactacaatacatgtgtttgatagggactaagtataatacttatttatgttaatatatacagttacgtacgccatattcattatagtgatgtaataacactagtatagttaataaataacagtcgttttcgtttaataatgtcacttgggatgtatcatgtatgatagagtgacattaatataaagcttaattatatatacaatagagtgtaacgcatttattagcaaactaattaccataaatcatcctcaatgaattaattattcaaaaactatatgcaatacacataaaaaacagatatgtattgaaaataaatggcaagaaataaatgatgtttaaattcttataagaacaagtaagtagagagttagagtgtggagtgcaaatattaatgggcaacatcatttgttatgatgataagtttaaagggaccactagttggtgaaccctcacaccaaagatgtttatatagggcttcgagtgatcaatttcatctgtaggtttttgtttttcgaacagtttatatcagaatgggcctactcacaagtcgcaacctaagaaaaaaaaccactttttggttgaaagtaacatttcagtggtcctcatagttaatatccactactactgtcatcaaatctaacggctctaattcatttatcaaagcttcatttcatccaatgaaatggtccaccacatacgtacacacacaacaaaaaaaaaaaaataataagaataaagaaccatccccagatccaagaatcaatatgtaagttttcttcttcctccttttcacataacaaaaaaaaaaaaaagttttcttcctctctcaattttttatttttcaaaataaatttgataattcacattttacggtgtagtaatgtactcttacggtgtacgttgtagttatttaatatattttataaattttgagaaatttaaaaaatttaacacatacgctaaaaacaaaatattgtgttcgtgtattttttttatatttaacgcgtatgaaataaactatttatataaattttacattgtaaatatttataatatacattaataaaaatattagagtaaaaaaatcttccaattaccgaaatagatataaaatacaagggtgcattcgttaaataaataagatgtggattataaaagcacactatctttatcttatataatgttgccaattgccatgcaactaacaatagaggcagatataggtggaggcccattatcaagtaccaccattaagttattagctatgaaaattggtcagaaatgcttatttttaatgtttgtataatgtctattatatatatatcttttacagttccataatatttttccaataagaactgcaattattttttacaaaaatacagcctcccaaatagactcatctgtttagttatgggcgaactcacataaaagacaaggaaactcataaaaaaattaagaaaaaaatatgtattaatttagtttttggcttttagatttgtttagtattgttgagctaggtagagttgtgtgcttaaattaaatctgagttttgtattattaatttatttagtttgaagatttccattttaataaatgtttcaagtagtatttcagtgttttactattggctgaaattttaactcttttggtaggattcaattggactcatacgtgccgtatctcaatttaagcattttttttttcaaattttctagttctcgtgatagatattaataatagctagaaaagtgttattcaataatgaactaagcgtgttatttgaggatgctataattttattgtctaaatctttagaagtaattttgtctcatgtgactcgtaataaaaatttagcaatccataatttgacaaaacattcccttcaattgaatgatgatgaactatcttagttcgaaaagattttcacgtaaattacgaatatatgtatcgtaaattagaatatatatggtaaattcataaataattttaataactttataaaaaaaaagttaaagtcaacctaaaagtttagtgataatagtaagcattattggcgccttctcttttcatgtattttttttttttcctaacattttttattttcgttgaaacaaattcaaaatagtttcctacaaagagcacttttcaaattttcttacctaccaaattggtaacaactaaattgaatacgtgggtacgtacacgtactacttctacattaatatatttctatataaccttcctattggttattcacatttttctttttcgaaagcaatgaatatatcaataaattaataaaccaatctcatacaacttaaccaatcctattggttattgatattaatgttgcatactatgttattttaatgagccaattttgagtagacaaaaataatataatataaggtaatacatatacattacatatataataataatgtatgtttgtaagaagaagcaaaggagaagtagtcggcaaacacgtggacgttgaaatattaagagtatgtgaatgaagctgttaataattagttgtaataatttttattaaagatatgtataagtgaaatacagctactactactactaagtactacccctctactagtctaccagcaccaccgacatatatatatatatatataacatattgtagtaccaaaaatccagttgttaaattttgcataattagtagttgcagatgctagtatatatattatcaatggcgtcggcactttgaaagagactaacatccacaactacgtctctgtctttattatttatttatttatgggattcgactatacttcaccaacataaatgggccaagcagaagcccagcctcaactctttccaattgggcctacaatttttgtggacagccttctagatttaaattagggttatttacaaaaatacggtaattctttgcaatgtttgaatttactctatagactttagctttttctttccctaatatgggaatttgacagaaatttcaattttaatatcgagataagttgaggaatactttttt

SEQ ID NO: 379479 - DNA, 3676 bp, Cannabis indica
aaaattatataacttacatctacatttgatgcagcgtaatttgataatctccccattaactgagataaaattgtcttggtatcaactgttggctacagattcaaagacaatcatgaggttaaagactgtcggcttaaccacaccaataaatttattgttgagaaagagatggtcaaactaatgaggaaatcttcacaaaaaatgatattatttcaatacaaaaaacaaacaataaaattcttcgtaagagatatcataattatcaacttactcagatagcgcaaaaaattccataaatatgaacacaacacgcatatcttgcttccaaaatagaaacatttagaatctcactatgattaggaaatctttctgagagaagatcattaaagatgaaatgatactcagcataaatgatgtaattacctgaagctggggacaagcactaaacagtgtgtccagagtctgcaagtggtagtcatcaggaaacacctgaattatgcattccatcaagtaatattgagccagatcatctttacaattgacaacctgtgtaatacaattggaatgaatatgcaaaagctcataaaaaaatagacgagttaattagatagatacaaattgtaagtcttcaaaatgagctaattcacaatacctgctccaagaccctgggaaggacagtctccttgtacatttcaaggtcgacaccctctatctgactaagaacgtggagatttttccccacctattaagacaattcagaatggcgtagttttctgtcaaaaggtgctggactttttcatcagccaatgattcagatttacaacaccacaacttacaaggtcacgaagctcccgtctttccttttccagcttctctttttgaggtccctgcagaccagaaagtccaaggcctcaactcaggatcgccaaagagtatgaatgattcacaagcaccataacacctgcatggccaaaaatcatgcccttgtggttcatttttattcccatggcatgcaagtactctggtgccatgcatttaaaaacacgacacagttattctaacagatgttaacaaacctgatgctgcattcgaacccaaagcttgttcatctctgtgaaattctgtaacacaaaatccacagcatccatgacagtatcagcaccactgcagagagaaaagtagagacgatttgaaaatcagttgaaaaaatagtctaccatatcttcaaccaaatatattattttttcctggttttcttaaacattaacattttagtattgtaattattagcacaacaccacaggaatagcaaagtaaacattaaaatcaactctaaaagcccagtaaacaccatacccttcgtactcggaaccaatatcaggcaacttatctctactgacttgagaaagatagcttctcagaaagagcccgcgtattgggtgttgaacaccacggcacatttccacaagatctttgagcacgtccttagcgggcacttccttagatttgatgcacacagaccccaccgtacatagaagatacctggtaaccaaagaaagaagcaggggcatcataatgaaattgaaaacaattatctgagtaagttaataagcaattagaaactatataactgcaacgagaacttacaatctcggtaatgtgtttcccgcgtgctgaaccagttcataaagatcaacaatggagacaccatgccggctttcatccttgaaaaacaactccagcgatttcaattcgtcaaatgctcgcatatctgattttttatttttataaaaaaatacgaaaacaaaaaacaatgtaagcaaatgaattgattgattgccaaagtcagggcaattgacaatccaagatttttagggaaaactttacagagttcgtagtactggtgaggcgaaagcttggaagttcgcagctccgaaagcatctgagccgagtacttgagtgcttccctaagattattgtcatcctaaagaaaattgaaatacatacgagtatgaagaattagggtttcgagtgaaaagaattgaacaggaaaattggagtgaaaagggaaggaggaagttaccaaagcgcgatgtaagtaaaaagcatggtgttgaatgccggcgatgccttcggcgagccacttctcatcgtcttcaattgagtttgatatgatcatagtgttattattacctaatctgaatgaggattcggagaatccttcaatggaagataagaagaagattggttttggaggtttactcttttttctgtgggttttacatataagttatattcgttactgttgctgactagtagagttaattccacgctaccattcaaagacaaaaatgttcatacatgaagattttcttctaacatatgcatttgtgaaatttccaaaattaataatgtgaaatattaataacctatatatatactatgtagatgttacctatatatggtaattttattttagtttgtagtttttttaatatcataattttaaaattaataatatttaatgtagtaataattattgaaatttaaaagcataatagtgacttaaataaaaataaaaattattattatactttttaatagtagttaaaaaaaaaattattatttatcttaagtttatcttcggaattaataaaaatgctcatctggttaaactatcaaaacattcaaataatatttaaaatttaactaattctaaataccaaaatttgaaaataatttttaataaaaaaataaataatatgaacaaatttattattaattgcaacactttaggtggattaattaaatttaggtttaactaactacatggatgttgagcctttacatgacaaaataaagatgtttagtgcaaatcagctaataaaatagcttgcaaattagtaaagacaagctcccactataactacgatctgaatgagtacaagcaacccaagccccttgttaactaattgtttgaaaaagataagagaaatgttatttagactttgaataagtctaatacaatatgaaacaactaaaataaaaggagaccttagttgaagcaaattgcatactgtattaaccaccacttgatagtgggattgaatcaccacatcttaatccaacttaaaatctccttaagtcacactcttcaaccaatgttggagtaactgctcctggaataatctttgaaaagccatgaagcaaaaaatcaccattgtctcgggctaaccaaccaactctaaaccaaccaactctaagagaactctgagaaccaatcatggaagtatccacattgactttaatctttctactttcacgcgctggccaactttcttccctagcaatcaaactatacatatttgacaccataccagagccttgagaattgacatttttctattgattaaagtaaactattgcataagagaaaaccagattgggcactaaaggttttgcattctaaacaacatcatttcggaccctccacaaggcccaacaaaccatagccacatgataaaattgagaactagacaatgtgttgatgagagaagagaaccaatccttaaacgagccaccttcatacccaagcaccacaaactcaaattggctccaacattgtcgagcaaaagagcaattaataagcacacgggatgtgttggaaattatttta

SEQ ID NO: 379480 - DNA, 2099 bp, Cannabis indica
attcctcaatactcatcatcatattcattaaataggttctttacctgctatcttcatctacccagctcctaacataatgtttctcgtcttcagttaaatcaagggcaacctgcaaaagttagtatggtaagattatcgattgaatgtcattacaagacttaaacaaaaccatacacaacttcagctaaaccaacttatagcttgattttggttcctccatggaaatgaaacaacacccaaaacggaaagattaaattttggtttaatccaactataaaagcacacataaatatgtagaggtaaaaaaaaaatcatatttttagggtttgcaattactgtgattgaaagataattcatatacctgtttggcgagaagttccctttcaatgtttccagcagcgaagaaaggagagtcgggatcgaattttctaagaaggggcttccagtaggggaaggctacctgtgattgttccacttccattgccatggccttgctagagtagtgaatttgaatttgaattacagaaattttggctttggaaggaaagaaagggaatgaggatgggattgccttaattgggcttctttcattaatttgggcttgtcgtgggcccatgaaataacgggttgtgcgtggcccatgattaaagttttataccaagtttatgaaatatttcacaaataatatttcgaacatcaaatataattatgattaaagtttaccaaaattttttaatttttttcagaaatcataaaataaaaataaaaaatatattttaaatttaaaagcaaaaatttaacgaaatatagtaaatataacaagtgggaaaagaaaaatagaaaatgtaaatttcatttttctttagttttgtccttcatttagctttgataaataaattataaattgtgaacaaacttaaataccttgaattaaccacatcaagagcttagtctaacatactttatttgtatataaaaataataaaaaagagtctctcaattaagtcatcactaaaaaacatattctaatgaaatgattttcatcttctttttttgtttagttttttttaacaataattttcatttttaaatgtatattctaaatgaaatgataatttagaaaagaaatactcacatatataaagagccaaaaatgaaaattgcatttataaaagagatttttacactgcatactgaaaattttaaacttttttttttattgtgcgcgaatttctttttaaaaatactgtataaacgtttatatatgcccttttatttaatatatgtaacattacctttaaaactaagttaatgttttacaaatcaagctgcacaaatttgccttgatgaatttgtacatgggcaatttgaaagcattattatgactaaaaaatagccttactaattaaagtcatataaagttattagaaggaatattttcttattaagataattaaaacaaaaatcatggtatcattcttaaaaaagtcttatcttgtgacaaggaaaaagtgtacaaagtaatttcacatttaaaaagaaaaaaaaaaaaacaggcataaagcattaatttcttcttaaacttataagttttgataattgtacatgaccgattcaatactatactcaatagagattggtttaacctttagccatttgtacttgtgcatacatctatataggaaaattttgtagagcctatcacttttttttctctttgatagaaacattagtttcgataattagaaaaattaaaattaatttttttaacatataatgatttacattatagtttatcatacatctttttaaaaaatttagaataattgatcatacaaaataaagttcaaacttcaaaataatcaattgcatatgtatatgaaaaaaattaaaagtttactatttaatctttattttttacattgtaaatctttaaaaaaaaaattaaaaattggtaaaatgcatgctaagtttataatataatcatattaaaaaaaaatgtatatatatgggtgactatttaatggttacatttttattgtaaacttatggttacatttttctttaacctgtaacagcaggttactaataggtagact

SEQ ID NO: 379481 - DNA, 3493 bp, Cannabis indica
aacatatttttgtagctttctactgcctaatagatcattaaacaaaatatatgtagaaaatgaatactaaaataccatttattggaaacctctgggcggcctgaattgaatgaaacaacagggtcaccaaacatactagcgctctcatatcttcttaagcacatggctgcaaaaaagaaaaggtttgaagaaaagtcataaaagaaaacaaaaactaagaaatattccaatgtcctaaatactaattaaaaataaaagaatgacaaatagaaattggtaggaaaaaataggaagaattgttggttaacttaccaattatgcatcttgacataacaatatttggagtaattccatcctttttggcttgagaataaagctcgaggcctacatttagatcatcttttctacatacaatatgcacagagcatacaataagatctttgaagttgaacaaaactatgggttttcttctagataatcattaaggatttatataataatcaaaacaatcttcagagtaactcacttttcgctagccacaagtagaatggagtatgttatactatttggagacaatcctatggttttcatttccgatagaatttccacagctttatctagttgatcaccatcacctgcagtgaagttaaatgacttaataacacattaaagtttgtaagtaactaaaatgtaataatatcccacattatggatataaatttccaaactgccatttctaataattaaaaaaaaatacaaagaagagaaaataactaaacagtttaataaagccacgggactcacacagtgcagtgatcaaggcattgacagtggaaacagtttgcttcaccttcattgacttcagatcctcatatagctctagtgctttctgccagtctttagcctgaaaaaaaaaaagaatgtgaatgctattacagtaggtttagcagcacaatgaagcttgcatttaagcatcatataaaatgataaagaaaaaattaattactcagcaatttctatacatgacatgatttattttgttttgttatgtggctagctgagtaaagatcaaaagacttaagtggaatttcctaaaccaataatttactagtttcgtgacaaaggcttcagaaattacacttgtttggtccaagttgcaaatacattacagaaagattttacaaatggctaatataatttaggcagaattgttttagcacgtgagatgtaagattgcctagctgagacatacattgctacaggctcccatcaatgaactgtatgatacaatgccaacttttactccttggttcttggcttcacgtaaaatttcgaaggcatcttctagcttcccagcatgccctgcagcagctattaatgaactgagaaacatctgcaagaaagaccacaaaagaaaaactaagcaatctccgcacaaaaaaaacagagaactgattgcagagatggaaagaatgacagggacatcactatcaaatcatcaacatcaaaacacctcacttcgttgtaaaacattaaattcttaaagattaaattcttgacaaatcaaccttgtctcagtaacatcctgctacaactatatctgtgcaaaatgcagcagaaaacttcaccaagtcttttaatgttgataacattacctgatcagggatcacgcctttgctagtcatttcttcatacacattgtgcgcaaactcccagttacctgtttggcaacaagaattaatagcaatggtgtaaacctctggcgtgcccttaatgttgtattgctgaatcatcttatatacttcacgtgcccgatcaacctgtaataaatgttgagttaactatgtaggaatttcaatggaaaaagaaaacgaataataatacccaacagcatttgtaaggaatggaaaacttacctggccagcatttccgcatgccttcatcaatgcaccaattgtgacatgatcaggatctataggatgtatctctgcagacatttctgccaatacatcaaaagcacgatcaacagctcctgattgaccacaggctgtaataagtgcattgaatacaactcgatctggcttcacgttctactgcatgttatcagacgaacacttaattcgaaatcattgcacagaagaaacaagaaaattagaaaacacatttatgctagaacactgataaaaagtagcatatgcattatgcaactataactatttaaatttataggtctcccacaataatcataccttggacctcagtataccataagcgccaaatgccttcgcaacttgaccagctctagcacaaccatcaataagtgccccgtaagtgtgaagatttggttccactccagcattaaccattttatggaacaccttaggaggcaacatcatatagtagtcaacatgggggctcatcatcattcatcataaattcaatggttactccaacaagacataacaaaggataacaatttatcatgtggctcctctaacattagacaagttagcaaaaatgtctcttaaaaagcattaatcaggagccagacactgagagaattaatggaatataacagtagctgagaagcaattaaagccaactacaccaacagtgaataacaacaagtattccataattttagagaagttttccagcttcaagtgtcccaactaggaacaatttttatttatatataaaataatatgccagaggggatcaacaccagcatcataagaattggtatagtaggcctaaaaaaggcatcaattattacttaaaaaaatgcttcaaaaataagtgaaaaattccaagggaatatcaattttgaaacaaaaggaaaatacttacttcgaacattgaatcaactttgccactcttagcacacgtagatatcagagtagtgtaaagtttacaatctgctttcaatccggactcatggacaagtcgcagaacctgaaaggctcctaaagaacagaacacaaacatcattacgttattctattaccaaaaaaacaattatggggcagggaattcatcatttacaaacagaagtctgatgaactaccctccgaatcttgtgaagtcgcacagacagacataagcatgttatatgcactcaatgttggggtagggatcagtttgaggaaacgaaaagcttctttaacagcctttttgaatttgcaggttttaaagaaccttgcatggtagacctgaaagcaggggatccaataaatttgggaattctacataaaggaaagataattaacagctataatgcctcaccttgttcatgtccaacaaaccccttttttcctatatcttcaagcatttctaaggcattggataaccctaagaaacccacaacaattaaaattttttgtttacttacttaaaaaaaaaaaaaaacaaaaacaaactacatttctacccaatgcaaccatcgtaaacgtcctagaagaaactaaaacactagtgcatgtactgtagcaac

SEQ ID NO: 379482 - DNA, 4338 bp, Cannabis indica
aaataaaaccctaaaattgtgaaaccatgggagagagaaagggggttggacgatcttctctgaccacgacccaagaattttctggcgagaccttcttctccgaccatgggacgaaccatcagcgtcggggagagagaaattgatgggcaagagctgatggctgatgggaactctcagttcaatattatgatatttgacaataatactctagagatttattatcctcttactcccaacactttctcatttttatgcaagatgagaaaaatttaataatttgcattttaaatttgatttcattccattcctattcataatctcatttttatttctattcctatgttttaatttcttctaactaatcgctagtgttttgttaggtttttgttctattattattgttcgttgaacaagtttaaggaaaactttaaacaagaaaaagtctttaggagaagactaatctaagtctcatttcaagacatagcaaatacatatcaagaatcgaagggattctatttcttggtatgtttcaaatgttagattgttgaagtaaattataagaagattgcgtttttgtaatctttgatactttacaaattataagaaataattacataaaatattatatttttttataaaattttaatattttacctttaaagattttattttatttttttagatttttacggtgttttataaaaacaataagaaaataacaaaaaaattatattaaagtaataagaaaataacatctaaataaataacaaaaaataacatacatataataaaaaatcaacaataaattaataaaaatacaacatcaaaagactatattttttataaataaaattataaaatatttaaatttcctaaacattttttttttgttatttttgcaaaataattcctattaactatgtaaaaattggcttatctgaattttatccaattttttatttatttctttgtaaaaacattcacccgaaaagatgacctcaaataataataataataaataaaaatatatatttttggttttaatttcagttcgagccttcgtcttagtctggtcttcctctttttactatttcatattcttctccgattcccattcagtaagtttctctttctgattcatttctttcaataaagcataataatctctgtaatttaatgcactgttagtggactttcgaactcgaactccccctaagtagtgtgaactgtactttttttaagctctttaattttctgggtaaaagttcaaacttttttccaagattctcttcttcaatgtcaaactgtaggatgttttttcttcttattttgatgttggatcttttatcagtaccacagctactgagaatttggaatttgttttctatctcatggtcaaatctctctatgcatattataaaatttataatgtaatagttttgtttgtttgctaattatggtgtttgttagatacaaattgtgacagtatgctatgttattgatgaaattaacgttttgggtgtgaacatcctttttggaattattcattactgtttctgtttggattctaagctttgatgtaagtgaatagaaatatagaaacttgacattattttatgtcttagaaaggcatgtcagttgaaaactttacatagaaatattttcacaggaactacagttgaaaattagattgtagatctttgaaattttataagtaacataattggggaaacactcttattattttcatagtggatttggagaaagaaagtggagctgtagatagctctgttgaagtgggtgtgggttcttcaggaggagggccaattatgcaaccatatgttggtatggaatttgattcagaagatgatgcaaggagattctatattgagtatgctagacgagtaggatttgttgtgcgtgttatgcagcgtcgtcgttcgggtattgatggcagaactcttgctcgtcgtcttggatgtaataaacaaggtttctctcctaatcaaagggctgcaattgggccagagaaaaagccgcgacccagtgcgcgtgagggttgtaatgcaacaatattggtgaagatggaaaaatcgggtaaatgggtggtaacaagatttgtaaaggaccataatcatcctctggtcatcactgctaatggcttcagcacagaggtgagtctttgaaagttttaagtaccttttgtgcctgttcatttgatattaccacatgtatatattacaataagttatatgagtaagcaaccataaaagttgtgttgatgatcttcggtccttcattgaacccttagtttgatacagcctactaacttgattccttgataatttcgattgcaccccttcagcattctacaatcttaactgtatgtactgcatttttagtactttttgttgttcttgctttatcactttttctcgtgtgtacataccattctttgtttatttacaaactgagtaacaaggctggttcaaataaaagataaccgaaggttctgtggttgtgctttcatgttcaagagattaagatccttctaatattgccaaatacttttagtagtcattttttcctttgctgaagcatgaaaaggcccctggaccttgtagctagttatctttatttcccgttcatcgattagcaaggagaacttttgtgaagtcactatcattaccttatttccatagattcaaatactctctcccatgttactttgatctgtttgctgggtacaaagacaatacaactatctactttgtagaaaccctactaaacctaattcaaaatagcttatttgatagttttctattatttgtgcagatgcttttgttcttttcttttccattcacctaagtttgtgtctctacattatgatattgatttacagggggataaagataagaaaattgaggagcttacaatggagttgaaacatcaggaacatctatgcgtgacgtatcgagaaaaccttctgagtttcatgaaaaatgttgaagagcaaactgaagaactctctgggaagatccaagttatagttgaaaatgtgagaagagtagaatccaaattgcaaaaacattcccgtcgtagataatcttgaaattaaattcaacctctctagtgatgtaccatattttagctagattacaatattaatcaaattcagctccactaaacattttagttatgtacagttcaattgggaaaatgagaattacttagatcaccttggtctagttttgcactcttttggggggttaatcatataaatggtttgttaagatatgttgccaaaagagatgaggtgatattgtgtcatgaccagtgaagaagagcattacttaaattataataaaaccatagtctaaaggaaaaggtgtttgaaagtaaagtgtaattattagggtagtaattaaatagtctaataattacattgtttgattataaacggctgttatagtcacaaagtaatcatagatttacaatgtgtgatcatcatactcagtcgcatagagtaaattaagtgagattattttgtaaattttagtattttacgttgtcattttggcaatttttacatccaggttcgggtgatggggatttaggttcagggatatgtggtgagggttccaagtccacttggggtttgagtctcaagcccgagttgtgtcaacatccaagagaacacaaatactataattatttattaataaaattaaataatattcataaaaaaatatatttcgagtttgattctcattttaaaaattaaaaatgaaataaatttactaaatatacttttcaaaaatgaaatacagtatttagcgaaaaaatatatttctacaataacaattattaaagcgttactctatgataacttgttgtagcaagttggttactagaaacaattgcataaataaattatgccgaaagtaaaaatcacaagtaagttatacatgatatcaatattattctgaatattactagtccacagagctacgaccaggaaatgaaatcaattaataaagtattaaatattacaaacatataaattggcttatacaaagtttgaatccctttaaacctttgtcacaacctgttataatatactttgctaatctaatttttgaaacacatcaagtattaaaattctttcggtcctttaagtgctcacttcctcccaaaataaggatttaacaaattttctctcgaagaccaccacttattcacagggacgaacctacttgcattcatgcccccactaacaaaattattgccttttaaaaaattaaatgtaattttttaatttaataattatagattaaa

SEQ ID NO: 379483 - DNA, 3268 bp, Cannabis indica
ttttcagagaggagagggaggcaggcaggctgtttggggaattgttttgccatcaagtctttgcaggagatctgtgaaagagttaaaatttaggttggcccctatcacggtgtttaaaggtttttcttttcagttttattgataatttaagagatcttatgatatttaggatagttcaatttccattttgatgctgggtttgtgctagattatcttatttgtgtgggacttgttccttccctgctgtgagaaatcttcatatacaatatcttatctaatacaattttggaaattgttactaacaaaaattttcggaaattgctaatacgttaacaacatatttcttttgtttaaagttataaacagtaatggcattttgtaatattgtatttagaaaaaatatgacattgaattataacaagcgacctacatttttcctaaggttgtattcatgttattttgcaatggttttaaaaattagaaacgtgtgcacacagagcaaaataaaataaataaacaactcatgactaccagtaattttaagaagtttcaccgttcatcttttaatctttgccaacttaaatatttcaccaacatatcactaatcatctcatttgaaacagccttcattcagctaaaaatcatctcatttgaaccagccttcattcagataaatcctagatatttctatatgctacactaatggtggtcaaagagtgaaatgcaaaagtggtgtgtcatctagtacacttaaagaactcaagcaatctgttagtgatataatcctagaaagataaatcattttgtaacacttccaaattgtgctttcaagcaccaaagaactgaagatgaaaaagaaaaagatgaccaacaaaataattgtgtgcaagggtatgaaaagtacctctgctttcatatgaagttttccagtattatcatgtccggacgatgacccaactgcaccatcacctttaggagatctttctatcacggcaggaaactgatgaccaaccttctcttccttcgatccagtacgaattgaaaaatcttgtgtagatatgtcagatgataagacttctgtagaatgctttccagcattaccatgagcaagacgtccatcagatgcaggatctctaaccacaatttccttcaaattcttgttctttgtactgtgactttcacctttggaaaactttggagctctgtcttcataaaattgcaattgttttgcatcacttgttgatgtaaacactagtgataaaaatgaaaaacagaaaaattggaatcaacaggcacacatgagctagaacagtatacaagatgtgatacacggttaatattctcatcaatgagtgcatagtagaataaaaaatcttattagtagcataaaatgaagataaatttcagcattccataaaaaaactacctgttctagaagaatgtgagcctcttctgttagaagcatcaacctctttctcagcagttcttgctttcctcttcccacttttatctttagatgttcccgaatcatctttcttccgcttaccagaatttaacaccacagaccgaattaagccactctccttcatcccattctgagcacgcctaacatcaagaccctcactctcccacttttttgtctctttcaaagacaattttcggtcacgggcagcttcctcatccctccctctcaaaccaaccaaagcagccattggagcagcaaatacagtctccttcgataaagaaaacagaacacctgcccctttatctacaggattctcattgtcatcatccaatttagcatcatcttccttttcatcccagcaagggaactccttatatcgaaaattgaacttcttgggtacatagccagtgcacttccacagctctggagtaaacacagaaggtaacccaccaaacagagcaggatcacccccaggaattccttgaacatgtactctctcctccattggaatatcagtccaaagcctaaaaggacggcgaggaggtccattaggtgcataagaaccctctattctaacagttttagtaggaagctcaaccaacaattgtgcaacctcagtttcttcgctctcattcctactattcctgatcttacatttatcacaaacaaatatatcatctcccttcacatatttagagcaccgtgtatgcacccaaacaccacactcatcacaattaaccatctcctctccatcatcaaaattaacaccgcatacacaatccacagtccaagaaccatcaacccaatcatcaggagggtcagaactctggagacgatgcgaccggcctttcatctctttcaacaccccctaattacccaaaaacctacaaacagaactaccgctataaccctaaaagttccataaattcaaaattaacaataaattgcctcaattcgcaaaccaaatatagttccaaacacccgttcaaacaaaaattaaggtataaaacaagtacctgggaataaaaactctagtatttagattaacgaagataaagaaaagaaaaaagaagtcattaacgataaattgtatggaaaaacgaacctctgggatattgtacaaccagaagaagaaacctttcaaataatggttaaagagagaaaggtcgctctatggctatggctgaggatattcgcagtctgtctccaaagtgggtcttggctttcttggcaaagcttttgggtgttctctcgggcgaaaatggcgtcttcacttttttttttttttctctgtctcgcagaaactggcggaactgaaaaagatagataatctctgattctgggtttagatttggcgtccgttcccacttgactatatcttaccaatatttacacaaatgggcctcattccagtccaatttatcatggcccattctataatgggctttgtgtacattcccgcccaccttacgtcagaatgggtcttttataattctgacccaataaacctcgagaaaattacattgtatccactttattttatttgtaagtaggtaaattttaataaaataaaatataaaggtacctttgattaatggataaaaaacaagggaaattttcatgggccaccttattttggcaattatttttaaaaatgacgttatttttgttatgttaagtttctgtatatgtagttgacgtttttatggtaattttctatttttaacgatttgtatattgggcttgtaatcccggttttttcggcccaattttttaaaacacacactctttgtacgtgtcacg

SEQ ID NO: 379484 - DNA, 1587 bp, Cannabis indica
aaaaaaaaaaagggaaaatttatcccaatgaactagcagtaagattcaaaacattttgtatttttttgcatataaaataatgtgttgtttttgtctttaataattaaacatatttatttacaacaatagataatataagggagggtacccataaagacaataactctagaaaaacaagataaaataccaatagcctagaataatatttgtaaaagaagataacatagatgcgggttcattgattgccatggagatcaaggtacatcactttccacctcagtgattgacaactgtaattgagaagtccaaagtggattgtgaaagagagccatagcttccatttcatgagccttaaaacaccatgcaagaggcttagagagagcaacaattatttgatcatactcactctgaacaatagcacctactcgtgtaactggaccagtatcattggcggctacatcaaaatttcatttcagttcagaagaagtaggaggcgtccatggttcctggcaagggttagggacatcaacaggggagacaaaaatcaggcccgtgagggcacaaatagctctatattgcagcaaaaaaattccagtgtaggaagcaagcgcaacaataggcctagctcaacgaccatgtattaccgcattcctctcagtctaaatcgaccacatgatacaaagaatcgattccgttttatctttaaaaaagagagatgaaaaatgaaccaaatagtctccttgaactataaaattagctttttggtagtcaaaagaatagctcgaatgcctccaaataactctcacatatttacaacaaaacaaagcgtgtccgatggattttcaaatgtgtgaacaaaggaaacaagtagcttctacgacgatctttcgctgaactaacttagtggccacatgcaaggcattgtgcataaccttacaagcaaagattttgattttgggtggcaaatgcaaagagctttccaccaagattcatgatttcttgaggaagatgagtgatctaatttatccaaagaggcagccaaatggtagcctattttgacattgaaaatacttgagtcataataattctagattagttgattagattgtctaaagaaagtcaatgaaatagagaaaattgacattaatcgttaagaaatattgtagtagaagtatattccattccctttgtttcattatgtatgtcgaaactatagttgttggcgggccacaaaacaagatagactggaaagaagtatgatcaggaatccaaggctcaaaaagacacaaaactcggttaccggtgccaattttccatctctaacctttatcaacaaatctcgcccacaaaagatgcttctccaggtcattgaaggattatgtccgattttagcatccaagagagatgattccaagaggtacctagacttaagtaagtgactgaggagagaattaggcatataaaaaaaattctctaaggttgtttagccaagagggattgattgtaatgaatgaatgaacaaaaccccattcctccaacagttttgcaacgccctaatgctaaggcacgctacagtgctttttcaat

SEQ ID NO: 379485 - DNA, 2713 bp, Cannabis indica
tccgtctgtaagttttacagttaaattacatgctttcattttcgcctttgaatgtttcgggtttatgaaaaattgtccagtgcttgatgatgtgcctgtgctgtatagtccatttggttgttaataagatgcattagttcttttaagttattaagagttagtcccacattgataatgtatgaaaataaattgtgatatgtaagatgaatgggctacttctcttattgtcaattggttttgtatcacagccacttgtgatctgttgtgagcctaaattgccacctgttcatatttctccttgtgaggagagtgtattaagagttagtctaagatgaatgggttactcatcccattctttagagttaaaaagtacttttgtggttagagaaaaatcaccatattgatttgcaacctcttatcttattggtgctcatctcaatctatttttggcattcttggaaatttttattgtagctaataatatataaaaatgtgttgcaggagcacgatacagttgagaatgagaggctctgtgtgtttttggttgaaaaagcattgagtaaattaccaccagggagagaagacatacttggcatacttgatcttaggggcttcggtacagagaatgcagaaataagattcttaacatttttggtacttcatagacatacatggctgcttgccctctttcgagttttatgttggaagaaagaattagtatatttggttttccaccctaacattgtttatgtatcatctgtatttactataaattatatagatataattccacaatgtgttatcgtagtgatattgtagttgagatgatactttcagttttttctttcgtaagcatgaaagtatgctcacattcaaactaattttgattgctgttttgatctctacacttgcagtttgatgtattctactattattatcctaaacgactgggtcaagttctcttcgtggatgctccctttgtgttccaaccaatctggcagcttacaaagcccttactcaaatcatactcatctctggtatgtagtgcatgttatcgctcattaaacatagtttagatatatcctgagttgcatttgtactcttttccaagatcgattggtaaaattgttaggagggtgtatctatcttatagctaggcctggctttctaagctttcaaaagaaaaaacttgcttacttgcaaattgcaaattacaaattacttgaccgtgtcctctcgatttcaccattagcaagaaggatatcatttgtggattatttacgagtctaatgcccttgatttagattctaatctttgatactatttttttgctgtagtgtgcttagacgctacattaaatcatattcttggtgtgaaacctggtttatttgttctatttcaaatttaattctgtactttaatttgaaatgaagtaacttgattcatttgtaggcgagattttgttctgtggagactgtgcgaaaggagtatttcaaagaagacacattgccggctaacttcagagctgagtaacattactatatcacatggtataatagcattgaatatttgaaatatttgtttcagatggaccaaaatttgcataatctcagtggagtagtcaaactagagagtaatactcagtagtcattgaacaaactattgtagatatataggagaatctacatatcctggagttggagaaaaattgacccacatttatatttcagaatgaaaataaaagtattcataagtactcatattttcgacaggaccatcagaaaacaacaccaagtgcatttatttttgatgacttttaattgtgatgacaacaccaagatgagcatcataataggttaaaaattgaaaagagaggtagcacagggcaatcggtatttatgtacctgtacattgtaatggtgttggagactggaatgatatatattatttgctagattataacttttatactttctgagttttaaattagttaaaaagatgatgtcatttctctaaaaataaaagaagaaaaaaaagaaattgatgaatccaacttagttaatggacgaatttaaactatttaaaagaaaattatcaaaacagctagtgtaagtttagctccacaattaaaattttgctgtggataaagtcatctctaatctatatctttttttttgaatgataattcaacttttattagataatcatatcagtcaccaaaacaggtaacaaaacagttggaacggagtccaaactgaaattacaatcagggaaggatacagaggctcgagctaactcatgagccaccgtatttgctgatcgacgaataaaataaatagaaacagttcttaaatcattaagtaaagtcttacactcgttaaccacttgaccaaacgtggaaatcataacaattgaacttcttaaggcttggacaattgataaacagtccgtctcgagaaccacttgctgcaatccactagattttatccagcttaacgcctcccgagttcctacagcctcagccaattctggtgtagcttggacattaaataattttgtatggccatggatgagaagcccccgagcatctcttgctacccaaccaacaccaaactgtcgagaagcttcaaagattgctgcgtcaacgttaacctttacattattttcaattggaggcacccaatgctcggctccgtcgccttggttcaaacca

SEQ ID NO: 379486 - DNA, 2374 bp, Cannabis indica
tatatatgatttaaagtcggacgtatattgaaagtcttatgttaaaagcatcacttaatttgttttttctattttaacttgctgtacagggagagtgacacccgagagtgtaatatatagctttggtactcttttgcttgatcttcttagcggaaaacatattcccccaagccatgtaagttgtaaatgtaatatattactaaaatattaacattatcagtattagttttgttgaattaatatgtatcctagatgtggtttttcttgattgaattatatgcttacctaacaatctaaacaattttccaggctcttgaccttatacgggacaaaaatatccagatgttaacagattcttgcttagaaggacagttttctgaggatgatggtacagagttggtacgcttggcatcacggtgcttgcagtatgaacctagagagcgtccaaatccgaagtcattagttacagcattgactcctcttcagaaggaaacagaggtcacttacccctcttcttgaaaatttctttgctaacttaagttggtgaatattgtttgacttcgttcaagattatcttattgaagtttgcagactctaatcaagatagccactttcttctactaaaatctacttctaagttgacttttattctcatgattgctggtggttaatgtttctctggttcttgaccttttggtttgtgaataaggtttcttgttttatgagtttatcactagtagcattttcggatgttctcggtgtttatatattcatctaacaactgttcatataattaccttcaaattcaagtttaggaacttccaaacttttttcaattaagttgcttttaatgtaatgcctggataaatgattcagcctcatgaatgcacattgactcgccagttcctatggcaggctgcatttgaagtgtaaaacctgccattgtttcagtttgcattgcatgcttttattggaattcaaactcatattttggtagctgtggtttatatcaaattcctttctgttgagctttgcaggttctctcctatctcttgatgggcattccacacagtggttcctgcactcctctgtcaccgcttggtgaggcttgctcgagaggagacttgactgctatacatgagatcttagaaaaaattggctataaggatgatgaaggagtcacaaatgaggtcctttagttgtctcttacatgccatagatatttaatgtttctgctgcctcttatgctgattgcattgttccttagttcattccttgtttctgtgcaattttttctgttacgctcgagtactgagcctgtttttttctccttgatattctgatgcagctgtcattccagatgtggactgaccaaatgcaggaaactttaaattcaaagaaaaagggtgatgtcgcatttaagcaaaaggattttggaatggctatcgagtgttattcacaggttaatatcgtattatattcccttttgcctgcttggaatgctttagctgtttataatctgctgacaggctcttatttctcttgcagttcattgatgttggaaccatggtctccccgactctttttgcgcggcgtagtttatcgtatctcatgagcgacatgcatcaagaagctcttaacgatgcaatgcaagctcaggtcatttctccagtatggcatgttgcttcctatcttcaggccgcggctctttctgcacttggaatggagaatgaagcacatgtagcactcaaggagggaacaagtcttgaagcgaagagaacagctactgctggacagaagtgacattagtgagattgaagcaatttcaacatccagagtttgtttcctttgcttccatttcaaatgacatacaaaagaaattctttcccttcagtgaatgctaggagagcataactgaatggaagagttccccaaaaaaagaaaaaacaggtattaggaaagagcagtgtgaattttttgccattttcctagtgggcttattctcttatataaaattattaatattattttattggcttattcttttgtctgattcgatgtcttgtgtatgtgaggaggatcccataagtgcaatctatttttatttttgaaatcagaaagaaaaaaaaatggtgtaaaacatgagttgaagttgaatagtgttccacaagcttgtacgtgatttgtgtacagatacccaccacccttgtttttgtttgatcttgttgattagtttatttttggatttttcctaagaatagatcaacaattggctattgctataaattttatagttactaataattatatgtactgtgtcattgttgcgatatttagcacacgcaagtgtacgtatcgtttcaagtagtagact

SEQ ID NO: 379487 - DNA, 1158 bp, Cannabis indica
caggctaatccagattacaaaggtgtgtgccatgtagctcttgctcaagaaggtcattgcagacctggagaggtacagtttctttgtcttaagatttcttagcctcctaagaaaacagtataatttacattgcacttgcagatattaatttaaaccccttaaattggtttccaggtcctgctaggtacagactctcatacctgcactgctggagcttttggacaatttgctactggaatcgggaacactgatgcaggttttgtgttgggcactggcaagagtctgcttaaggttacttttacttgattgaatttattctgctcttctaatgcaaatacaataatctatttagtctgcataaatagaataatagcccaatggggctttctctcatctgtagccttctaatgtctctcagtgctttgatctctcttcaccttaagacaattacagttttctgatgtatttggtagtatttttctactgttcataagtgatatagcttgtagcttcagataagtttcctgtgagcttggtgctattcttattcatgactgttgattgatatttggaactttagattagttagttaccagtgaagtttctaagcttgatgcaggaaattaaaaaaaaaaatcctcgtaaggatctaaaacaatagcacttctgaaaagtttcctgtgaacttattctactcttttgcatgagtattaatatttggaactctagactaatcaccagtgaagttctttttttttccctttttttcttaactcattcactctccaacttgagattctaccacttttgtgggatctaatttcaataagaagtgcttgagtatctaattcttatgtgcctcaccgacagcaaataagagctgcgcgctatctaatctcataaaattgctagtcttcttgaccttagactgaaattcaaacgtccttgtgtgctgagggtatggaaactgaaaatagaagagggctaccacaaagagtatttcgcaaaatagctttttttattttaaaggcctatagtcacacttgacatccttacagaaattctcaacaccctatttggaaggctattttccaaaaagaataccaatttgcaaagtgacattataaaagagtttatttttaccaattacttcaaaga

SEQ ID NO: 379488 - DNA, 3332 bp, Cannabis indica
agccttgttttctatacttgtctttgtaccctgaagactcaaagatacgagtaaatgaattatgtcttatgctcgtcgcggaaggtttcatatcatcaaccagaggaagtacaacatattctatggaggatgtggcatatgattggttaagtgagttagttcatagaagcatgattcaagtagaaaattggagtttaagaggaagaatgaaaacatttcgcatacatgatctaatgcgagacttgtgcctgtctagagctgaaaaggagagctttttacaatttagtgacatgaggaataaatgggaggagacaatacaacctatagctactgatgtacgaagagttgccatctattccaatgatagtcgagtttatgatcatcttcgttctgcggacaacacaaattgctctctcaggtgtctaattctaaatggtaaatatacttataacaaaaaagtattcaaacaagtgtttacccgctttctcatgctaagagttttaaagctaagtttttataacgagggaaaagttttcaagttgcctaaagaaattggaaagcttattcacttgaggctgtttagtattactgggaatgtttatttgaaaaagataccatcttccattggcaatttgagatgcttgcagactttaaagttaccttgcaatgatgttgaaatatcagtgccggatgtcttatggaagttggaacaacttagacatttaaacttctcaatttccttttgtgctgaacggttgagcacattgacgttacctaacattagaaatttacaaacactggtaggtatttcaaccaagtgctttagttgtaatgattttcgacagttaaggaatctcaggaaattaacaatttatgctgatacaaatttggggaaaatttacaacgaccccccaagtgtcacatttgactgtcttaggcatttacgagtacttccttataagggtggcagatgtgatattgttcctataatattatgctaccctcaaatttataagcttaaactatatttgcctatagtcaaattaccaaattatagtcaattctctccaaaccttgtcaagttagagtttctacttagttttcttaaggatgatccaatgcctattctagaaaagctatcgagtttaagagttcttttgttatgtaatgagagttttgttgggaatgagatggtgtgctcaaaagggggtttccctctattggaatctcttcaaattgaaggtctttctgacttggaagactggaaggtggaggaaggggccttgtctagtctttgctttttggggattacaggttgtcctaaattgaggagagttccggatggattaagatacattactacgcttaaggaaatgaagattataagaatgcctagagaattccaagaaagggcggaggaaggaggagaagatttcgacaaagtccaccacgtccagtcccttgtatttctccactgcattctttgaggtgagtactgagtaggtatatctatccttacaagttcatttgaattgattcaccaattccaatttgatagttattttgtgtttatgttattagctttatagttggaatagcttagtccaaagaggataggcatgagttagcagctgggagcggatcacaagtaagtaattaataaatcatttctctcctgaatgcattgcttttatatctcattttactatccaattcatggtgaattatttagcttcattagtcatgtacataggctgagttgtcttagtgttttaattctgtacgtccaaatgtaatcctaggtggcctaatagagagggagcaacctcatttagattagcttgaaattaaaaaagagactagctcttattataactttgtcatgatttttcagaataaagatcacttgagaaattcattacgggtagaatattactattttaagataattctatcattaagctcatgttggttatagtaaaattaccagaaaacagctacacttctctccaaatcttggggagttaaagttgtctaaaactattctttatgatgatccaatgccaaccttagaaaagctatcaagtttaagagtgcttttcattgctattaattgctttaagggaaatgagatggtgtgctcgaaaagagattttccttgactggaatctattcagagttttgattgatggttctcctggcttagaacaatagaagtgaaggaaaaggccttggccattagcttttgctggagattgtaggaaaattctagaaggattatgtttatgtataggaaattcaaagaaagtcgaacgtgtcccatcacatattttgttcactagttttggactaatccaatccattccactttgacactaatttctccacccatgttctctatgttgttactataagtaaacgcagatgagctcgagtcagacgacgatgaactagcaggcagcatgggaccccatacccacccgttgacgaacacatgaggtttcttaggagaaactgagaaacatatggacatgacacatggcacgagccagaaaggttatcatgagatagttttatgtgtgtgttctactgtttttagtagatttaattttgggttaaatgtttttatctgatatgagattgttttgtggagttaatattaacatcactagtgattaacattaatagtgctcgtattgtattatataataaataatgctatgtttggataaaatattgtattgtattaattattacaatcaaaaattttaatacaatataagtcttattatttagtacataacaaatggtccgtattagcttgtattatgatatttacaaaagatctggattcggacccgagacctgaaccagggactggacacgtgacctggacccggacctaaaaccagattcaaatccggacccgaacctagacgcgggacccaaacttggagcgaacccgagagctgggacccgagacccggacccagggacccaagactggacatgggactcgaacccgagaccgagacccggacacaactaattttatatggttaaagccaaattgggctcactggaaattgttcataaggtgaccactcttaaaaaattgcattatttcaaggtatcaaattgatacaagagaaaacaagaaagttgggacactccaacttgggattgtctaaaagctgcatttcctcaagacgaaaaccacagcaagattttaatcacgactcgaaataagaatgtagctcttcatgctgatcaaaatggtgttattcatgaacctcattgtctcaacgaggatgaaagttgggagctctttc

SEQ ID NO: 379489 - DNA, 4182 bp, Cannabis indica
atttgttttatttttttatttttccatctagaatgtgatacagctcagcactatgacatgtgtccacacgtagattcatgactaacttgtagtaccccaatattacatattatattggtagggtgccacggtagtactttctggtccatcaggtccaccagtcccttctgttccaaatcaaaattctgaactggtaagttaagtttttcagatatttgtgctcataaccataaccataaatccattccctagaagtcttgtatttcttacccgtattttgttgatccaaggttcttactccaaatgttcctgatataaccgttgttccacctgaggatggtaaactccgccatgttattgatacaatggctttatatgttttggatggaggctgtgcctttgaacaagctattatggagagaggtcgagggaacccacttttcaacttcttatttgagctcggctccaaggaacatacgtactatgtttggaggctttattcatttgctcaggtacaacttatttattagtagctggaccatactctgctggtgtcaggctgttcaaactttcttgttttgcgttcttattgtttacattttatagagttattttaactcttattgcgcagttgggaagtttgagaaattttgctaaaatggagtcttttcttttgtgtgtttttgtctttttggttgttgttgttgtatgaccaagtgaggctgaagaatgaagatttgtttgttgtgggcagggtgatactttgcaaaggtggcgaacagaacctttcatcatgataactggcagtggaaggtactgcaaacttgctgttttgatttcaaggccaattaattcggtttttactaaacgaaatataagtcctgcaatttatcaaaaagaaatataagttctgcgatttggtaccaagagtagaataataatgtggagatatgtatattcttagatggattccacctctactgccaatagcgaaaagccctgatcttgaaaaggagtctggtgcaacatatgctgcaggaagaagcagggtacttgatacattgcaaatgcagagtgattttcccttttcatgatgtttcatacttttaacaactctcttttcttaactttagcgtgtagagccagaaagaaccctgacggactcacagagagatgagtttgaggatatgttacgtgcattaacattagagaggagtcaaataaaagaagctatgggattttcattggataatgccgacgctgccggggaggtattctgatatatgaagaaaaaaataatatacagaaagaaacatgtctggttcaccactttttttgtaaaaggtatatatatctcatagttgttttcaattttagatagtggaagttctcacagaatctttgacacttaaagagactccaatcccaactaaagtggcaaggctcatgcttgtctctgatgtgcttcataacagtagtgctcctgtaaagaatgcatctgcataccgtaccaaatttgaggctacattgccagatataatggagagctttaacgatttgtatcgtagtgttactggaaggatcactgctgaggcccttaaggtttgtgcacataatgattatgtgctttgtgagattatttttgtcatttctttggttgtaggttaaaagatttcacctgaaatttcttcaggaaagagttatgaaggtattgcaagtatgggcagactggtttcttttctctgatgcatatgttaatggtttaagagctacttttcttcgatcgggaaactctggtgtggtccctttccactccatatgtggtgacacaccagagatagaaaaaaggactggttctgcagatctgggtgatgcaaataagaccaaccaagatgctgctcttgcaatgggaaaaggagcagctgtgcaagagttaatgagccttccctttgctgaattggaaagacgttgcagacataacggattgtctcttgttggtggtcgagaaatgatggttgcacgattgttgagtctggaagaggcagaaaagcagaggggttttgagctagatgatgacttgaaacaggttcaaagccactcaagttcaggtagatattctggtagcaaaaaagaaatgaatgtcgaagctgagcctgcagcattgtctggatggagtcattatgcagagaatgaaatggagtctcaagggaaagggttggtaactttatcccatacacttccgattccacagcctgaactaaaggcatacatgaagaaagagaagattgatcctattttgccagcttccaaatgggctcgagaggatgatgatagtgatgaggaacagaagagaagtaccacgggtcttggtttaagctactcatcttctggaagtgagaatattggtgatggtcctagtaaggctgatgatatggattctgcaatagattcatgcattactgcacaacctgagagtggaataagcgaggagcagaggttgccttctcttccattttgatagtctagtttactaatattcccctagcactttttcttgaaacgagggttttattctgatttttcttttcaagtgaatgttaccttattccttaggtgtggttttggtgtaatattataaacagcccatttagattagattacaattgatattcttacatgtatatgatcttctgcttggtgttgcattcatatagcggtgattgacttgccattgtttctacaggaaaaggttgagacgtctagaagctgccttgattgaatatcgcgagtctcttgaggaaaggggaataaaatctcatgaagaaattgagaggaaagtagcgattcatcgtaaacggctggaatcagagtatggtttgtctgtttcgaacgtagatgcttctgggaatagtaagtttttcaaaatgccaataacttttagtatttgttgcttttgctctttctgttttctgtttatatattactcacgttgctgttgcttttgtctgcccttttgtgtgatgttctcagaggataagggtctagctttgtgctttaaaaatccaaatcctgacatctcatttagcagtttttttttcttttattttttttatttttttattttacttttatttttttcttttatttttttattttttattttacttgtccatacattaggaaaaagggtgatgatgactgtgggtgctttagtgatttagtaccaaaactcttgttaagcccaaatttgcccctcgtagttgtcaggctgaagatcttgttgtttctctctaaaataatttttattgtctgcagaaaaagcatctttggatcggaaagacagacgggataacagccatgaaacatcaagaaaacgacaccgcagccacagcagaagtggtagccccattcggaggtcatcatccattagagagcgggaaagggagcatgatttagacagggaccgtgaaaaacatagggatagggacagagataaagggcatgattttgaaaatgaaagggggagagagcgggagaagagtggaagtagagaaagagatgatcatgagagggagaaaggcagagagagagagagagagaggaggaggcgaatgaaatgaatcccattcatggggttattctttatctacaccaaaaatactttagtcggggctaccaagagattgttttagtaaaagctggtttacaaaaattgaaggggtagtcatggagggaaagcataccaaattaaaaatgactttaagcagtagtcatggagggacttgcgagttttgtttctttttccttcctcctctataatatttagttgttcaatttagtgccatgacattattttggattcagcttggtgacgcattttactcaccggtaatcaaattgtgttaatttgtttatttatctaagaggccttaaccgtgtagtagaatttcaagttgtgcgaggaaaaactaattgaataatatgaaaagttttcttctttaagaaatggaaaccagtgtttgtagatttcaaaaaagttgtttattgtaatatcacttttggctttgcattttatgtagtttctttctcttttaatataattagtaaacaactagtttttccggatgtttaattttttaaattatattataaataaattataaattttatttaatgataact

SEQ ID NO: 379490 - DNA, 3826 bp, Cannabis indica
ccctggaaaaaactagcaaaccaactgtgatcaactacataatgagccttacttgaagtctttcaagttttgcatctaactaagctgttattgcacataagctaagtgttctgggctttcttctgattgtatataagcctacttttatttcattttggcagtaagttagcttttagctaaaggtagtaaataagcttttacctataacctagtgtttggttgtatataaaaagcttctgtttgtaacaatatattaatgatcttttgtctactaaaaatgtaagtacaacaaaactagggtcgataaccgcacgacctctactagtatacatagcttttagaaatagaaagaatacccgagtcccatggccgcgatgacactttcatattcaaattctattttgttaaaacttgtaaattatactaggccgattatcgaaatcatcccagagaaaacttatgacagtactttggtatgtatcttgaaacaacaattacgtcaaacaagtaaaatgttctaaacccacacgtgtatctattaaagagcatgaactttttaatgatgcctatccattgttctttctcattttaaaaacagtgaaatctttgaagcaagaaacacatgcaaggtaggttcccatgaggaactgaatcccaaacctcatggagcctcaggacctaacgccagttgcctaccgatgctgttgtgtctgatcacaagtaaacatggaagaccatatgctatctataaaactacagctatctcttctttttcccaccctttccagattttgaagttgtagcatttgatgtggatgcaggctctggcttctttgtcctcccaggatgtcttggcactaactctgcgattcgcagcatcagctgtttccctgcaaaatatgcttataaagagtcaaatatcaaacacaaaaatgcaagttttatgttttaaatttacactcaaatacagatcaaactgcaattcaaaataaattcttaacacaccacttccaagaagaacaatacagattttttactttgttttcctatggcatactgaaataacttcttaattggtttttctctaaagctagtaattccatatgtttatgtaccttagattgctggatgagttgtgatttcagacttcaaaataaatgattatcaatacctacatagtttaatttgccttcataaatgtaacacgcgcaacattattaattatttttcctggcatgaaactccagcaaattatgaagtaaatgggggaatcaaaccgcacagcagagcaacaggccagctactctcaattactatttcactaaaaaggtagcagtccagcgccataaggcagagatgcatttatattatgaagaatcattggttttggtagcatctaccatgttagtgaagtgagattctgtttgctgccattagagattcacataacagtaattacaatggcactgcaaacatgttctagacatctgagtgaataaatatttcattcttttaagacaaacaagttatgaagacagataagataatggcctcctcaaagtaaggatctcatttttatccattcacaaatacatttgaccaagatcatcctatagcatttatacatttacacacacacacacacacacacaaacacacattataaagcacctcaatttcaagtacctaaaagttattcttaaaagtaaatgatcttacttgaagaaatagctggattatagagagtcccatcctcttttttcagcagcacccttacccttcctctttgcatgaaatcccgtggataggctttatctatctataacattcaaaacacatatgaaatgaaaaataaatgtcaatcaaattcaaatgtaataaaaactatcttagaccaatgaaaagcattaaaacttcatactctttgacaagacactaagcaatagctcaaaatattattttttataagataaacttgagttaacaattatgtcagatacctcaattgcaaaagggagtttgaaatggctgcaacaatctccaatttcagcacaagtaggattctcacatgctttgctcacacaaatccgcctcccttcaggtatagttttctttgaatttatatagactggatatataactacccatttcttgatattgattatctctccatccattgtatctgaaagaaaacctccgaaaaatgggtttgatcaaattatactaaataaagtagaggataagctaaaaatgcatacattatcatctcagatctactagaattctagagacaaagctgaggataatcacttcactattctaactattctttcaaaataaatacgtaaataaaacaaacaaggttggttgatatacatttatgtaactcaattcaccaaaatgaaatatttctaaatttctcctttcattaaaaaaggaatgaatatgtcttttattgtagacaaggagagtcaatttcattgcgaaatccagatatcacatttcggttcagtcaataaagattatgggtttatatatacatataatacctacataataaatcctatcgaacaaaatttctagtggcttaccagaatatattttaaaaattctgttaactttaacaggaacatgtcaaatacaaacaatgacgctgaagaaatgcaaatgaaaaaaccatgattgttcacaacatctcgaaacaggttgttagttggtagctattcaacaaaatattgttcattttggttcaaaacttctctaaaaagattattaattggttactattcaatgaagcattgcctattttgcttctcctattaaaataccagataaaatttaaaacaagtacaaattatctctccaatcaacaacacaacattgttccaggtaactaatattattactatgagcagtgaaagaaattacacagaagtttctcaatgtcagcaaatacttcatcaacaccaagatatagaatgatcccaaacttaaaaacagtaatgaaataaaatatacgtaggaacaaataccataaaaatgggattcacatgaaaagaaacagaatttttcttttattgaaccaaaatcagaaaattacgaaagtttcttcgaccctggtccttacgtttcaaatggaaagagattgtgaaaaatatacgggaaccattcagattagaagaaaatctcgaatgaacattaacacgtattcatattataacgtttcaaaggtaataatatacacaattctaaatcttagaactaaacattataaactaattatgacaaacctaactattattaaaaaggagaggaaatgaaaagagaattggatgaaagttaaatcatagccctatagaattcgaatgtagaattctacagaaaacagatagaatcaattgagaaaactgaaagagccagacaaagtttccatcgtttctgtgtatttaatcctcatagcaacctcaaaattgtaagtagagtacctgttgtgagtaatgtaattgttaatccggccaatgagggaagcgaaattcctcctctccgatctccgatctccgatctccgatctccgatccctgaagagttagtgacagaaccgaagaaagccttagaggacgatagagagattgagtaaggaagaagttcggtgctatgacctggaagttggaaccatgaaatgaaacccactttcttttataattggacttctcatagtgggctaactcaaacaaccaccttttgtttggggaacttacaaaaatattggaattttggttaatttttacaaaaatactgtcacccggaaaagttttcaaaaatactg

SEQ ID NO: 379491 - DNA, 3539 bp, Cannabis indica
aaataatagcatgcaattcaattaggacatcatcccattagaatcacgaccgatattaaaattagaaaaatgagctaaataatcagtagtctaattttcaaattgtttgacaaaaaaaaactaaaataaaattaaaagaaaaatattgcaacatcacaattaaccttaagaacacatatattttgttacatccatcgctcagaagacacaacagtagaaactgttgcaacaggtttatttaaccttgtaacttgagcactcaattattgtgtaaggtacacacttccctactaacaaccccttcagtcgcaaagaatttattattcccaatctctagcaacgatttgatggcgagcaatcgaagaataaaaaagaactaaaaaaaaccatgtcacacagacaagactaaaacactcaaaatcatataacacagagacaagacaaaaacactcaaaactatattattgagacaagactaaaatactcaaaatcatatcacagagacaagaccaatcatatatagtaacaaaatacaaccttgaccaagccgcacctaagcccaaggaaggccgacaggcctggccagaaaaaaaaaccttcgataactatagatttagaacaaaaaatcctaattttcacccttgagagagagagaaagtttagatacacgattagttggttctctttattgaaaggtaatatttaagtgttcaatgattaaaattttttagtgtgcaccccttttctttccaatttttgattggcgaaacaaattagggttttagacccaattttctcttaattttaattagaaacatgtttgtttgatgatgatgtgttagatacatttgagtgatgttatatatttatgtctaatttttaagtgtttaaacatgataagatgaccgataacatgtctgaagctatttttggttgattcaggtgtgttttaaaaaattatgtttttagctctctggtgctcgctatttgatcggtactagctttgcttatggtggtcgatcgatcgaccaaccttgattgttgaggttgcaattttaaccttaaggaatgtttgttgtaataaatctaacacgcaagtacacgtaatatttttacaagtaatactcaggtaagtgagatcgttcctacgagaattgtagctaaatacaaaataattgaatttttgtttttatttggcaataaaagaatggattttgaaactaaataatgtaagtaaaaattaaataacaaaataataaacaagatttaatcaagaaataaaatataaggaatttaatttcaattgattccacttcatatgtcaataatgcaaaacaatgtttttcttctatctagtatgatagtggattataaaataatctatattctgattagaacatatagaatctaaattatatggcactatcttaaatttttgaggcataacacacatgtaatttgcattaagcaataatctaaaagctacataaaccacacaaatactcttgttttgtgtcgaaacctaatgtttatttaattagagaattctaaatactcactttaaagattttgtattaaaatcatagatcatgcataagatggccagtcagacacatgtaataagcacaagtatgaataaatcatacatcaatagaagaaagaaattaaaatagcattaatccatagaaagttttaaataatctccattaaaattcctaaattagagtttagctaacaatctccatcaacatattcataatcaaatccataaaaaatataacaaaaatataaatttaaaagacaatagaagaaattagatttggggttgccataattgctccaaagtttgatctccaatctcatttttttatatttttctaagttctaaaaagtctcttcttctcaaattcgcgattttctccgttaaaacaaagacctaatactatttttattgtaattcccataaaattctaaaaagttaaaagttcatgatttctacgataggtggcgccgaggcaacaatacccccgctgcgatgccaggtaccattggaaaacatcaatctcctttgtagtagggtgcctcagtgcaatattgggagctacattgctaattccaatagtgtacaatattttttatcttgaaatcctgctgcgtcaactgatggtagtttggctataactttcttaatattgctcagaattggatgattcaagatgtattgaaaagctaaaagaaactaaaacttttattcacaactattttcttgaaagtgaaagaatcatagtcaaatattggcttgaatctttagactgattttcagcgacaaacggaacgtgttagacattcaaaatttagaattattcacccattatatcttagaacacgtaattccatagtaaattcatcatattcatctcatttattaattttttttcttataatccattcatactatgaattatatcatttaaacttgaaaaagaaaaataagcgtaattatgttccaaaaacatgtattcacaagaagaaaatagagattaaaatacttaaaaaaataggctaaagctagtctaacaaactccaccaagctttcttctaactcgccctcaagtaagagaatatctacacacaaactaaataaaacaatacaacaaattaagtctccattattattcaaagcacacagtcattacctgcaaaacttacatttcacaaggggtaccaatatcagaaaagtaagatttttactatattgataaaaataattattagtgctcaaaaactacattttctctccatgagtccaatagaaaagtgatagacaatagtcttggcttcttccctgtaaaattttacgatttttagattgagattttaagagaacactaagaagtgcaagagtgaggaaaaaacttattaaaatttactgtaaaaagaagaacattttcaatttttgaattagggggctattttaaattaatttaatgtgaaacctatcttcatattcacgtcttaatagtatgaattcattgtgcttagcgggaaaaaatattttgagatgagtttgggccacatttcccaaagaggcaccactattaaaaaagtgagatttttactatttcgataaaaaaaaatgatttttagtgctccaaagctacctttcctttccacaagtcatttagaaaaatgatagacaatggtcttgccttctttcttgtgaaatttaacgatttttcgagatgtgtggtgcgagattttaaaaagaacactaacatgtgtaagagtaaggaaaaaacttatcaaaatttatcttgaaaagaagaacatttttaagttttgaattagggggtcattttaaacatatttaacgagtagcataactaaaattcatgtcttagtagtacaaatttattgtgcctattaggaaaaaatattctgagatgagaacaggccacattttacaaagcggtaccactagctattagagaaatgggattttcactatttccataaaaatgattattagtgcttgaaaa

SEQ ID NO: 379492 - DNA, 9058 bp, Cannabis indica
aattctgtcatgttaaagcaaactattcactaacctcacctttgttatgagccggtcatgttcataacactcaatcttagaaaggtacggattagaaccccgatcaattacaacctcatttaagacatcaaatatttttccaggcattgctttaccatttcggaaaatttcacaacggagacgcattctgagagttatatatacaccatctcgtgtgttatttccatggattacctgctttaaatcctgcctaaagtcatcaaactgcaaaagaagccatagaagaagtcagaagactgccacttctaaggacacaaattagtcactttaaagaaaatgttgagatttttttttccttttcctcttttcatttgtaagaatcttacagtatgagaagtcagaaatccaagggaaccaagattaaaagatacaaccggaggaacagctcctctaaatagatttgatgcatggagtataaccccatctcctcccaagcatgccacaaagtcgaccctctcatgcagatcactaaaattataagcatccaaaaaggtcactgggttacaattaaggtatacgaacaaacaaaaattcagtattattgcactttggacacaagttaatacctggtatcttggctataaaaggtctggacaaatccaaatcctgggattcttgcaaatatatcgtgcacatcaggttctacaagaacattcatattctcttggtaatacaggtacgatgcaaccttcacatagcataaagcaaaatttaagtctcagatagcataaaccagacaggttaaaaaactgtaaatatttctatcagacaaaatatctgcagaaatacaataacaacgtatgatcttaatgaacttaagtaattatgataagatatcttttctctgaatgcaactaaaacgatgaaaattatcaaaaaaaaaaactaaaacgatgatacttatctaaagaaaatgtcaactgaatttgtgcgtgattggttaaatataaaattaaaacaatacacaagtaggtgtatagttttgagaagattacacacaagtagattcgaatttagaggttttgctattagcatcgaaatattaccaaattgagttagattaacacaacgaggtatttatacaaattcaaacatgttagaagcaatttggaaattttagaaatgatttggacatgaacattgtcataattcaagtcatgtggcaataccaggcaacaaatcgatgcagttggcgagtgtgtcaccacctagcaagcgacacgccacctagcgctatacaggatgacaacatgccaccaccttgtttcatgcgttttggctccaaagttactttttgaatcaaaaacaagtggggatttgcctaagtcggtgctaacactatataaagggttttttagggttcaaatggattgattacacttttccactctctccaacttctctctacctttcaaagatccactattttctctaagaaatggcttgtttggaaaattcgtaggcttattatatcttacttcttatttcttctttgtagaaccctcaagctattttccttagtggggttgaaatagacaatttggacaaaactcctcaacttgttacattgtgttctctttttcctccattgttgttttaacccactctcccccaacaatcaaattctctatttgttttatgtatgtctaatcttcaatggaggaagaatcttcatcttttacaaccctcaagttcctaagctaatatcttgtttgtttggattgcttcaaagggatgaattttctgagattgcaaagcacgacaagttcaagtttctcattgctacgctcaaggtctcctacatcttggatccagattcgaaatcattgtcttcacttcaccatctaaagattacactcctcaagttttgtttgcaagggaaaagagggaggaggatgaacctatgtgggtgtcacaatttcaatgcactttcggataggctctatgatccctacaccaacaccaaattggttgaagagatttggattgcattgacagggaaaaaagatagtaagaaatttcagtgtcctaagatacttgaaggctaatcagacgcaagatagatattgagaatttgggagtgggagatgctctattttccactagttaggtttctactcttaatggtggggctgtctctttgggttctcagaagcaaacatatcacactcaaccattttatagcactagcaatactaggaaacgattttagggatctcatgttggatatctcaatttccacaaataaagtatcgacaatcaccaacattttgatggtgaagtcaccttagatagaacctatagtgtgtgtgagagtgtgtgtgtatatattatattggtaagtctagacatatacatctaaggcatgattatgtgagaactgattcaagatgaattgttcaaattatttgatatcattcccataaaggaaactgaatatttcctttaattttgtatatgcctaatttctaagagtaattagtgagtttccttagtagttatatgatttgtactcaatctatgtaaaggtttttttctttttaagggtaatttttcctttaatttccattcctcagtatgaagcattcaatttacaaactctgttatctattactctagcaaacagaaacttaacaagaaaagcttgttatctgaatcctatgtcactcaatctgaatctcaaactccctctacttctttctggactgcacatgtatcaaaagaaaaaccaaatgaacacccccacccccaccccccaaaaaacttataataataataataataacaataataatagtgagaaaagaatcccatcatttctaaacttcataatcaattgtactctccacagactcttctcttctatgatcaggatgtgcgagttggtttctggtccgtccacatcaatggtaacttcatttgtcatggctgataaggacttatggtgcctcttgtcgtgtctcagcttgagtatccttgataagaaatgcccaatgtctctcatggaaggtctttttttcggaataggattgatacatttgtatccaagtgctgccatttcattaagcccttctgcatcgaacttcccgtcaagacgagaatccacaatctcctcccatcctactttcccctctgtgttcattgcagaaagctcgacatattccatgagtccctgttgaggagttctgccagctataaattcgaaaagcagaactccaaagctgtacacctcacttttcttggtaaaagtccttgtagatatgtactctggatcaagatagccaaaagtaccccttgcatttaataaaaattatcacataccataaacttgccttttcccccataaatcatttcgctcaaatcagatctagttagattttagtggatcccttaatcaaacctctatgaaagattttgtaaattcaatatttggatagataggacactcctaagtaagagactcactaatgacagtaacccaactcaaaactagtataaaaccaatctaatattcaattggtaagtgaatagtcaaggaactagttcaaagtgaatcccatatgtgatggataatgctagttgtgactgataaagggtgaagctacaaacttttaagtgaagtgatctcaaaagaaataaagatgctggaagagtttcactcatataaacttagaggtggtgtcgtttctcatgggagttctgaaatttctctcgggatatctttggaatgtgtgagaacaaggtcataatagtattaaataagaaaagtggaaacattgggtggatcaagtggaactgagttatgcgttaccggtttcatgttcatcataagaaataattggttcaacgatatatcatatgcaacctaaaatctcaatggaattctataaaacttttactaaggtaaaattaaaattaaaatcaaaagatattttactttattcacctacattgtttatatgatggagagtgagattgtatttaaccaagtagggaaatgttatgagtgaaaaaacataaaataatagcaataccaaagtaggtgtaaggatttggaagattacacaagtaggtgttaattttgagatatcgtgattagcatcaaaatacgactaaattaagtttagatcaatatggtatttaaatacatctaaacaagttcagcaatttgagaattttttaaatgatttaggcataaaagtagtcataaatctagttgagtggtgatgcgtcgtctgcctttaggcaacgcatggcctcccacttgaaggcataggaggtgatgtgccaccatgacgtgttaccatctagcagacgacgcatcacttggcatcatgcaattgcaaggtgcaacgcatcaccatttataatggcgacgtgtcgcctcttccttgaattttggctctaacattgttttttggatgagaaacaagtgggattcacctagattggtgtaacactatttaaagggtttcggcaggttcaaagggactgatcacacttttttcactgtttccctataccctcactagctctcaaagatcaactattttctccaagaaattgcttgcttgaagaattcataagcttgttatatcataattctcacttcttctttgtagaatcctcaagctatttttcctaatggtttgaaataaagaatttgaacaaagtttctcaacttgttcaagcctctttgtgtgttgagtttaattgctacattgtgtttttttccctccattgttgtccttacccactctcccccaacacaaagtattaatcaaaagtgggtgcatgcctaaaaatcaggaccagcatatggtaatcaacgcaagcaagggatctatagacatataaatgtgtaaagtgctttagtgctcatagctagcgcatcatcaagagtttaagacaatatcattaacagaattctagttccaaaccatgttatcactttagttgttagcatcagaagcagtatgttggaattaattgcctaatttttcagatggtacctctttagcttcttccatgagttctggtcccagcttcttcaacaataacacagtctttggtgtagttttccacataagcatttgttgctgtgtgcttggatgcgtgaaggctaaggatgcctctgtcaccttttctctagtacaagagaatccatctgtacgaaccaagaacatttcagctttctttcttgactgcacccttacaactccagttgtagaagcacacatatctccttcaaccaaacttatttcatcatcactagtaccaccatgacctttggtttctgattgaggtttgggataatcattattcttgttacttatagtagcagataatttcttctccacagctaagttcctgttgctgtcaccaaatccattcacggttggaccactagaaacgaaaccatcaccagtcatatgtctaccattgctagaaactgggtttttagactttagagaaagaccattttcattacatgatccattagaacttcctgtttcttgaagtccatgcacttgctcattaccaagagtatcacctctctgcatttcttcagtatacatatagtctgaaacaggtaacgttttcaactggtagttattataagtaggaggggatacccttttgctccgaaaaaacatggacatttcctttttggagataaaatttccaggaggaacctgggcattcaacgggtcaatttcagtggagaagtcagccaaagatccttcttcaccaatgcaagtatctaccagctccataccttgaatagaaataaggtcactgcaaacctcattggagcttccattcctttcatcactataggctaaagcatctgcacggtttacaccattcaaactattatttgaagtatcttcaagtttctttcccaagataggcttctgcttttctgttatttcattattaacttgtaacattgcattgttggaagcagttggttgactggagtcaagtggcaaaacatagcgagtcatgtactgcctccatctggagaccattgcagaagttctctgaactccttctttactatggagatatataggccttttgctggaatctgaaaccaacattgcaaacttctcaacttgctccttcgaaggtgcagtcccaacttcaactggaattttgactaatgaaatttcccctgatgcaatagcattgtctacggcctcttgataaaagttatccttcacattctcagctctaagatcaattatggttttgtatcctttcttcattagccacttcagaccttcttctgtaacctgaccacccctccaaaaagccacatccgaatctttgtatccaatgtcttctctagaagtggatagataaacaggagtccagtttgcaaacagagaatggtcaggataatcctctccacgggaaaagccaacatcataacacacgttctttagtctctgaagtttcctccaaacatctaagcttctatcatcaccaggcattaaatagttctcaagggcgacatgcaagctctcacagcaccttttcatctcactcctaaaaatggcaagcggaggaagcttatcctcaactgcactaacatctaccatacgaaaggagttcgctacagaagatcttccagaaagaatatcctcccttccttcgttcaggagggacaccatacaaccaagcactgaaacaattttatcctccaataacggcttttcatctgagacgagatcatatgaaacataacattcaccagttaaaggattgcataatgtatccattaatgcagcatgaagccattccgcagccctgaagattctacaatatgcctcaatttctgcaatatcccctggaacaggaccaacccaaggcaattgggttggttcatgaggctggaggaccttcaaatacagaaaaaaacaacagcgttaatcaatgataggcataactgcaccactgtttctcctgaaaaaataagtttaatccaaaacagttgactttggaagaacaattatcgagaagttagtccaaaatccaaatatatgggaaagttaacaaaataccatgaaaacagcttattaaacgctatattctaaaatcaacacaaaaatcacctcagttacagctacatgctacaagataatatgaacaaagaagataatcaggccgttgctcatccataaatatgtgtgtgtgtgtgtgtgtgtgtctatgtataaacctacacggtctacgcatcgagcagacttgtacaagtacaagtctaattcaaatcagttttaaagaagaagaaaaaatgtgtttcctaatttctaacccagtaattcagatcgacaatcactaaatttgagcttgcggacaaaaattcaaatcgaaaaaagaactataaaaagatggatcaaaagaagtagtaagtagcaataagaagtcgagacctgagaatccaagcctagactgagagagaacgacttcgaaagctcagcactaacgacgaacttgaggcgcctctgaaaccgctccttccggcggaactcgaatcggaaaccgaagccgacaactctggggctggcaatgaattgagtagtcttaaagggacatagatgagaagatgacggcgacgatactccagtagccgaacgacaccgattcatatcgacgacgacggccaagtggcatacaagacaacatgccgccaccattcggaattttctttttcccacgctgtttttgtaaatagttgtttggatggcgagaaaataaaagcgtggataataagagccagtattttccaaaaacaataaaaacggaattgagagggacctttttttcctgagaaatgctaaggtccaagcaaaaatttattatttaatttaaaaaagcgttaactaattaccccagcataaaccagtactgagtagttagtgaattgtttccttttattttaaatttttggccacaaatattttaattttcacacaaattaaatgaaagttcttgtgttgtgtcttgactctaatcttctggaattcgattaacaccacaccatccggaccgggaaaggaagacataaaacgcaaaatcaaagcccctcttttctcgagtcacgacaggtatgtgtactgctattgcggctgttgctacgagctagtgtgggccatcaactggatattaggataggatcaatttaagaggcccatacttttcaataatatttctataataatacaaattaaaaaaaaaacccaatcaaatattcaaatctctgtttttactttttcaaagatcaaatcaaataatgttatcttgtagtttgaacaaaataatatgagccatttcaattgttggaacaatacaaataattaaatatctcacctattttcttagctttttttgttttttttttcttttgggcatgcaatgttctataattagacacaaatacaaatgtaaaatctattttttttacaaagtgatttaattttacatataattgtaaacagaaatatacacatagggaatttattccatccaataagctcattaatcattatctagcatggagagacacgcctagccaaactataatactgctccaaaaaattagccaaaataaaggtttaaaacaaaacatgcaacacattagagaatcgaagtaaaatctaagtggtgacattaaactttaaaactagcattggaaaaaataaatgcaaacaattttttttttcttttcaatttggctatgataatgcacagcgaaatagaggactcatgcactgtcctctagtggccttaggcaaccttccaatttcccaattagtatcttaccttacagcctagggatggaaagcagcagatttagctttataattttgaatgggaaatttgattttctatgcttagaaaatcaaaaaatttgatttataaaccaataattaaaaccctaaaaaaactataccttttttttcaaaaccccaaaaatacccccaaa

SEQ ID NO: 379493 - DNA, 4660 bp, Cannabis indica
aaattatatcctttctttcttaacagctttggagaatgaaattcaaagaacttgtcataataaagtataagcaatagggcaatgaaagagagaaattaattttggggagctaagactgtttcacagatttatacacaaggattatgatcatgaacaatgtttattgctaattggtctctagaaaagaaaaaaatagcactctctcaatagaattccaacaaaaaatttagaaagtatgagatgaatagaaactactcacatgccatcaccaaactcctcattgataatttccttgatgctctcaccaaagtgcattatggcttcattcaacctgcaaattcagaagccagcaaaaggggaagaagaagaaatacttaatgcctatataactcttacaaaaaaacacatggggtattctttgtcttctcagtggagtttcatcttgagtgatattagaaactcattatgccctttaaatttacttaatcaatgagcaattttttgtccaaaaaaatggtgtgttacatcacttaacaccaccttgattataaagaggactagtaaaaactactaaggtattgtttggttggaagtaataaaatggaacagagataacttttattttattcctttatttagctgcattttaaagtattagaatgattggaatcacattctatatgggaaaggacttaataatctttttatcaattttatgagcattttaaacttgattttatgtcattcttcgttcttattttcattcctattttctatgtttatattctttcccaccaaacgccacctaaatgttcaaactttcatctatgctaacataaaatcaaaaatatgaaattcatatcagattacccataacaaaattgaatgaaaaacactatcaaccatgttaaactcatcacaacaaaattaaagaaacccacataataaaaaaattaggcaaacaaagaaaacacataaataaagtgagttttagagcagaagaaaattgagaaaagggacctataaacagtgggttcttgaatcaaattggggtcgtaagacctcatgggtggcttcatcatgtgatgaataagatcttgagtaaggtcaggcaaagaagcttgtaattttggggcagtttcgggcttgagctgagcttggcgcctaaggagttgggcaacgtagacattggtgagtccagtctcttctgctatctgagtgtaggacttgccagagtcatgcttgacggactgtaggagatggactaagttagctttgtactctgccatttccgaccaaagtctcttcgagattttttcttttcttctctatcgagatattgaaataaagatgttttataaagattcttattttaatgctattactccattttaagagtattatttaagagtattatttaaaaaaattaatattggttcaatttaatatgtttttcacactttttgatttaataagagtcttaaaaatttcttttataagtggcgtttagtaatatttgtttagaagaataaaattatctatccaaatttgaacacagagttatcaaatcccttaaacacaacttctttattgatgatgaaataaagaaaaaatctaactttcaagatgttagcatctccaagggctgctttctcttaaagtttattttctttgattttcaagctcccccacaaataaacccctcccccttatttataggcattgaataatataaaatagtattaaatagaaaatattaagtcaaaacaaccatttaaaataaaagctaattagataaaaataaaaaccttttcctagcttatgtgtccttctattatatccaaaatgtattggaggcttatcacaaataaaagaatggaacaaaaattattttaatgagaaaattacaaaggattaggccaatcttgctctaaagcaagctttgcacaatggagatccaatcccaatctatatagcactaactttgtgtagcaaacttgattggctaaagcgtgaactaccccatttgcttcacgataaataaaagataccgcaataacattatcaaataacaacaagttcctaatatgattcagtaccctatctatgtctctgctaggtgtgtacatcggtcgttttagtcgatttacgttatattttttaaacccaacataaaaatcgggttacaagtgcaacccgcctaaaataaacactaatatttttttttcacattcatgtgctatattttagttaattgatataatgagacaaatatatagattgaattaaaagtttaaatcaacctccataaaagaaatatagtaatttgaattattttctttgtaaatatgtatataaattatattatatgtaaactatgtataataaaaacatatatataaaaaccctcttgattggattggttgggttagggcttgattgggcgggttgtattatttttaactcgtccaatataaagattgggtggataatattttcatcgagttttttaatttgtatttttcgttgggttatctcagtttggtttgggcaggttgttcgggttgggctgtttgcaaaattttatggacagccctagtctctgcacccatcctccttgctatggattaattaaataacttcaagacaataagacgcaatactgaagctagggaaatgtcgttagatacctgcctagggtttttacaaaaggctacccactattggagtaaaatacataaacatctgactgttgggcccccaagagggtctttctcgtgaggcgaagagttcgtacagtggggactattgttggtgcaaggcacgtgttgggacaaagtttgcacttggtagaaaaaaaccccaaaggagccatcaaacaaattaagtatagtattcagaggaggtgtgcgcaccactatcgtttgacacaggggacaagatttgatcctgtgtcagaaaagtataaccgtcataagtgcgtctgactctcgtcatgtgacagactttcgattttcctggtgtgaggagtttccgccttagactcttcatatagctctccatgcacacttagttgattcggtctctttcagatcccggtgggagggtaagattttcgggtctcggatagttattcgacttatgatgaatatttgagcctttccctagttagacctttcccaggccaatgtagtccttccacgaccttctgtaattaaggagacttaattggtaatcactcggatcgtcaccttttatctactcacgtgtcctttgtctggaaacttagataacaagcccgtataagaaaacatggtgggagtaaagcacgacacgacacgacccatattttttttatgatacagtacaacatgattcatattttttataacacagcacgacacaatctatatacatagcgagacatgtatttacaacactactcgagacatcgaacaactaacatcaaacaccatcataatatcacttactattcaggcacatcataatataatgtaccacacaaacatatgatgcaggagtaaaagttctactcgaaccttggctttcagtttcttcagctcaaggtctcaaaccaccttaactatcacttgttcaaactaaaagatgacaataaactagggtatatacgaatatcatatgcaagaaattaatgagcataacttaataattgatgtatttaattgaaaaaacatgtcacatgttctagaagatgctttaaattaatatttgtagacaagcttttcaatatatttcaatttggaataagaaatgtaaaagagatattcttattttgtcaatatttttgactttggagcttgagtgattgtgattttgatttcttgtaaatcacatctctctcttacacctaccaaatgaggccgaaacattcttttgctcttgtaagggtaagattctaatcacacactcgagaagaatgattaatttattaaggcatcttcaacttcaaagtgaaaaagtttattatttttgacaaaaaatattttactaaataaaaacgtctaatcttgatcataaatttagctcaatactattgtaccaatgtgcaagaaaaaaataattaaaaaaaaaactaaaaaaaaaatacactttttgacaattaaaatttagaaaaatattgtttggctgatgccatatttcaatgatatctccttgtcccttttgagtgtgttactcttttttgaaactagcttttgcaaaaaacaaaaaagaaaaaaatagaattattcttcatcaatatttaccatgttaatttactttatttatttgtaggatttatttatttttattatttttctataataaatgatataattttattaatagcaatcaactaaataatagtttgcaatctaaatatgacatctcactgttagagacacgactacaattagaattagaaaaaagagccaaataatcagccgtgaaattctaaaatcgtttgataaaagaattaaaaataaaatcaaattaaaaaaattacagcatcacagttaaccttaagaaaacctatattcagtttcatctatcactcagaagacacaacaatagaaattgttactccaggttcattcaatctcgtagtttgaacactcaattattgtgcaaggtaagtaac

SEQ ID NO: 379494 - DNA, 8211 bp, Cannabis indica
gcttttgttttccatgctgatattctaagctagcttttcatgctgatgttcttggtttcaccacttggctagtctaacttgtgttctaacaaaaaataaaaagaaaggaaagaaaatcagattctagtatcacagaacaaacatctctgatgatatcatattgagaacatggggagaaagtaccattccagaaaaagtttagaaagtatacagacaactcttatgagaaaagggaaaaacaattgagaaattagagacaataaaataaggaaactacaagatttctaggaaacaatccctcacaattctaaaactctaccaggaatgaagttgtagaatcactttggtgtctgtttttcaacagaaagttctttcttggttatttcaaattacagcaaattacttgctgcaattgctttcatataagctccattgctcctcatttttcattttttttttggttaaatttttggcataagttttaatatcttggagtgacattcatgtacttccacttataacataaaaagaatcacatcaacgaatatatttcattatgtactctgtaattttgtagagcttttttattaccaagaagtagggaaaacgaattatctcagatttaagttgtaagcatagtatatctcttgctatctataaaaaaacaggtaaattttcactagatgattttgtcaagatgtcttgttgctatttgacaacctcaccatccgttctttgtgacaggatctagaaaattccaaatcagaatttgagaaaagccgcttcaatctagtatgtcttattcatttgcgtgtctattctttgcctgttagctttcagtacatctttctatttgtaagttgtaatttactctcagtgattttaaggactgcaggtaaattcattaatgaatattgaagcgaagaagaaatacgaattcttggaatctgttagtgcaattatggatgcccaccttagatattttaagctggttcgtttgtgtacttattaattgtaacctccgttcgttaaatgtgagcaaacttttcatttcaaactgaagataaatttttatgtgcttcagggttatgacttattgagccaaatggaaccatatattcatcaggtatactttcaattaactgttccacccagtaaataaataaatttcccatcagctactgctattactgtaaaataaggaataatagtctacatgtgactgtgctgtaaatagttttcgtttctgtttttgtacaaagtttgttcagtaatttgtcggtgtttgtaaccacggcctccctctgccataagcgaggactctcaatatatttgggagaaggtcactcgtgcatgtcacctttgcactgtcttgcatagttagtcagtcattgcgattagaaggcccaaaaatattttttgtactgtcttgtcctagcatgaacttcttcatgcaattgacattcttctcttcagcatttacttttgccagcatttttcttccatgcctccataaactctctcacattctaacagtttttgtttcattattgaatacttaaaaaaaaaaaatgtaattagtccaagtaactgtctgccttttccaggaagaactactctgcttgcttgaatatgtttttattgttatcatttgggtaggttataaactttggcttactaaacccagttccaattaaaatggtttttacttttcctgaaatcaggtattgacatatgcgcaacaatctaaagaacaggcaaaagtggaacaagataaacttgccaaaagaattcaggaattcaggacacaagctgagctggacactttacgagcatccagtaacatagaaccttccacacctcttgatggcattcgtgttattggcatggactcttacaaaagtatagaggcagttgtgccgtccaacgcaaatggggaggtaagtttattggtttaggagtttcttctcacgtctgtagtactacttcagttctacatgttttttacaaagagatttttctagtaaaatatgaaatattcaatcaattattcttcacttgatagtctcataaatattgtatcattgagctctgattctatgaataaaagaccagattagatattactgggccagagaaatactgtttagtaggacttaatttctttcgttcgtttctttacttttatttttaggttgtatttttgtttaccttatcatttttttttcttttaatttttcctctttcgattattcatacaactagaaagtttttatttcttataaataaataaaaagtataattttgttagaattgtcattgcataatctattttttcaattctattaggtcctgacgataaagcaaggctatctgttgaagcgttcctctagtctaaggggagactggaagaggagattctttgtacttaacagtcaaggaactctattttattacagaattaagggtacaaaacctttggtatgttgtactacaaaaatttatagtttctaccaattttgtcttgattttagcaattactattgaggctagaaaaagttccatgtctagaagaatatgctgctgtagactgtagttgatagctcactgcaagtcaaagtcaacatacttgcgtatgcctttgttggccatttttcggttgttgcacacagatttcttggtatgcctttgttggccatttttctcttaatccctccaagttcgaaaagaagcattttgtttatgttgattttgttttataagaaacaaaactattacttgatatcagaaatataaactattattaaatactagaaaaacttaggaaaacaggggatgaaaagttctgattattcaaatctcacatgttcacccaatatttactccaaatcacagtgttccacaaagcatacttttcttgacgaatcttcataattactcaaaatcatagccttgttctgtaaaggcaagttcctagtgcccaaatctcctttggatttagaacgacaaacctccttccaagccacaagataaacagatttttcaccattatgacaaaatgtctgtctttaaccttttcaacttactaataactcctatttgttggttcatttacaggttctaactttaatgcacttgttaccttaaacaacttatcttattcaatagtcaaccgtctcatgccaaatgtatgtttacctttgggatgaaaattttaggttgctttatgggttgtagatatttatgcaaaagatatcaaaagtttttgtttgcagaatttcgaagggattgggcttcattttagtaaccattcaaggggcatcttgctcactagtatttgtacctttttctattattgggtacttgttccttgttaggattagctgccatacattctattatgtttccaatatttcaatctttagggtcttatcctatatcatgactcatgagtactagttaggtacttacaacataaattttccttttcttcgtctaaattccgatatcatattatctgtctgtcagttttaacaaactatttgaaatgcaagttaattttgaattattattgctgacttgttgtagcagactcctgatccttcttatcccttgatctgcactatcatagggctcccattcacaccattatactcgttcagctgaacctaccagcggtatgtttggtagattccgctcaaagcacaacagagcagcctcactcaatgaagatgttctgggctgtcgtacagttgatctacgtacctcaacaataaagatagatgcagatgattcagatctacgtctttgctttagaataatatctcccgtgaaaacttacacattacaggtaagtttgctggttattggcttctttttgtttgtttctgacaaattgtgtacatgactaactaaatttaaggcagtagtgacatatgaggacaactatgtatcaataggctgtaggtctgagaggttgagctcctgacttaagtttttctttcttctcatttgcccaggctgaaaatgatgcagatagaatggactggataaacaaaataacaggagctatttcgtctcttttgaattcacagatttttgaccaggttgtactccttaaaaactattttccctttcttgcatgacttattattaagatgtgttgcaagccatacaatattgactagtgaggatcttctgcagccgagacatgttgccacaattcttgagaataataagtcatcagctcgtggtgcttcatgtgatgttcaaacattaggaggccatcaaaacttggaggatgacataaactcaaacagaatagagtgcgtctctagtattcttagagcagtccctggaaatgatctttgtgcagagtgcagtgctcctgagcctgactgggcttctcttaatcttggtgtattattatgcattgagtgctctggcgttcaccgaaatttcggagttcatatttcaaaggtatgaaagaaaatacttttcagtttgtatgaaaatagattgaatccagaacttatttgtcttaattttcagcatcttattaacctaaaaaatattggtaaaaatttcacgactaccatataatttaactgtgggattttaattgtgtcacctcctgactttgtaattttaaaatatttggattgggaggttgtttatttttctggagctcacaagttttttcatcagaagttttaacaattctgctgaatgaaccattgtgtaaatcaagcttgcttaatatatgctgcagtctttcaaattcagtcttttttacttttttcattcctatgaggttttgaaaatctattgactacgtataaggcagatctaaacaaaaaatttagcctttagttgtatgctgtcctttttcacgtactgggctgcaaatttgtcaatttcagttaggatagtctagatttcaggaaggatagcagcagtgggatattgaggaagtactctaaggaccgtaatcttagcagtggcagaggacttcctatcaacaccttgattgtatttaatccaatgtgtctttcgaaatataggattaaaagattggagcttttgttataattggtttggggtttgtgtttgtattataagggtgatattcctgctgttttggtttttagtctggggattcttgatgcagtctattatggttgtcattactttttatataatcattctgtttctttcttttctttttaaaaagtgagaaatataagataaaagcctaaaattgatttcgtaagtattgagtgcagtacctgtggtggctaaaaacactcatctgatactggatctggaaataaattctgtgtatgaaatatatggccttattaagggttttacataactcataactacacaaatccttttaataaagattgacctggataccatcatgtagaagcctgaaaatagtacatgtcatgtcgtgtcaagtccagtctttatttcatttgcgagctagtattaaaaacgctagaacatttggctctgttattttcaattagcattacatagatttacagttttaagctatttagtgcaataaccagtgtgtgtgtgtgtgtgtgtgttgaagtccttcattgacttaaggcatcattggaaataaaaagaagtttgatagctaacagttagaggaacattatgtccaattcactgcaggtgagatctctaaaaactagacgtcaagggtttgggaacctactatcttggatttatttcgcaacttgggtaacacttattgcaactctatatgggagggattgctccagcttgagaatgcacagtaagtagtcagaagactttagttttaattatgtcttcatttattggatgataagcttcaaacatttcatggtttgtttcacattataagtaaataatttgtgtggtggatttagcttaagaatagactaatttattatatgaccggttcgaatttatatttgaatgtaatgtaaccatatttgaagttaaaaattgaattttagtatgaaacttgccttagtagggcttttatcctcttaggacacttacacattcctatttctggttttctttgttaaatctctagtagtattcattttttttccagtctaattcttggctggtttatattttgacaccccttttttccctagtggaaatttatacaatactctctagcttatgtgaataataaatatagtgacacctctttacagtttatacaaatatatttatgttatgcctgcacacgtcttaaacaaatatatttcctagtaataaatattcagcaaaaaatgtttattaggaaatattatttttataatttatcttgattcttgatgaatgtgaaaaactgatgccagaacggatgactcaaatgctctgatcacatccatttcaaaaccatgccccaaggatgcctttcacctgaaggaaaaatttattcaagctaaggtagaacattgattaattattttcctcaaccctatgataaaaattacacttttatttgtggcatatttgatgttgctttgtgcaaaagataaataacacttctgctctgtcattggatattgtttaatttgataagaaatgacacaagttaatttaaaaaatatatatatctatatacatgcattgtagccttcgtttttttaaaaaatgccatgagtctagcaaataactggacttcgtatgtagatattaaattaatatatctgactgagatggttaacatgaagaattacttgtcccagtatgtagagaaattaatggtgattagagatgaatccgttgctgaaatgcctgctgctcttgcctcaagaatctgggaatcagttaagagtaataacttaaaagaagtctacagactcattgtgatgtcagacatgaatatcacaaatactacatttgatgatgtctttcctgttgatttacatcaccatgtcggtgcacaagaaaccgagttaggaggtaagacaactaaaaagaaacacgttgatccaggaacctgtgatagaatgaaggactccaacgagccagggaactgtcttcaaggttgttcactattgcatttggcctgccattgtgagaatctgcttatgattgaattattattgcaatttggtgccaacataaatctgcgggacttccacggaagaactcctttgcatcactgcgtggccagtgggaaaaattctttggcaaagtttctccttaaaaggtaataatcttcctcttgtcagtgggaaaaatattgtacttttcattgctttttcccatgacatttaatagaatatgattaaagaaaagaagagaaaaactaaagtctcacttctgttttgcatgaattgatgctttagtaatagaatatactaacataatacttatgcagaggagcccgaccatcgatcaaagatggcggtggcctaagttccctagaaagagcaatggagatgggagctataacagatgaacaattatttatactgcttgctgaatgtggatgaacactcaagtctcttgacttttgtctactttcagttatccttgccttacactaatactgacaagtgacaaccagaaattccatcttattttctatttaaatttgagtcagaaaaattgggatattgtaatctatatttacctggaattcaatgtgtgtttttctttcattttttttggttgttgtaaagcttacaataatttaatttgatgttttcatgaatatttataatttcaattgcaatgaaatgcaaaataatgaggatagcaatgtgattaaaggagaaaggaagtcaatgagaaagttaagcagagaactgaataatttgacatttaatgttaattatgatagaagctgcaaaaaatcaggggtggtcaagaaagctcaatgaagatcctttcatggaatataagagggagtggggataaggagaagagaagggcaattaaagcgacaatatgtaaggctagtccggatgtggtgattttacaagaggtgaagaaggaagttgtagatagaaggtttattggtagtgtttggaggtcacggtttaaggcatggattttgagcccatccatcggaagatctggaggaacattgctaatatgggatacgaggaatattaaggttttggattcattgattggtaatttttctatttcaatcttgatccaagctgaggg

SEQ ID NO: 379495 - DNA, 1683 bp, Cannabis indica
ttttttaaaatttttgatttatttacttaaggataattggaataaaacctatataactcagctcagaataaaaattaataaccctaggatttactacaaaatccactagccactaaagacaaaacaagggtaaaatttctaatttatccttttacttcaccatgaagtaatcaacatacataggtgtaaatttgtcataatccataaccctaaaatatctcgatattctaaatttttaactatatcgccctgctacttctaagatatcaaactatatcttagtgactgtataggccatacgtcgcattccactataaccggcataaaaatatgaacgtcataaaattttacataaatcataattaatacacttagaattcaaatatatctctataatttcataaataataattaaaagtctaattctaaaattaaatcctaattatctgttaattctcatattaaagttaaacaatcattacatgccactagaattaaacttcttctctccttgtattgtaagcctgtggtcaaagtgtaaacttctaaatatcatctatcatgttctcctcgaacacccctaattgcaccatcgagaatattgaacagacttaaggcatatctcactatgttactttagagaaatatcttggaatcccccaatgctttggtcacacaaaacaatctacttttaactacataaacgaccaaacctaacattacctcaacaggtggaatgaatcttctttctcaaagggtggaaaggaaaccctgctaaaagttattctgcaagctatcccatcatatgtcatgtcttgcttcaaactccttttgatttatctagagaccttgacaaagccatgtctaacttctagtagggtagcaaaggcaatataaaaataacccacgagaagaagtggtcctctgtgccaagctaaagttaagggttgtattggttttcgatccatgacccattataaccaagccatgcttgctaaacaagtttagagaatcctcaaaaatcctaacactcttggctctgagcttcttaaggctcgttatttcccatctatcccttttctccatgtcaccaccagctaccgtccttccttggtctagactagcatcatttagtgtaaatccctcctaaaaaggggactcaaatggaaaattaaaaatggccaatcaattcatattttgtaggattagtggatccctggtatcaccttacttcttcctactctctgtaccaaacctgacctacacaaagtgtctgacattttaactcctagcggtgcttggaaccaccagctacttctcttaactttcccacttgaaacgacaaatcactttggaagaaaaatgtccccattgtgcctaccacaatgggactctagagcatggtatacttcgttgttcaactatccggaaggtatggaaacttaccccttcttactattttatgaaacaatataaaaattttcctttaattggcacattacacttggtgagagaagtttttaacacaaaagtgttccaaatcttcctttatattttgtggaaattgtggaactgcaagaacatgtatgtgttggaattatattttaccaggaacttagatctactcacaagtatgttgatttaacaacctaaacatgaacttctaaaacgatgaattaaaca

SEQ ID NO: 379496 - DNA, 853 bp, Cannabis indica
tttttaggccaaattttagttttaacatcttcctttcttctatgattgatgccacgtgtatacaaagaaacatcaagccaaaaaaattcatttctagctcaccaaatataatagacaaaaaacccattttttaaatttggaaatttgagctctcaaatagtttgtaaattaccatactaactaagcccacgcattgcttgttattaatcccaacttgttgtctccaagagtttggcaacctagtgtgttcaaattgatttttgctttttaatagatttaatcactcccaaacataatataaaatatacaccctataaatcactcatacatggactatgtggacaaaatacagacttgtttttctttaaaaaagatttaatcataacaaacatatctgattatcaaaatcttataatttcatacaaaataatcaaataacataaaacaattactgaaaatctcaataaccaataacactttaaaaataaatattatgaaattataacatggatgcttaattcgatttttaatagttgacaataaatgggaatagaggaaagacaaggaaggtataattagaaaaaaaaatatattattggattttagataaaagtttacaattttactggcacatgaatttttttaataaaattctgtgtttttataaaacaaccgtaaaataacaaaataaaacaattaaaacaacagtggaacaactaaaacaatcgtggaacaacagtgaaaacttaacccaatacacagtataaaacttacacaatatttttgaagaaaatcccatcccgcaataaaaaaaataaaaaaattaaaaatttcagtatgtagtgtaaaatcc

SEQ ID NO: 379497 - DNA, 2429 bp, Cannabis indica
gagagagagaaagaaaacagcttggtaagatgagaatttgatctgtttaatgattttgaattcttgtattatgatatgggtattaatgaaaaaatgagatggagattgaaggagatgaagtcgagaggaaagagagagtttgtagaagagaaaagggaaaatgttatgtttattttttaattattttttttaatttttaaataattttttttaattttttaaaatgttagaaaaaataaaaattaaatgacatggacctatcaggagctgccacgtaggtactgatttggcagtttaacagagaggtacttacggaaagtttcaagagtgtaacgaaatgtatttttaccgcaaaaatacaacttaggtactttatctgactacacgataaaaaacttaagtatttatgccgctaattactctaatttttatattagttttagtaagggtaaggatgttgtcttgttggattgaacttttctgcatttaatgtggatcgttcggtcttatatgtgattagtataaaggttgagattgaataggttgtgtatgtaagcagtagagtacttgcttaaaaaatacccagtaaccggctaagtctttttttaaaaaaaattaaatacttaatgtgataattgtatgagttattatttcttttaactactcatcttctccttgttttattcatttcttcttcttcttcttcttcttcttattccactcaacggtcctcttcttcttcttctcaattaacagtgtggagagtgcttaaagggtcggaacttcaaaattgataagcacttgggaattaattaaggtaacctttttaaaaaacctcctcatctggtaatctatgctctaattttctcaggacttagggttagttcatatttattcagcattatacatttagggtgttataagaaatatgttttgttgattaagattttttgactctaagctacattatttttcaataaacttgaaaaatatagggctttcgattaagattataagactctgtgctatattgtttttctataaacttagaaaatttaagagttcgattaagattttaagactctatactattcgttgatagtttgttgttagagaattaattcgacaatagatgttttgaccatgaaatagacatagttgtgcttctccccaacaatcacttttatattaaaaattatatacatgtatattctgatatgagattagcattccgtttttagacaaataatatcacttattagttaaattgattatttatgataatatagattaagattggtacatgcaaattaatgttaaatttattaatagggtaattgaaatttatttttgacaaagttgactttcatatctgttgaacaacacaacaagtgaaaatgttattattttattatcgttaaaataattacgcaaagacttaaatacttaaacttgaccgcaatgcacaccaaactcttacttttatattttactaacacttaacactctcactttatctacttagatatttacacacacttttttgagacactttagagtttagacacgtgagagacactttttagatgcacttaagacttacttcgttaaggacccaatgtccatatatatactactcatagttggtgcactaacggactctaaatgtactagagaattctagtaaatgttgagctttagtttaaggtctaagtactagaatatgcttaattaatctaaataatacttaattactatagaattttctaagtcgctggtgattttcaacactctccctcaacactgacttttcatgctgagttgttctcttttttgaaatttattgtgttaagtccttctatgaacaggtcagctacttggtcttcactttttatttggtgcatctttagctcttctcagagtacattttctcttaaataatgatattgcacccccacatgttttgttcgaacatgaaacactggattttttgctaagcgaataacaaactggttatcacaatagagtgacactgaatagtctataatttggtgtagatctttcatcaactgcatcaactacatactctcttgagctgtcattgctactgctctgtattttgcttttgtagttgataattacattattggttgcctcttgctacaccaagatactactccggatcgaagcttgaatacatacctagtagttgatcgtcgggtatcatgatcttcagcataatttgtgttgcagtattgaacaatcttaacctcgtcacctttcttatagaaaagacaacagttaatggtatttttagtcaatgtaaggtagattagactacctacaagttatcgatacattgctctgtcttgcaagtccattccagcatgagcacatagcttgacattagcttccataggtgttgagat

SEQ ID NO: 379498 - DNA, 2027 bp, Cannabis indica
aaagaatacaaagcttaattaattaattagggacacatatagaacaattatataataagattggttaaacaaaattgtgatacttgtaaatagttcaaaatttttaggttgtaatgtttgtttgattgaatatatgcttatatccaaaaaaaaaaaaaaacttctaggacaatcaataatggtatcagtatttttagaattgcaagaaatatgtaaatgtatttgctctgaatatagataataaatttgttcaaaaaaagttaagtatatataagctatatatacgcaaattttttattgttgtggataaatagtgatttctcaatagaaatagaaattgtatagagacgactttttatttatcatcaaatagacttgtttcaacttgtttgtaagaataaagtgtggttaatgttataatacactataaaaaactgttacttatattgacaactttttagtcataacataattttttttgtgactaattaaatgtgatttttagtaacaacaaaatgttacttgtgactaaaacatagtatttagttacaaattatcattaatttagttctagtcacaactaaaaatacatttagtcataataaattgtaatttttgtgactaatacttttatccacggactttttagtcacaacataaaaattatgatttttagtcacaattttttcacttttagtcacaaattttgttctaactaaaaataagatttttttttgttagtgataccaccaaattatgaccccaaactactttaatcataacaattttgatttttgggaaaatattatagacaaatatatgcatatacaatatatatttatacatctattctcaatatatttttgtttcttatttgatttggctctttgagacattgtatgagagttttctttgcatgtgtcctacttcaaattcattcccctttttaccaaattgtgtcatttttctcaatttgtttatagatattcactagggttaagctaagaatttggtgttgtaaaaccaaagtacatgataaaaaatgatgagaataaaataaaagctagctataagtaaagacaacaaacaaaagcatattccttcttaaatagtatgaacccatatgagaataatgtttttctgttcatcaaacaaaaagagaataatattattctaaaaaaagccaaaaaaaattacatttttttacttcttctattattgtggattcttttgttggccattcccacactttttcttttttttttaccttatatttattaaataagtggtcacataattcgttgtgggtagggtataaggttcttctctaatcattattaatattcgattttatatattaattaagttatatctctttttttttttttttattaaaaaaaaatattaattcaacactcaaccactttattattattattattattttggatttttttttatttttattatttagtggctactaaccttaactaataagatttagtcattacttgagtaaatattatatttggtgtaatttaatttatatatatcaataaatccggtgagggtataagtagattaagtttgtacttagggtccacttagtttaggattaattttttttttcttttaaaattatatattttttttattgattttaaaaaatattatatttttttctatgtcctactaaattttaggtcggccttataaatgaatttagttcttttgagctcttctttatatcttgagatttttttaaactttgtgtctttagtagaatatatcaattttctttaaaaaaattattattttttaaaaaataaatttatcactggaaaattaagaaaagttatgggtcctcatggacaatcataatttctgaactaattaattatgtaggaaatcacaaataacatccctaaatcattattatttattttttcacattgaaattaaagtcatatgtatgtagttataaatattaataattatgtggatgtccaaatcttttatttattacc

SEQ ID NO: 379499 - DNA, 4572 bp, Cannabis indica
ccctcttgtcttatctctctctaatctctatctttgatcttggtctggttcttcgttttcttcctcagcctcacaactttctcgctcttcgttttcaccgaccaccaacacacattcacttccacacttttaacaagttccgatttcatctaaatttcaattgggatttccatgctctaattcttataatttttctttaatcaaattataaattatggtttccaatgtttgttcggtttagaggaatagcttccagcttggattgatttcggcttaatttgttcctttctaggtaaaccctctcttctttaaaatatattatatttatacacatactcgtatttcactctattgcatagaaacaatcgcaaaatttaaagactcgaggaaattgtttgggcttcttattttgctgggagatttttattgcttcaaaacaaaataattttctttattaattagaatggttttatggctctgctcagttcagtataaaacaattatcttttttggtgttggttttaggggattatgattatctttggaagtagattaatttttacattatgtaccaatcaaattgtaatattataccaaactgtagaattagcttgcatgagcatctaggtatagctgaaattatttcattatcttaactaagagccgtaaatgcaatgcctaacttgcctaatatcattaatatgcatttccttttttcttttcttaaagatttattgtcgggtttaaaatttctaactgctttatgaaagtttgtttttattcaaaattggtattttaaacctactgagtgtgtagtgtaccatgttgattttgttttttcttttgatgtttgggactatacaggtttatctttttgttactttctgttttctttatactccttttgaaaagatttagctcagtaattgttttatttgctaatatttgaaatttttctcagaaagatgaagagtgttcgggaatggtttttttctcagatagtatccaagtcagtggtctcttctagaccactatcaggcagtgacagtttctttgatgaggaacctgttgaagaagagcttgatgaccgaggtattgcacaattgttaaccttctgattgtgagtttttaactggattagtgaacagcagatggtttcctactgaagattttactatttatttatttttattttgttttagtgaggtgagggaaggagtgagagaggctttaggaaagaaagttagaaacgatgcagacctagtttaccttttattgctttcttttctaaaacttgggcaaaataattttgagcatggtgggaagtgactatctatcattgactggagttaaaaataactcaaataagataattttgtgcggatgtattttaattgaaattaacacggttgcataggggaatgaagctttctcctaatttggattagtttcttcactgcaatttcttgtactgtgtttggcactcttaattcaatgctctgttttttcccctcacttttacatgtttaacaagatataaaattatgacattatatgatgtttctcaataaatctgatttttcttacatatgataattcatcatctctcattaatataacttatcatatcaagaaaaaaagatgaagaaaaagatatacttaaggcaagagaattgtttcgcttgtttctcttcattctgttctgttccattgtgatgtaaactaatagtagctctgggccagttagagacttggatctgttcatgagtactttgcgatttactttgattattttcctgcaccatttgggccaattttctgtcatcttccgtgaattttattatacgcattgttatttatcattaattgttttttaattataatttgtatttgatctccttattctgtaggtgaaactcattcttctaatttagaggcaacacctgtctctcatgcgccatgctcttctaatagtaatcaagaaaatcatccacagccctcaacaccgcaacttgcgattaattattctaacaattccccccatggtgtcaatggaaaaaagtttgatccactgataaagattgaggaccttcaagttaagtttctgcttcttctccgccggcttgggctgccagagaacaatcttctagttgcaaaggttctatatcgaattcacctagcaactttgatacgggcagaggaatcagatctaaaaaaaatctaccatgtaagcaacaaggccagagctatcgtagccgaacgagaagcagctggcctgcctgaattggattttcctatcaaaatacttactattggaaaaacaggtgttggcaagagtgctacaataaattctatatttgatcagacaaaaacaacgacggatgcatttcgacctgccacagaccacattcaagaggttgtgggaactgttaatggaattaggataaccatcattgatactcctggtcttttaccaccatctgcaagtaatgctaaaagaaataagaagatcctacattctgtgaagagattcataagaaaatccccacctgacatagtattatactttgatcgcttagaccttgtcagtatgagctctgatgacttccctcttttcaaacttattactgacgtgtttggtgcttcaatttggttcaacaccattcttgtcatgactcattcttcctctgcacttccagagggacctaatggttaccccataacctttgaatcttatgtgtcccactacacagattttgtgcagcagaatatacaacaggcagttgctgacccaaggcttgaaacccctgtacttttagttgagaaccatcctcagtgcaagaaaaatacgatgggggaaaagattcttccaaatggacaggtttggagatcacaatttttgctattatgcatttgtactaaagttctcagtgatgtcaatgtcatcttgaaattgcaagagagtattgagctggggccagtgaatgctactaggctaccttcgcttccgcatctcctctcatcgctccttaggcatcgtccgatagtgaatccaagtggaggtgacggtgagattgacgaaagcctaatctttgatgccgaggaagaagatgagtatgaccaactgcctccaatccgcatcctgacaaaatctcagtttgagagactgactaagtcacagaaaaaagaatatcttgatgagttggattatagagagactctatatatgaaaaaacaattgaaagaggagtatgtcaagcgaagggagagcacgttgcacatgggggaaaagttggcaaatgatgataatgcagacactcggcaagcatccccagaagatgtctcgctaccagatgcggcatttcctccaagttttgactcagatttccctgtgcatagataccgctgccttgttacaactgatccatggcttgtaagaccagtccttgatccccaaggatgggatcacgatgttggatttgatggagtaagtgttgaagcagctatggctgtaaaccaggatctctttgcctcagtcactgggcagatgagcaaggacaagcaggattttagtattcaatctgagtgcgctgcatcttactcgggacctgggagagctacttattctgttggtctagatgttcagtctgctggaaaggatttgatgtatacagtccacagcaatacaaggcttccaaacttgtggcacaacattggtgactgtggagtttcattgacctcctttgataacaagtattacattggtgccaagcttggagattccatttcattggggaagagattgaaattcttagtcaatgctggtagaatgagtggtcctgggcaagcagcatatggtgggagctttgaagctattattaggggaagagactacccagtcaggaatgacatggtcagcctgacaatgactcttctctctttaaaaaaggagatggtattgactggaaatctacagtccgagtttcgacttaatcggaacttgaaattatcagtcaacgccaacatgaatagtcagaaaatggggaggattagcgtcaaaacaagtagtgcagaacatttgcaaattgcgctaattgcagcttttacactcgtcaaaaccttgtctcgaagaagaaaaggaactgaaagctcaagagaggaagaaattgagagctgatggaaattccattccttatttggtaccaaagtatttttgtttcaagtgggcagtagccatcttattgacagagagccgagttcgggtgtttttttctatcaaggaggaggcaagactgggagattatcattcccattgttccatgctccaacttctctcgagacatcttaaatgagattgaagacaacttcactggcaaatgcaatgatgctgccgattggcgtgatcatttttggtccatatgaccacaaattcaagttcagtttctttcttctgagggtccagttgacagccatcttttttcgctttgatataatatatattttcaaagtaaatgaggcaaaaaagtgtacagtgaatcatggagatgaattttcattttgatagcaaggtaa

SEQ ID NO: 379500 - DNA, 1581 bp, Cannabis indica
tgatgattttcttgatgaaaattttgagttctttggcgaagtttatgaccgagggcattggttttctttttaccgaggatgatatagttaaaacattacaatttttgaaaaatgttgcaagtgaggtcgtctcttctaaacgtgatttgatcatttccaagatcaccggtgaacaagttcaatggcccactggtcatggtgtccgcatcacacatctcacctatggtcatgctttgttaatgtggtttgactttagcgattggtttccaaattccaacaagacaatggtgtctcaagatttggcctttcttctctatcggatcactaatagtgtttctattaatttgacttcatttatcatggagtaaattgtttccttctgtcgaggtaagaaaccaaactttaagcttattttccctaacctaatctataaggttctttcctctcagaagaatgttttccatctaaatgagactcttgagcctctttttattggaataatttttcaaccctcggagtactttgatggagccttccccaagcgcccaaaggcttctgttggtgcaagtccctctgctgctgctgcaagttctaattctactcatgtagtagtgcacgaagtcaagtaggaagtggctttgatgagcagttgcttggctgctatggaagaggttcaacaagagatgtcgaagtaattgtcaactttggttcagttttatgagcctcaagattagtgttctctttctttttcttttttcttatgtttgcttgatgtcttgttgcactttgttttgatttctttttatcttgggcccttatagataaacaaaagtaagagtaagggttttaatttactaaaatttggactcttttttcaaagggagtttgagtttgttttatatgtttacttttgttaaagttagcattttattttgtgttgttggtgtgttttttaagaaaattttattttgtaatcttgctaattttgttttccatgtgtttaataattaaaattattttgattacttaaagtgacaaacagggagattgtagagtcttttttttacaatttaattgtcaaaatatttttttaattaatgtgaatatttattgagaaataaatatattttgcttatattattttcgtgtgtatggttgcccttttccttttagaaatctttggttaatagctgtatttttttcttttaagaaacttgtcatataagagaaaaaaatttctatatggaaagtttgcttaaatttagaaaagttgactttcccttttgctagttgataatttcatttttgacctgtatgtaacagatcatataatctttttatgggaggtactgaagaccaaatcatgatattagtcttatttggaaaatttcccgttttgacctgatctatctctacaaagtgcaattttgtcgctgtaagtcagggttcacacagtgcactttgtagattcatttttctaaaaggttttgtagggtttacacagtgcactttaggatcttgagaatagccaaacgtttctcacatcttctagattcatttttcatatttttatctttgtga

SEQ ID NO: 379501 - DNA, 1820 bp, Cannabis indica
gagagagagagagaatttaatttatttttgtgatgaaagggaaattaataagaggggcagaagaaatcagtgagtctctgagcttcgactagcactacaaagctgaaaactggggattgagtcagtagaaatggagtagtagtaatagtacgtggacctggaaggaccactttggtggtatgttattgtatattggcatataggaatacaaatttaataatatttatatatatagtttagaatatagaaattggggtttggggtttcatccaaagaaaagagtggctctgcccttgcctttttccttttcagaccaactctacaataatattaataataatcagatcagattgatatatactacgaaacatcttcagtcgcctgtcccgctctttcaccttcctttaccattctatctctctatctcaataattaatgtacatggccttttctccactcccacaccctctctctttatttgctttattaatttatttgcttattaactttattatccttttatgcatagttcatgaatatacataagtgtattgtcaaatgaacaagatcgagctagctttataattaaacacattgtgattgcgttttatataaacactagcttatagtagcacgtgtgtgaggattcaatcttttgagaggaaaatgaattgagtctgttattgagtgaaggttacaagaagagtttataaagacaagagaaattagctctcacaattaatatagcataaagctaactacttcctaacctccctaactaacactcaactagcccccttcaaactatgtagttttaaaagatacacacagttgtctttcaattcggtgaaccaagtactagagcaataaataacttgagctggagcagatacatgtttcacttgatcaaattagaccttgtcccgaacaaaatacatgtcaattttaatgtgtttagtaccagcatagagtatggggttggctgcaagaagtattgtactctgattatcacaaagatagatggtactactgattaaggtatatggaacgggactgaagctatgttacttcagagacagcactagcaagacttttgaactctgcttcagtggatgactagctgagagtaacttgtttttgagaattttaagccattagattgcctctaataaagtagacgtaatagacagtagtggaacgccaatcatcttgatcagatgccaaatcagcatcacaaaacacttaaaagggagaaatatttgctagttttagaagaagaccatagtcaagagttcttcctatgtatctcataaagcatttgactggagtctagtgtgtacgtaaaggagtttgcataaatcgacacacttttttaacatagaaggaaagttcaggccttattattgtagcatattataatgcaactacaatgtaaattgataaagagtgacatctttcactggttcactgctataagtggagagcttaacaccactattcatgggtgtgttctgtgtattaatattctacatgtctgttttacataagagatcttgaatatacttggtttgagtaagaaaaataccataatcaacagcacgagtgacttgaacatataagaagtaattaatcagatcaaaatcttttaaagaaaatgttatgtgagctcttggattagttgattgacaagtgcatcatcacttcccatgatgaaaatgtcatcaacataatgttgggatttattttaccacgatctagatttattaacatgtatgtttcattaacaccctaaatataaattctctaatacgatgaaatta

SEQ ID NO: 379502 - DNA, 1418 bp, Cannabis indica
agaaaaacctctgcaaaatctttgctgacttctcctttcatcacatgacaaaccattctaaattcacgtacaagacattgaccaacaccctgaagtcttccttctctaatctggaaaagagaaattgagattaaaatcaaaatcatagcacttggaaagacatagtaaataaaacaagccaaaacaaagcatgcagcattggtataccgatctcaaagaaattttcaaactcattggggatgcctttcttaatgtttgaatggttgcagagatccaatcatctggttttttcattacctccctctcctttaatacaagcagaggaccaccatcagataaactaaattaaaaatcctatcaagcatcaactccaagtgaaataaatcagtattgccaatacaggaaaaaaaaatcaagggctacacttttaactcttttactacattaacttacaagggcagataaaatatcttccactgttctttgagagaagcacttatcaataacatctcgcctgtatcgaaacaactaccatcatgagaatccaaaacatatcagtagtcgtttgaagaaccgaaacttaattatcttgaaaagtgactttgtttggtaaaaggatttaggaaacatatcaatactaatttatcctaaaagattaaaaaggtgtagtaggaagaaaatgtaatagaaaaaaatccaagatcatcccttgggattagttcattctcttggttagacgttattccatttattgcccctctttcgcttggtgaaagagatcctgacaaagtccttaagtagttgcgtattagtacgaaagggagactttaattggcccaatgattctttgcctggtgagttgaaaatgtgattgacacatgagcttttgaaacttggtttatcacaacaacaagaagagggtattgcctacaccttttcaagccagggctagagaattattggatgggattgaataggatatttttttggtagaaatgattttaagagcgaaggacatagacaatagatttcaatctccaacttataataccttcaaattggacagattttagggaacaagtgaagaatcaaatcatagaacagtcttgtagaaaaaatctctcatttcttcaactagggaaaaactattcgtctcctcttctcttgcatcacctcagtagtaggatatatggcgatgcttataatgatcacgatctggtatcaaatttatggtgttttaaacaaaccaatttaatagtaatacaaggaagatcacaatcatagcgctgactttatagtacaacaaacatatacaaattgtccttgcttttattttcttatgtatgtgtgtgtggtgagagtatgtggaaccagcatagattcttttcttatatacatatacaacatatatatatata

SEQ ID NO: 379503 - DNA, 1930 bp, Cannabis indica
aaataaaaaaacaaaaacagaaataataaacatttctttcatttctctttttcttaatctacatatagtgaaagtggtataaaattaacttaccatgacagtaagtggtgaggcatacatgcctatagttaatgcagcacacaaaagtccaacaaaggtaagttttatttcttcacgtattgcaaacagagtcaacacgattactgatccaaaaaaccccacatccagaatggcaaacaatttccctgtttttacctgaaaagaatatttttggtaaccaagtcaaactaaaaatctattcactttccaaaagtggaacagaaatgaccaataagtgtaactatgttataaagcggggccttaccttcttgtccatgggagcatagatgagaaagatgattacatagattagttgcaagatggcaccagcgccattaactgtcatgattagtaacccatttgggttcaatataccatagaatgtccataagcttgtactcagaagtgtagttatgtatggaagcccttggtagttctctgttgatttcttcttcaacactccccagaacgtttttctataaacaagaacattaacttagttagatacatgtaatattcaatctgaattgtgacaaaataaaaatagatctctcttatttttattttcttggctcaaactagataacaaatacttgttaatcatatatacttcttcacatatacttgtctctcgagtttaagtaccatattcataactaggaaaaaagttaaataggttttcgatttgatgggattacttacatgggagacgtaaaaaccagaaaagaaataacattgcctgcatataaaaaggaagagtgaaatcagataaatgaaaatttgaggattgaaaacaagtaatattaataagagataagagtcacggaccaataatgccaataatgaaactcaagctaacagccatttcaacagagtgcagtagcggtagagctatgtaatgaatgtgttataatatgacagccaaatgaagaaggtgttgtttggtatatataagggtgattatgattcgcacgtgacgagagaaatgacgtgtgtgtgaagtgttatgtggttgaacatggttgggatatatatccaatctcttcttttatatatatagattcttttaagtgtgctactattagcccatctttgacacgtttcactttaggtatacaggccaatcctgatagtagatggtatttggcccaccaagatctgctcttttcttcatgattaatcacttttctttaactttcacatgtaatgtgatttaagttttgtcagttcgtttctttttgggatgagaattctaacacttctacatgaaacataaaaatggtgggttgggtatcgtagtattgtatgatgtggtggatgagtagtgagcatggactcttttgaggacacctataagattttgtaccaaattaaattataacactatattagttaagaaagtaatggtttttatttaattcactaaatgggtaggacatgatatcagttttagtatctgtaggtaggactgtctttagtaatgaaaagccttgtaaatctggtctttcaaagttttggtcggtgttaatggatagcattagctttagattagcccacatataataaaaatttaaataaatgactgtgttgagtaatctctcaaccaagttctataactcgttgactgttttgcatgatattcgaaaaataaatacatttttgtcttaagagagcttgttgtcatacctttttgacattagctgtaagtgttagaaaaattaataataaacccaagatctatttgtatataacatagaacacaataataatatataataattaggtatgcgtacctgattgatccatagcaattatctctgtttgatccaca

SEQ ID NO: 379504 - DNA, 2747 bp, Cannabis indica
tcacctcgtcacatcccttcattcgaagcaatattgcgaggtgatcgtctcgctatgtgtaatgcgaggctgttgtgtgttattacatttattctgctcgagtggatgaatattcccttcttgtctatttacttgtgtatatttcgagtcgtacatatgtctcgtcaatatcagtttaatagttactatcattgtctcgcttaagactacacaatcaacgagtttgaatattatctattaaacttttatttaattgtaacgagttatttaatctgcatttaatgatataacattactatatcatcagtattgattcatattccttctctaggacatgtgtcagcttctggagtataactgaattttgggtataacacatttatattccctacacgccaaatagcccttgaataaaatactcgttaccccataaaatatttttccaaacaaatgagcctcgttttgattttttttttatctcggtgaaggatcttttcctgaagtacaaccccttttacacttgaccagccaaaaaagaaggaacattataaatatgagaagcttgcttagaaaggagagattgactaaaaaaatgaaggtcctagaattccatgccaccatcttccttatgcaagcaaagcttatcccaagtacacaatgcatatttttcttcaaatcattccctcaccaccaaaagtgagcagacatacgatgaatatttttcataaatgctttaggaagcttgaacaggttcatagtaaacataggattggactcaatgacagccttaataagaacctcacgatccaccatagagaaaagttttgatttctaactattaagtttttttttcaaatcctatcttgaatagaatcaaataaactcgccttactatgacccacaaaataagggaggcctaaatacttctcatgaaaatctaccccttcacacctaataaatccaccagtctttcttgatcagagcacaacacgtttgggctaaaacaaacaacaaaacttatcaaaatttaccaactgaccggaggctaccctataccaactcaacagcagtttgaacctcacacaacaaacaccagaagctttgagaaagaacaaactgccatcaataaataagaggtgagaaataataggaccacttctaccataaggaaagccaagaaataagttatttttacaatctcctctcaccaaacttgagagaccctccgcacaaagtaaaaaagacaagggacatgggatcaccttgtcgaagttctctctcaagaataatagaaccaacaacctccccattcaataacactgaatactccattgaacagatacaatcaatgattttcttgacccactcaccgtcaactcgatcataggatttggacaaatcaagttttaggacaaaaaaagcatcacctctcttttttttttcaaagcattaatgcattcaaatccaataagtgcactgttagtaataagaaaactaggaaggaaagcactttggtcttcaaaaataatatgacctggaacctcacaaatgcgattagtcatggtcttagtaataatcttataaaagatattataaagactaatggggcaaaaatcaacaattctaatgggattatcaattttatgaatcaaataaataagagttttgttaatacctctcaaactagaatctccatttaggaaagccaaagcagcagcaatgatgtctcgaccaattgttgcccaattcttctaataaaacaagtagtaaaaccatcccccagactcttagatgggtccatttgatacaacgcttctttaatattgtcattaaagaattcttgggtcaagcgttggtttagctccgcaaaaatcttcattagaaccgaatcaataactttggcaaatgcttcgtctgaggggcggtccgacataaagaaagtgcaaaaataatgctaaaaactgccccaatctccgattgacctgtaacctctatacccgtctcatcctgaagctttaggattttgtttttagctcgacgatcataggtacacttgcagaaataagcaacattattatcccccagtttgagccaatcattcatggcctgagacgccgaaaaattctcttctttctcatgtaaaacatcaagctcttttttaattttttggagctcttcacaactaacattatcaagatatgcatccacaatgaagaactttttaagtttcttattaatggcagttcaatgtctcttgtgaatctccttattccaattattcaatttttcccccacatcgatcacattcaattggacattttgaagaggatttagatctttggcagtctaatttttaccaattatatacatatttttacctcattagcccaagcaattttataatgaagacgagagcaaaacatcttgttaattctgcccagagtcacaacacaattagagagtaaagctggcggttcaaacctttataagtaagatgagacacatgagaagcaaggaaaaagttaagctaagataagttacacataaatctatcacgccgctcgtaaaaaaaaagtagaatcagaatatttaatacaccaactgataaatattattttacattcttagtgttgaaagcttttctcaacattgatacatagtatcaagaacaagtaacacaaagagaaaggagaaagaaagagaagaaagaaagaaaattgaaaggcatgaaaatgttactcttcatt

SEQ ID NO: 379505 - DNA, 2124 bp, Cannabis indica
tccatgctcacataatccgtacgtttatcgttcgagatcacgccgtttctctggagttcttggctcgctctgctctctcgccctttcgtgatttgcactactctcgccttgttttttctgagatttcgagaccgtctgttcttcactataatgttatgatcagggcctactccacgagtgactcgcccgaggatggattttatatgtataaagatatgagaaggcgagacccattgtcatcgtcctttgctctgaagtcttgtattagaatttcgtcgatttcgggtgggatacagatacacgcgaggattttgagagatgggcttcaattagatagccttttgctaacaactttgatggacttgtattctagctctgggaaattttgtgaagcgcttaaattgttcgatgaaatgcctcacagagatacagttgcttggaatgtattgatttcttgctatttgcgtaacaaacggacccgggatggtttggctttgtttgatgctatgcagagtgaagaatatggctgtgatccggatgaggttacttgtttgcttatgctccaagcctgcgccaacttgaatgcactggagtttggtgaacgtgtgcatgcatacatagaagaacatggttacgatcgtactaatttgaggaattcccttgtatcaatgtattcaaaatgtggatgtctggaaaaggcttatgaagttttcaagggaatacgtaataaaaacgtggtttcatggagtgccatgatttcaggttttgcagtaaatggatatggaaaagaagctatagatgcatttgaagagatgctgaggatgcgtgttccacctgatcctcagacctttactggtgttctatctgcttgtagtcattgcgggtttgttgatgaaggaatgatgttttttgatcaaatgagcaaagagtttgggatatcacctaacatccgtcactatggctgcttggttgatctattaggccgtgctggtctgcttgataaggcatatgagattataatgtcaatggatattaagccggatccagaaatatggaggaccttacttggggcttgtagaattcatggccatgttaaccttggcgaacgagttgttggccatctgattgaacttaaggctgaagaagctggagattatgttctgttattgaatatttattcttcagctgaaaagtgggacaaggtagcagaagtgaggaagtttctgaaagataaagcaatacaaacaacaccaggatgtagcacaattgaagtgaaagggaagttacatgaatttgtagccgacgatgtcttgcatccacaaaagggcaaaatctatgatatgctggatgagatcaacagtcagctgaagattgctggttatgcagttgagatatcgtccgaattgcataatctgggagaaaaagaaaaacaatgtgccctcacttatcacagtgaaaaattagccattgcttttgggattctctcaactccacctggaacaacgattagggtggcaaaaaatctacgaacttgtgttgattgccacaactttgcaaagattctctcaggcgtttataacagagaggtgattatcagagaccgcacacggtttcaccattttcgagacgggcaatgctcttgcaatgactattggtaggaacattcaaagctagaagataacactgaaaagtggaaacgctgtatccaaatgaatttgagtagctgaattcagttggttggctctctaaatcaaggccaagaagacgttaagtatgcacatcataacagagtagtcatcaacaattactttttggtacttgatagcattctactgttgggtttcagatgagaggagttaattctttgaaggtgattccaatctgcatcctggtctaaatcttaaagagtaatgactagtttaactgtacccatcaaagaatttctctacaatcaaggtcgctgatttggtattgggttctacagttttggtgatttatttggttgaatccagccctgctaaccaaatgtttgaaatgagatataatatttgatttgtttagagagattttttttgggaaatttgattttctatacttagaaaatcaaaaaatttgatttctaaa

SEQ ID NO: 379506 - DNA, 1968 bp, Cannabis indica
gtttttcctaagcaatgcaacacactagttgacggtccccttttctcctatatcagctacaaaccttgaatacaacagacaaaaaaaaaggtatgattttgaaaatgtaccatataaaatcaacactttaataccccatttgtaatatacaatcatacatgacagataatatcaaaggcacagcttttcaattttaactttaaatggcaataatgttccataaacagatagaattgttgtcaattttatgaccagtctgaaaaaaacttaggcaatgtcactaaaggcaaagacaccctaaaggagcaaatataagtggtcaatccaatgaaagaaagatcaccttatataaaatcttactattttagcataacttataacaaataatcagctcacgtagttatcaacacaataccaaaaaggaaaacaagaaaaacaccaattggccaagattgaattgaaacttcttcttttgtcaaatctattacagttgaattgaagtgacaatggaaaccatggcattgatattttaactattaaacccaatcccattatgaaaaaagaacataagagtgaaattcctgaaattaaaacaccaatttttgactctggctccattactggatagaattaagtcattgtgagccaactcagaggactaataaatgtctggtttacaagaactgcctaatttttacgcttgaaaagttaagtcaacaagaccaacctaccaccttattcaaacaagtaatatcaaagagaaacccagatgcccaacaacaaaaataaactcaaatataacactgaaaagtgaaaaaaagccataaggaacaaaattaagccaaacccagaaagcaaacaaggtaaaagaacatttccatggtatgaagctggtcaatgcgtcaacgctaagatgcccattaatcaaaaaaatcaaaaaagaaaaccaccccactttgaaaaaacaaagtcattcattgtgtattgtgtttgtacctccaaagcagagaaggttggcttacctcctcaagtgcgagttgaccaaaggaaaatcaagaaaaagattataaatttgaattaaaggaaggaaagaaggtggcaagagtttaacaaacaagagaaagaagaaagatattgtgattgtgggcttgtggctcatgcatctaccaccaccttttgtttttatttttaaagttttgttttttatttatttattttggtgaagatggagggtggaggtggtggtagactcagactggtggtaaggtattattattattattattattatggctttagagagagagagagaaagagagacagagtctagagagagaagaaggttgaacaacacaagagaaaagaaaggcattaagattaggcaaacaaggcaacgtatgattacttagtttctttgttgtgattgtgaatagagtactttagttttttagtaggttgaaatttcagccttggtaattaacactttttagcaaggtaggtaatgtgtttcacaaaacatttattagtttaccattttaccccttttctatttatatatatttattatgattgaacaataattatttaatcaacttgctttgtttagttcgagataactaaaactcaaataaattctcttttgaacaaccaaaaaaaaaatacagagttttgacccccttacaatgggagaaaaggtcaacctataattattttattttcctagtaagaaaaatatatattttattttcataatgattttttttttagctcaactaaacacggttaagggtattttaaatagagtattataaatatattgcatatgtatttttttatcttaatttcataaaattaaataggtagtgtatccattcaaaaaaaataggtagtgtataatgtggtctaaatttaacatatatcaaaaattgtgttaaatttatcacaaaatataatataagccaaatttta

SEQ ID NO: 379507 - DNA, 6451 bp, Cannabis indica
ccatgaaatgcgggactctctggatcccactgaaacaagtgtgcaaacagaattaccaagagaacctagttcttatatgctaccttcatctcctcagcccattacattggtcactgaggaaatattgaatcaaccagtcgctgtagaggaatttatttggcttgactcacaaattgatgtagcgtcaactgagccacttcttgatcaaaccattgattgcatacctggattaaaaaagaggcactgtcataagctggaagactctggttttcacacggtttgtttcataagatgttacgtgaaaggcaaccaaattttatcttagcattatttgaaagaaggattgactttgtattggtcattcttatttctatgtagctgcggaaattgctacaccattttcctcgaacatatgctgatttaagaaatgctcagcttggaattgaagatggacaatacttgatttttatgggaaaaatcttatcttcaaggtaacaaggtttccaaatgttctagccattcatgatcttacgaagaattggtaatccatgattcatctctcaaaagcagttggtaattttgtactctgtgcgtttggtggtgtcgtcatcgttgtaatatattattgttattatttcttatgaagaaagttcgattcctgattttttgatctttgtaagcatctgggtatagttgtgctttggtttttcagatattttaggtcttttttcctttgacatttggatgaggtgagattgtgatgaaacaatttggatgagtcaagtttcttacttaaatatattgcatactttaaagtaaattattgatgctataatattgattgcaatatctttttctcctgcagaggaatcagagctagttcttctttttcatttcttgaggttatcgtgagttgtgagattggaaacagtgactcaaattttgagaatgaaactgatggtagagatcttaaagaaaacaagacaatatatttgcatttgaagaaattctttcgcggtacacgtttcacatttaagccttttcttcaaagtcttcaggggaagcataaggaaggggaaatcgtgtgtgttagtggccaagtgagtttcacaggtttctccaaagcttgatttctttcttactcttctgttgttaggtgcaaagtaacattcagtgactcatatcaaattgggggttttcttttatacagacttgccttttgcagattataaatatagctttacctttgtatgagttgacaattatttgtagattacaaatataactttacctttctaaaagttctcatttctataacttacaatatcactgcactttatcagcttcgagaaagtttattgttcctagatgtggcctgtgggtggtagtgattgttcacttaggctagtacatgggcagttgataattcatgacctatttgactgcttaaaatgacacactttgattgctcaaatatttactttggcaattgtggttatgttgatttttttttctttttcgccaattgtggttatgtagatgttgaattgtataactctcgcacttaaaagagttccttgttatcaaactcttataacttgttaatatttctttttgcgagtgtttagtttttatttgtttgtgtaaatttcatttgagatttgtgagtgaaatgttgcttctttattttaggtgaggactatgagtaccaaaaatcattatgagatgagagaatataatattgacgtgcttgaagatgacaaagattcttcatttcatgcgaaaggaaggccatatcccatttacccttcaaaaggaggcttaaaacctaattttttgagagacattattgcaaggtttgtacctttctttagcttaaatgtaaaagcatagcaaggccactcatattggcagcatcttcatccaagagtcccatgtttttgcccttgtataaaatatgccgcagttgaccttttttctttagtcatttcccttttgtctcactttattttttctaattggcaccagtcatggtatcaaatatgggtaacttctataaatgcatttaagttgaagggccatcattgcataaatgatggctgaatcctgtcctgcaaggtgggatgtaaaaatgaagttgttaatgtcattttagatgtgtggctcaaatttgtttactactgtcaagaattgtagcattaacttactaagaatgatttgatctcctcattgtttcagtatgatttgatcacctacctttgaaggtctgcactcttcaacagtgtcggctgactatttgactgtattttttcatatagtttatttatttctggataaggtcccaatttatttgacactaaataagtacatgattaaagacattttaggattatttggtcagtagtattagtggcctactttcttgttttatgagttctaccctctttgttgttttggtccacttaagaaatgactagttggtaatttgttgcacttattttctgtaattttttaaatttctttctgccgcccacctctttcgtgacagtgctttacaagctttgccagcaaatgttgatcccattcccagaagcattgttgaagactttggactgccaagtctttatgctgtaagttcatttcttttggaaatttagctttttcatctatatgttctgttaatttgactatatatgtcatctcaagaaattttactttccttctttttcttctcctttatttataagaaaatgtttttcagttctggaatcatttgaacacatgtgagccaacggaatttttctatcatttcaatttatttattgtactctttttttttgagtggttatcttcattcttttccattcctccatactcataaacatacattttctgcacagagagaggaagagggagagagagagagagttggaagcttattttgcagcactatattttttttccagaaaaatttacctaaattgtgagtaatgtttagcagcttacattgaacaaggaaaatctatgtgtgggtgtatgcagccatgtgatcataaattcatgttatgtgcatccgttggtgtctttctatgcaccttgataattctcttcattgcactaatcctttgtaaatgctgtaggcatataatgggattcaccagccaaaggatatcaatgaggctaatttggctcggaggaggcttatatttgatgagttcttctacttgcaggtgatcttagtttaccttaaatggtgtttggtatcgttgcagaatctatttcactaactttgacacatatttgacagtttgattttgagaaatgttttggtttagatctgaaatcgatggaatttataatgttgacatgcagtcttgttgtgcaattataaataatctcttgatcgaaaacagttgttaatctcttcagctaggccgcttgttccaaatgcttgaaggccttggtacgcaattcgagaaagagggattacttgataagtataggaaaccagaaagcagtgctgcttatatgcaggaatggtctagtctcaccaaaaagttggtgaaatctcttccatactctcttacttctagtcagcttagagctgtttccgaaattatttgggatcttaaacaaacagtgcccatgaatcggcttttgcaggtttgaattttacatgactgtagttcatttgcatgtggtgtacctgctgaattcaatttctactaggatcaaataatactttgaggcttacgtaaatgatgtctgctgtcttattttgttatgatttcccttcattatatgtgttttcaaaaaataatcttactgctgtagtactgacattaatttggtcgcatatattatgtaacttttatgctggccttggattttttgcttcttacatatgaatgggcaagaacaatattttaagattaagttcatgggaacatggtaaataacttcccacagaagtttattagacaaattttttaaagagaggttcacactgccctttattttcatgtctctattttcagttcagttgattttcaagagtcttatgcttctgcttctattttagctttatttctgttggtctaggtcaagttgttgctcaacatgggtaatggatggattggtcttgaattttctagtcatttgttattcataggtttgggattgttcagatttaatgattggggtgggatcttatttcctaaaatagataaatgaaagttccactcggttccactatgctttctcagacgagggatacgatcattggtggaaaaaaatgttggtaataaattaatctcttaagttatttgaaaaaatgttgtcgatagtcccttgggacaggacttttgcagtgctcccttctcccttctttgtagatttactatgccttggtaataaattaacattgttttcttcatagttatagaatggatgatatgggagaaagttatttgttgacaatacgctacatgtgtttttttagggtgatgttggttgtgggaagactatagtagcctttttggcctgcatggaagttattggctccggatatcaggttggctctatgaatctgatctctttaagtgcttgtaaagtatatggcttgccatttatttatcagatacattttcctttttactagttacgtttctgtgttctctaattgtggtcttgttttttcttgctaattttgcaggcagctttcatggttccgactgagttgcttgcaatccaacattacgagcactttaataatttgcttgaaagcttagaagaagttgagtgcaaaccttctgtagctttactaacagggtcaacaccattaaaacaatcacgaatgattcgtaaggcatgtattattatcttgatttttcttctttatttaaaattttgagtgtcttacaactgaaatcatgaattcaggatctccaaacccggagacatatcaatggtcattggaacccacagtttaatttctgaaagcgtggagttctctgcactccggattgctgtggtagatgagcaacatcgttttggtgtgatccagcgaggaaggttcaacagcaaggtgatctgtttaatatgattagtatggtggttgtgtttttgcaggattatgtcgtgtttttgcatgattatttctttggtggttcttcttgctgttaatatctaaggggtccatcctgttcatttccagtgatgttcatatttgtatgttcattgtcttcctatggtcaagaaatcctcactatgtgatttgtgtgttgtaacataggaatctttctgaaattgaacatggtgatggtgctaattaaattattatatatatatatatttaaatatttatagcactaatttaattgttcaagagaaagtaaatggaggcaatttcaacattttgtggctcttctaataatctaacagttcttgtcgtatgtgatcttttcttccatggattgtctggccattaggatatgctccattgttgtttaactattttgttgcaaaagagcttctgcttcacactttcgcataatttgtggtggtcacattagcatcatcgtcatgattgatattattgtttcatgctttatctgtgttctttttttgttttgtcagttttaattttcaattgccattccattcaaaaacgaaaaatatcaattgccattaagacctgtaggctatatcaattgccatacaaaaaataccaaaaacaaaataactgtggaaaataaataaaataaaatcaatttctcatgtttagtatggaaagaatgggaaaaaaattgattcaataaaatttttcatatcgaacatgaaaaattgtcacttctgacttccccccttacattttccttacttttttcttttaaaactaaaatctaacttccaaacatagccgtattttatattgattacattgaaacccttctgggcttgaactgctcctttggatgcatttgaagagctgctccggtgaaatcttaaaattgtgttatacaagggttagtgaagaagaaataagtcttccacatatgtcgtttggttagagcagaacatacaaggagaattttggaagctgtggaataaagttctatattttgagtagttgtaggagttctcattgtaaaatactaaggtagtgtttggtttacatgaatgagtgtaggaatggaattgttattcctaaagaaagatcattcaagtgtttggtttgtttattgtcattggaaaactcattccataggaattataattcatgtaaactaaggaattacttttcctaaataaaattacttgaaaagccattccataccaacttaaaattatttttccttatctacccttctcataaataaatgataaaggttataattatatggataacatttttttattttaaaatatatatctacaacatttaatatta

SEQ ID NO: 379508 - DNA, 1207 bp, Cannabis indica
tatatattgatattgatgatgatgcaaataatcaaatcatcatgcgacagtttatatttaaatactaatgaatacaataattatgctaaatatatcaagggatttttttttcatattcgaaacgcgtattttaatcacatttaatattagatacatgttttttttaacaaatactttgatgtcatgagaacttatatgaatatcgtaaaactagcacgaaccttaatcgtagttcttgcgattgtaaatatcaatctcgaaagtatgtataagagggctaagttttgcaaaaaggaacttgtttcagcataaaaaaacgtgtgacataatattcatatgcgagactactcacactatgtgactttacaaactaaaatgaagaaaatatcacttttatcaacttatatttttacattacttaaagttattttttttcttttatataaccttaaattttgaagaaaatgaccataaaatttccctaaaaaattagaatcctatttttacctaacctaaactttcgtctacatatatacttcccgtttttgctccatagttactgttttctgtttttacttacaataattttcgtttgtatatatttcaaaaatttattacatatcattttttttagtttgacgtaatttttttatttattattttagtttgacgtaatttcaatacacctaatccaagttattcaagcatgttaatgttttaaggatatttaagtacacttttctaaaagtttaataatttgagttactgacgtcttctcaacttgataactcagaatagtaaacaatataataaacagtagtatgaaatagaaacttgttttcacatatcaattttcaatatttttagctatcaatatatatatatagatagggtaattatatggtaggtcctagtatttttaccctatagtatagggaagaaaattcaaccaataagaattgaaagaaaagagaatgtataaagtgtttgtttacatagatgtaggagattattacaatattttgtattattatcttattcttattttacatttatgataaaatactttgttttatgtattatgaaatttttatgtgttatgaaatataattacttgggcttcattgaccactttctaagcaaactagcttaactgatatctttttagtaaatgaaagcttaattgatgttaataactaatatacta

SEQ ID NO: 379509 - DNA, 2977 bp, Cannabis indica
aaaataaaatagaactataaacattggtcaagcataattatcaacaccttcaactttagagtccacatactatgacactagattttcttaatttggggccctacaaagacaaactacaagtttgtgagaaatgatttgagaaatagaggcaagaaaaatgattgaaagagtaagcataaagagaaacatgtaaaagcttaaactaaagtcttaaccttttggggagcaagagaaggaaaacactctattttaggttaaaaacaatactcatttcatattctaaaatggtactcaagctaactgctttcttttctcaaaaatatgttttttttttcctaataaatcacaataacatagcatttatccatattttttaattagttaaaaacatgtttcgaggagaaactatacattattttttaattaaaatcaaaagagaagaaaacacaacgttttgaccctaactaacttagtaacttgtaatgaagtccttcaactacagttaaaaaaatgtttcaaaatattagaagttgtttgactgtatttttcaatttttagtttttagaattatatttttaaaaataagaatagaaaaaattttttttttttcattttaaaaatttaatggcatttgaatcatgttttttaaaagctacatttaaattttttttactaaaaaaaaattaatattgtacaatataccatgacatgaactcagtccaacctcgaactaggacctagattcgaccctaggatccaaactcggacttggcctcgagacccggactaggaccccaagactaggacatggacccggacccgaacccacaccgggacccgaacccaaattgagacttggacccggacccagacccagacgcgaccccaaaacccagacccaagttctggatctggctccaagactattttcgggtccgagtctgagtccgggtcccggatgcgcgtctacgttggggtctgggttcacttcaagtttgggtctaggtcctgattcgtggtcgggttagtgtcccagtctgagtccagggtctagtactagagttgggcttgggtcgggtccggggtcaggtttgggtccgtgtttaaggtcgggttcgggtccgtggtcggggttccgagtctagagattcgaacccaaacccaagtatgtgagagaaaatgtaacgacgaatatgtttgacaaaaaaaaaattatttcttttgaaaatagaaaacaacattttgatgttcgatgtttttttaattttttataagtcagttttcaaaaaactgcttataaaaagtttaaccaaacaccccattaattgtttggttgagcttcatttgaaccgatgaaagaagaaagttgaaattttttatttttatgacatcttttgtttttgtgtttaaaaaaaataatattttgtttcaccttgagcaaacttggagggaaaggagaaattgcatggtacattattgctacaattctgttttttttagcaatcataaggacactttttctttacccttaacttcattatatatattgcctctttcagatactttcttataatatacagcataataatgagatggtttgatctagaaaaggctaattttaagcctttgctgcaattcaaagatacatgacacattattacttcaatttctattttttttttttttggtaaccataaggacactttttctttacccttaaatatatttacatatattgtctctttcgtgtactttatgataatatacagcataataatgaaaagggattgtttaaccggaaaaaaaaatgaaaagggagtgatctagaaaagggtaattttaagcctttgcttctatgaaagttgtgcaattcaaagatgactttctaaggtcataaagctcaaggtggcttcatccctttggtcttagatgagaaaaagataagaactttggcctaacttataacaaggctgacttaagcctccatagtaacaagaaaaaaaagattaatacaaaaatgaaaatcatatttaaccaaccaatgtttgtctgcctaatcacttagcctaggcccccatacatgattggcgacatcagctacagatgcaagattctaattggccagtattttcatagatttatacatgtatgcaggcacactaaactctgcctaataaaatctttattttgaggatttgtgcttgaaagtctttgacgcgctaattgttgtaggtcaccaaccattatcatgttatcacatatttttctttagaaagttgctaaaaaatattattagtgtttagtactctgtcatatcgttattgatgtaattaagtatatagtctcgtatagtttaaaataataattttttaaaatatatcgctagttaatcgtaaggcgccacctatagttagtgataagcaccactggttaccaatatcaatactcttttctttattaatataaggttgagtatcaatgtaatgctctatttatttaggcgtactacaataagttttaaattactgtgctaatctttactaattaaaaattttagtagaaaatatgtttaattaaaactttataacgaaatattaactttactaaatatgttttacaaaagtttacgagttttgagatctcgatctatttacaaaatgacccaaaagacaataattcaaaatttcatttattgactaatacagatgagctcatgttgtcctgaagaaccaaaatctctaggtcaattgctttgatatgtacaatcttcatatagcttcagactcatctctagttcagtctcaaccaatacctacaaatgcaagcgtatttgtgagtcgacagactcaaaaagaaaagcataaaatatattaaaaaatattgatgacttgcatctaggcgcccatacatgttgggaatattttaccaggatctagatttactaataagtatgttgaattaacatcctaaatatgaa

SEQ ID NO: 379510 - DNA, 1976 bp, Cannabis indica
atacaatcagagtaaccacgccaccaaacatagaaatccatcatagaaagagctaactttgccaacgagcgagaaacactattggcaatcctagaataatacaagaaagagatagtagaaaaattattacagaaagcaagtatatctctagcaaaacagcttaggtaagagtgttcaacaatatgattatgaattgaattaataacacttacaatctaattccataaccacaaaattgtaccccaggcggactgctagcttcattcctggaaaaatacttaaagcttcaacaacagcaggataaaagcaacaataccaagttcaagttccaaaagccatgaccatccccatattatctttgataatcgcacattcccctatcttgaccttctcaatactaagactagcatcacaattaattttgaccatacatgtcgccagtttgcaccacttaacagcatagttagactgaatacttctcatgtcaatagacttatcttgatttagcattattgaaccgattcaagaaatccatacaccaatcaaacaaaaaagtatcattcaattcaaacttctcatttacccatttatttattttttataccaaattccccaaaggcaaactatgagcttttcaaacatacctataggtatgtaatccatacaagaaagaaaaaattcatagatattccaacaataaaaaacaggtacctagaggttgtggataatcatctagcgaacagtcttgagcttatcacagtcccaaagagcgtggtacgatgactcatgacccaaaaagcagcatggacaggccattgctataggaatcccatgatggctcatgctatcataactaggaagccaattgtgagagaccttctaaataaaattcttaacttttggagggagatgtaatttccaaatttactgcacaaaccagagttacccttggaactagatctttgtccaagaccaaggatacgaatagaattccaattaccacttttaactgagtaaaggctcgtactttcaaaatgccacaccaaacaatcaaacaaaggaatgtgatcacgaggaatggcaaggagagctagaacataattgatcattccacctcccattcagcaacaaggaatatacagttgcataaacatgcaagtaacataaagaagaggccttattatcatccaagcttgggatccatcgatcattataaactgaaacttgagagccatcacccaccttttaaaaaagcctccttaccccataaaatagatcttcaaataaaagaagtttttttagaagcatcaatacttaacaagattgtattgggatagtaaatagctttcataagtctagcaatcagagaactaggagtaatatacagcctagcagcctgtttggctaatagagactgaatgaaaatggaaaaatccgtaaacccataccattgacagacttgtgccaacacaatttctcccaagtacaccaatgaaacttcttcttactctctttgccatcccaccagaaaagtgcacacaatctatgaatctcttggatcaatgtcataggaagtctgaatagattcatagaataagtagggatagattgaataacatacttgataagaaccttccttcctgctgaagaaaaagatcgaaccttccaatcacagagcttattccgaacctgatcaagaagagattgaaaaatacattttttactttggcctgcataacaagaaagtccaaggtacttctcacgacaagcaaccacactcacacccaaaatagtatccaagttgtaatgaccatataattagacatgaaaattaataattaattagtatgctatggtaaattataagttaacatgtgcaaattagaaataagacctattattaaaaaaattgactgttacaaaaattataaacactacgcaagtatacgcaatcaagtagtaaactcacacaggtg

SEQ ID NO: 379511 - DNA, 4470 bp, Cannabis indica
tctctctctctctctcaccaccccaaacttgatcccaaacatcatcaaaaacaccaccccaaactagatcccaaactatatcccaaacaccaatccaaaccagaaaaagattaagccaaacaccatcaaaaaaaccactccaaactaggaggaaaataacccacacatcaaaaataaaagatccaaattttttggaagatgaatatgctctagaaacacaagatcaagatttagtggatgagggcacaacagatcctagcacgtggcgaggatatcgataaattaattatgcaatcaagcttaccaaggtgatgatggtggaggatatgtagaggcagatgatctggtaagcttggttagtgatgatgaagatggagtagtgcttaaaaagaaacatattgaatttgatccacaattcaagcctgtagatatcaagtttgaattgggaatagaattccccactattgagaacttaagagatactttgaatgagtttttcatcaagactgacagagagtacaagtatattcataatacatgttaagaattagagttgtatgtaaggagaaaggttgtaaatggttaatttatgctcggaggatgagggatgattggactacaatgcgaatgaacaaaattgtggatgagcacaattgtaaaattatatgggagaacaagttggtagatgctaattaggttgaaaaagaattgttggagaagttcaaattgaatcccaacatgccacttggtgatttcaagaaagcgaattcagacaataagtattctatactctcctcttggattttttatcgagataagaataaagctatggccaagatccaagggattgtgaaagatcaacatgccattctacataattaatgtacacatatagtacaacttaatcttggcaacacaactttgatcaaaaccaattttgtgaatgagaaaaggattttcgaaagggtttatatatgctttgaagcatgtaaagttggtttcaagttttgtagacccatcaatgggttagatgggtgcttcttgaaaggatattgtagaggtataatgcttgtaactattggaattgatgcaaatagcaacatgtttcctcttgcatatgctgtagctgaaaaagaaaagaccaactgttggacttggtttgtggaactattgaaataaaatctagatgtggaagacacaacattcttcactttcattttagacaaacaaaagggactagaaatggctttagagacattatatgaaggatttgaaattcgattttgtgttaggcatctttacgcaaacttcaagaaggagttttcaggattattgttgaagcaacaattatgcttttgtgctagagaaactacaatggaggaattcaagagaaaaatgaatgagttgaaggagactaatgaagcacctttcaattggctgtccaaaaaatcatcaacataatggaccaaatctcactttaggacttttgttcagtgtgatatgtttctgaataatctttgtgagagtttcaactcaaatatcttggataaaagggacaaagcaatcataactctattagagtatgtttgttattggttaatggatagaatgtgaaagtaaagagaaagcgtgagtaagtggaagtatgaagtggcgaagaggatctatgatatcctagagaagaataggaggttggaaataaaatgtcagtgtacaaagtcagttggataattactccaagtgaccgtgtcttctggccaggtggtatcaataaatttagagaccaaaatatgctcttgcagatcctatgacgtcatatgtcttccatgtggtcatgtattatcttgcatattgtattccaatcttaatcaatatgattttgttgctgcatgttatacgaaggaagtcatcatagttatttatgcaggggcaattgtccccatgcctggtccagaatattggccaaataaaggccaaaatctaatccttccaccgccataaattattttacttggcatgaaatcaaggagaagagaagtggatgaacctccacctggtgcaactgaaatgaggatattcacgcagtctaataattattgtaattaaaaaagaccaggtcatacaaggaccacttgtaagaaaaaagtacaactgcaagtatactcaattctttgtaatagttagtttaataaatatttatagtatacacacttttgaaactattacttatttatggtatgcatgaactttcccaaaagaaaaagatgggtcgtcctctcaaccagaatcccgatcctcaaactgtttagaggaacattaggagaagcaagtagaaggcaagagaaacaagttcaagtcaaccaaccctagatacatagcagctactggacttttctttcattttgattttgaattcagtggctattttttttatgtaaaaagaccttagaagtggaaatattaaggccatattttataatgaacctttacttgcaaatatttcataatgagctttgatgtaatagtagttgttttgagatggacaatgcatgagaagtagattgagcaaactgtaaagtttgatccaatattttgtaataaactttgatgtaatattagttgttattaatacagaattaaagtatcattttgaatccaatttttaatctttatttaaatttacattgcaaccattatgactatatgggaattctaacagattaagccaactgcaaagtttaatatatattgcagactttggtggcatattttgtaataacctttgatgttttagtggcttttattaatgcacaattaaattatcattttgatccaatttgtaatctttatttaagttttattgtagccattatgtccatatggggtttgacacattgagccacaatgtttgttgcagtatattggttaaaaatactatgtcaatccactattttgtgatggaaccagaagagagattcaccctccagaaatgtttactgaggtggacttgattgcattttcactggcggcagtacaacaaattgaaattgaagatccaaaatctatgaagaggcaatttcaggtgaaaacaagtcaaaatggctccagaccatggatgaggaaattggttcactctggaagaacaagacttggatagttgtaccgaagctggagaacaaataaattgtggagtgaaatagattcccaatgtgaaagagggaatcgataagaatgaaccagtacggttcaaaaccaagatagtggctaaggaatttattcaggtggaaggaattgactacactaaaatcttctccctgtggtaaagtacaagacaataagattaatgttgtctttggcagctcaaacagactttgaagttgaataacttgatgttaggactacttttttgaatcgactctttgatgaagagatctacatgaagcaaccacctaggtttttggtggaagagaaaggagttgagctagtttacaaccttaacaggtccttatatagtttgaaacagtccccaagataatagaataaaatatttaatacttataagcaacaaatcaggttcaaatgatgcacatatgatcactatttgtatttcaagaatctggaacaatctacaaatgtgttcttattactctatgtggatgacatgctcattatgagaaaagacaaatttgtgatcaaaagtatcaaagccaagctcaagagagaatttgagatgaaggagcttggactagttcaaaagatccttggttgaagtttcaaggaacaggaaggaagggacaatcaacttaaagtagttcagatacatcaagaaagtcattcaaaagtttaacatggaacatgcaaagagtacatctgtttcgttaagcgtacattttattttgttgaaggaacagtgtccgaatagtgcgaaagagaaagagaaaatgaaagatgtaccctatgcagtggttttaggatgcttaatgtatgtgatggtgagaactaagctagacatagctcatgctctaagcatcctaagctggttcatgtccaatctgggaattgaacattggaaagcccttaaatagttattaagatacttaaaggacatttgggattatggtctgacctatgaacaagcaaaaggagaactgaagttaaaaaggtttgtggatgttgaatatgcctcaaatagagatacaagaaaattaaccactttgtacgtttcatgacaaaccagaactataaatgttggaaggccctattatagtctgtggttacccttttcaccaggaaagcaaaatttatggctactacagaagtatttgaggaagcgttatggctttgggaaattctgtttgaattgaaacaaataaaatgtggatgattgtgtactcgaatagtcaatcatctatccatctttgcaagaatctagtttatcatgaaaaagagtaaacatatagacataagact

SEQ ID NO: 379512 - DNA, 3598 bp, Cannabis indica
gatgtcctttggaagcaaaagaaatgcacagcagctggtgttttatactcggcccgaactatactgcaacagtggtgtgctgctcatgctcaaaagtcgggccctttgctggtttttggttcgtcttctggtgtggagcagtggcagaaaccggtatcacactacattaaagtaaatgtagacggtgctatctttgcggcgaagcataaatatggttttggttgtgtggctcgggacgcaaatgggaggttgattgaggggatttctggcagccgattgggaaatgtaggccctgaaattgctgagttgatcggagtgaaagaagcgttgagttggatcaagcgcaacgggtggactgaggtggagattgagtcggatgcgcttgtggtggtgcaggctgttcttggctcagtttcgatgccatctcaatttggttacttggttcaagattgtcgctctttactttcttctcttaatagtgtgtctttaaactttgttaaacggtctacaaatagggctgctcattgtgttgctcgagcgtcttgtttaagcccagatcgtatttttaatgagcataacgctccttctgaacttttggctattgttgatgcggaatgttacaaaataaaataaatcaacttttgttcaaaaaaaaaaaaaaaccctagtttaacaccataagtaatgtaggctaacttttatttttgttctaaaaatacccctcccgttttaaaaactcatttctctttttgtttcatctctttttccctctctctcgtatccgcccaaactcatgtcccctcccattctggcaataccactgtcacccaccgactctaaactcctcccttagaacactgatgtgttgcccatggagacagggtagcctcgacttccatagaaccaccgagatcgagacccataaccgaagaaaccatcaagattttttttgttattgttgtttagatatttgatatgtgatttctctgtattttttggtaaaaaatcaagtttttgtgaaatttatgatttcttgattctttgtgttttttttttttcatatatggtatgatggggcacaaaagaagtacgatagtagtgtaatttagaaattagggatgaatgttcaataggatacgattgtaatgcctactaacttaggtgcaatacattttttaattattgttgttgaaattgcttttagttgagagtcacaaactcaattgctactaaatcttataaacaacttgaatttatcatcactcaccaaaataaataactgaatttataattatttgcaaaatataagtaccactttattactgtaaagttcttagttggtatatttagtaaatatggcaaaattaattatgtatgttattttcgaactagagttgagatattggtttggtgtatgtttttaaaatcagaatattctatctatgctaataaatattagtatttttatataagtatacaatatcttgatatttatatttatgaaaattttatttatttaatttgaatcttttaatctgatttattgactaaaaagtcgtgtatatcttgcagattaaatgagaatattgtatccttatttattttagaaaattttgttcaaaactgttcaaattcgtttgaatctgtccaatggattatcagtctatttgaaaaggtcctgactttttttttttttttgaaatatttttcacttattacttgattattttcttacttataaagcatgacctatagtgtatttattgagtatatattcttacttatgttttagtttgatacgaaaagaataaagtgatttattatgaaaatatactaaatctatataaggtatttctttgtatttgatatatattattctatttatgatatgatctgcattacttttccagttaggattggtggtgtctaaagagaattcatgggatgattttgatttgatagagtctagatttacaatattgactagacagatcacgatttcatttgcatagattagaatttcatctacacacattccatacatgtttggacaaaattttgtcattttatgaatttttctaaggaaactatataatgtcttctctttgtattcagaacttttgagctcaattttatttgttatttatccttataaatatcatctaaaccaacatcaaaaggttaaactattctactccttaaatttttatattttttaaaagaaagtatttttttaaaaggatagttgttctgctattccttggtgagtttgtgtgtccttgtgattacttttatgtaaagtaaatttcaaagtgaagaatgtgaagaacaaaattcgagagaaggttcatcatttaagtctcgcattgggaggaagcaagcgctgctatcttcggaaaaatatttttacaagtcttacatcgagagaaagcaagcaccgctatcttcgaaagaaaatctctataagtctagcttacatcaggagaaagtaagcattcttcaagtaatttgaagagagttcaaaccttagtgtcttaaggatatttgttcagtaaataggagtacatcaaaacttgcggcaaaattattagagggagtttgagttttgtttaagtcaattactttatacttgttgaaatttgactaatgaatcttatttctgggcatgacccgtggacttgtaaatattttcaaaaattgctaatagcatgtataaaatatcgcgtgtctttttaatttttgtacttttattctaatttataaatttagcttctaatacagttgatttcaattttgttcaaataattatataacagttatgcattaattaaattatttattaatttcatttagtaatcataaaataaaatttcaactaccatagtacattttatagtatggtcttattatcaagtggacaactatgcataacattccttttctttgatggaaaaaacctctttattatagaaaagggatcgagctttgagaattcatggttttatatataaatattccatcttacttcttacatgaaatttatgtgtttctcaaaattgtttaatttacctactcataactatattaatgaaggttttttttttctattttttatttttaagaatggcctcataacacaccatcttcaaataaaaagctcaaaaaaattgtaacccccataatcaaatgttcaaggcttaattaaaagaaaaaaaaaaattagtataattatagggcatcttaaagaatcaacactactttatttgttttagaatttaatagttcaatttcaataaaatatatttacatatataaaatgaaagtaataacatgcaccttaggaaatttaaaatctaaaggaaaattttataaaacatacttatattaaagcaaaaaaataacaacttaaattaaaatatcgctatcaatatcaggaaggtgttcgcaaaatgagatgggtgtgttgttagaggatatcatagctttattgtctaaatttctgagagcagttttgtctcatatgtcccgcaaagataacactgtggcccatggtttggctaaacatgcccttagactagacaatgagttatgctggtat

SEQ ID NO: 379513 - DNA, 7019 bp, Cannabis indica
tttttttttttttgtcatatataactttttgattacctttattattcagacacttatattatctatttactgactctgcgtcgttgactaaaaacgagattaatacattggatttgagttattatacagattggattagattaaaaatatgaaattcacgaatagtacaaatcagatgcactagaagaaaaatatgaattaaattggatgaacacttataataatgatgcgaccaattttggaaaatatattattttattcaattgaagagaatcaatcgtaacaacaaatcatatgatttgtttatattattttctcattaacaaatcttcaatattttttataggtatacatcatgtgatttattgatatatatgactgattatctttaattaaataaaatactttcctaaatttgttagtgaaaaatttagagtgttgaacatcaaattggactattttagaccataataaagacgaatacataaataatatcaaaatttgttgttctcactccaaattctaagtccttcatattctaaaggtacatattaccaaaaaatattgaaattaggggtatgtgtaaaagtaattttataattactaagtagggtaattgttagggtagtaattacataatttagcaattacactatattttaaaatatgtttgaatatggagtgataattacatataaattcttaatatcatgtttcataaaatagttaataattacctaaaaaaataatattttttagtagttaatattaaaataaaataaaaaattagtaattacatagtataattacactaattttcatggggactgaaagaattagagagtgtaattgaaacccctcaattaccttaaattacacattacactgtaatcacgtgatcatacaaatatgtcaaattgcgtaattacattttattatagataaatctaattacaacatgactttccaaacacgccataaaagaagtaatcttaaaccgataaccatgaaaacgtaaaagattatctcttaaaccttttaccttatcccaacaattatttaaaaagatgtcttaccaaactttttatacaatcattgtaaaactatttttaagcatcaaatttgcttttttttcgtctaaaatatcttattttcatagtactatcgttaggcatcgttttgaattaaaagaaaaattttcataatactttattatgtattgttaaatatcatttttttaccttaataatcaaatttcatgggatgaatcaattttaatcataagtatagaacttattaagtttcagatttaagcaataaaataaaagtgcaaacaaaagtaaaataaaattcatccacaagtaatcaaatctatgaattgacgtcttaaagtgacaaaatttctttagttttagctttaaattggattccaattattaaaacattaaaaaacataataaatgtcacaatttcttccatgggtacgtacttcaatggtgggcaccatagattatatttgcttcgatggtgtttacacgaggggtggacaagtttgtattttcagtataatctaaggctgacaaattttatggatatggccaaggcttcatgggatatggatacatatacttattattttggtgagcatgaaccccaatgcagttatcaaattatcttttgtgtgggaatacattccattccacctgcaattgggatatttatttataactcgagcgtccacaaaagaagcttatttattttttgaagaacacaaaagaagcttttgtcaagtaaaaatgattgtcatttggccttaactcttgaaaaaacaaggcttcctaactgaaattgtaaacaaatcctgcagtaaaataaggggggaaaattaaatagacgccatgttcgggatagcatattctactctttcttctatttgcacccacaacaaacatgttaaagtaacaactcttctccttccttaaacaaggttacttttctatgcctcctcgtcgttctccaccaaaatcctcttgcacgcttcatagcacatgaatgaaatcccagcagcgggaactaacttcatacagctaggaccaagtcctctgtacaaacctgggatcccttcatgttcgaggatacaagcaagcgcgtgaatcacattcttatatacctgccttccactcaaggctccaacctgcatatgcttgcgggcaacctcaagagggaaagttgcagtacttgaaatagcaccagccgctgatccaatgagaagagtttcgatgttgccaatcttatcttgcttgagaaaatttcgatatgctttgcgcaacgagtcatatgcaaagtaattagtggctgcatatgggattactccaataagactaggggcaagacctctgtagagttctgcaggtccctcttcccgtaaaattttcaagaacgcatcaaaaagaccgtcatagacacctctctgccaaatcgatggtaatatagaggtgaaaacaatgtgcccatcaaatgcagaaattcaaggtcttggtattttgaaagtacctgtattgttagacgagtcttaagcaactctagaggatatgtacacaacgttgagctaactccagcacaggccccagcaattagtgagggagggaaagggtgtttggcttgttcgcctggttttggtgacaaatgcttattaactgtgtcgtaagcaaagagctgcagagataggaatatttaaatacaaaacagaaagtttgccattccagggggaaaaataaacatatatatatatataaatatatctcagcacctaaggccatgagcatagattggatagagcatataaaacaatgtaaaacacaacctatcatttagaactatgaacatcatcattataagagatttgatttctgaaaacatatctgtacccaatggaaccttttagtctgactcaataaaggacgtaaaagtagttgtagttccaaggatatgaaccctttatcaaatcctttcaaatttcaccattaccagaaaagaaacagttgcttcagaaataactaaagggcaattgaactttaccacatgcactgcagtgctccaaatagatatttttaaatcaagaatgagaatatcgataaacctctgtatatcatatgaaaatacaaaggacttcactaatcagtacttaattacaaaacgttaagttggattagaagagaaagaagctatagttttcggtcttacgttcaacgaaaaggacgttcttccttctgatggatacacacttgtagtagttgcaacaattaagtcagtaaaaacattatgtaaagaattcagtatcaaaaatacatagacagccaaacaaaagagggaaaaaaaaaaaacattgagaaataacgaaagacaaaaagaaacgaatatggctggatagcaaatctaaacactaaaagttggatacctatataaaccagtaaatcaattaacaacaaacaaacattcatcataaggagcgaaatgaagcaataatttgagtctaacgagctattaaatccgtacctctatggctttgctcggtgcaacacgaatcacgttgacaaaattccctctaaacaatcccttccacccatcagtcttcataatatcattgaagacttcagttgtggaatggccactagtcccaaccatcaaatgagtccttatagtctctaatggcgcaacggcagtccgagaaatagccccagctatggcaccacttattaacctccgtagagatggattagaaacctttaatcttcaattttaagaccattgttctttattattctgcttcttcgtcaagcccactcccctcctgaacaccgaatctccgaactaccctccacgtacttcatgtacatgtcgttgtacggaagcttcatgccgccgcccacccccaccgtcgtcacgggggttcggagggttcggcgaaacaccaaaacccattcccacctgaccaacgctggcgaataagccaccggggtgataatacccctcttgggaattccattgagaagaccctaaaccgctgacggagtaaaacccatctttcgtctcatcaaatagttgaactcctctcttacccattaatctcaaaaaataaaaagacacaaactttcggacacgctctcttttatttgcttcttcttcttctagggttctaccggaaaagccaaaacattccttctataattcaattattattatttattattattattattacaggcgtttgagaggccaataatcaattatgaccaaatgggtatggtaagaggagagcccaattcagaatagcagaagatgataatgggttttgagatgaggaatatgacagaggagggcggctaaagcgaggcagaaacaagcaacagtggaggcgaacttagaaagagagaaagaaaggggtgagttaggtgaatctctctctctctctctctctttctctctctttttctcttgtctctggtcactgttgatgtccgcatatgtgtttaaagaataataatattatatagttgcttagttcggtttggttggcttcgctgtgtgttggtgtcttctcgtttgttggtaaggtaggtttagcttcgggtagcgacgagtgtgtaccaaacaaacctaaacccatcttcttttagattctttattttagaaacgttgtagattgaactctctattttattaaataataaaataaatcttatattttttaaaatagtataaataagattttaagtttagcttttaaatttttttttaatataactaatttgaagacaacttttaacacgaatagatacagaaaatttaaccagttttgtcataatatctctaagtcggattaccattaagttttattttgataagaaattagttcaggaccctatttgtataattttgaaaaatatggggtctactttgtcatctaataaaacagaaggtcaaatcaataacttttacaaaacacatagtctaaaatagtatttaccctattataattgaataaaatttacctatatatatttatataaagaaaaaattttgagtgatcacgtgacatgccataattttttcaaaataattttacaatttttcgagagtttcaaattttcactaaaggaaaaatcatattatcttttatcagtttatttaaaaccctctcattgtttaaaaatagtttaggtattgtctatgtagtctataaatagactcaatattacttttaatttatttttacgggatgattaattaatgtcttactagttataatctattttagttcaagtaatatattatttatatggatgcagatggtccatagactgtcagggtatattgtgttccaagaataggaactagtgaggtaaatttaggagtagaagcaataagagttgatgccaaggggactttgaatgcttactgataagcgtcttccaaactaataaagctttgtgccttagccatgaactcggaaaacgtctcgacccttcttctttgcatctctccccataagagggagccaactgcaagtccaatttgcagggccacaagtttcatgtcgtctgtcactttagttttagttgctgcctctatcattcgctgaatgaaactctttaggctttctctcgcctgttgtttgatgttggtgatggatctcatctccatgtcgtagtcgcgggcagctataaattattttcgaaaggtagactgcaaatccttccaggagtggattgatttgggagccagccttttccaccaatcctcagcagacttagtgagggtgaaggagaaaacacaaacacttgacgtcttcactcactctggcaacatgcatcattttgttatacttggctaagtgagtctttgaatctgtgcgctcatcatgcggcctgatttggggcatcttgaagttctccaggagcagagccttcatgatccttctaatacacaattttgggtcctcatcctcagagtcaatgagggcctcactttgctttcagactaattttgccagtacaacaatttgttcttccaatcttttggtatcactatccgggagatctcttccgaggactttgtcgttaagatggtttttgaggtcgttaccacatggccttgcctttttacttttgttttttcatacttggcatccaaacaccttctaagattcaccgcggaccaactgtcatcagaattttgtcccctagtcctaccgtccttgttgacagagtcactagggtggtttttccatcccttgagctttggtactttcataccagtcccttttgacgtagtagggcctttctgggtaaaaggatgcccgagcccggaggcatcaatggtcttccacgcctgagaaggcccgttggctggattcatgccttttcgaggaggtacgggagcattaaggttttggttgtcgcctacttttgcctttcccttgtcctgagcaatagcagagattctagcattagtagggttttccctattgtttcctccaacatatttcactgagggatcatcgtctgaatctctttcatctaggtctctgaacttacttcaaaggcgggccatcatcctttccattttttgagaaaatttctcttggtgggctagtttttactgagtcttgaacaactccttggacattcgaatcacctcagagtcctgctcataatagtagtcgtccttgtagtacccatctttaacgtactctccatcgccctcctcctcctcatcctcaacatctcagtcttcatcaacattgtcatgttgtttgtcgaggttggcctctcgattgtttgggttggatgtatcccattttctcgcattgctcagctaggcgaggcttggagataaaggttttacatcctccataacaacatggatgtcaccgtcttgaggagtctccttagttaccatttttcgtgtaaaaaccatggtagcagtaacactttaggtttacgtctttcttcagctct

SEQ ID NO: 379514 - DNA, 1499 bp, Cannabis indica
aaatactttgcttaaaattgatgcaactttttaccttctaaaacaaaagtatgatcctttttaagctgctgtgacaagaaagtatgaatatttcccataacctggcaaaagtttgatccttttagtagtgttaaagaactcttaacatttaatttccaggtgactggagtgtgtagttaattttcttttaatggtcactgatttgcatatttgcatcgacacaggtgatcagcggcattaacatgggtaacaactgcggttatcacatgtgcgtaatatttcatcaactgttcattatacagtaaagagtatagtatggaataatgttgctgaattagttgaagcggagtggaagcaatcctagtgtaggctttcccaagtatatgattgtatagcttgtctggaaaacctgttcacttcctaacgagtgaattttcactcttaaaagactacagattagccttaagaaagacactgcagagaaattttaactgattgactatcagtaattttgaactaatgcttaattggggatgtatttattctcaaaattgatcttgcttgagttagctaaacacacttgatgacgtgttcattttgtatttgttctagctatttacccaacctattccaccaatgtgttcttactgaatttgttggcttgtttgtggttttaaactaatagctgggtttcttctgttaactgtactgtagtgtttactctggtacagtcggtggagctcgggaagctttctttaatggtgtaccttctatctctgtatcttatgattggtaggtgcaaatatgtgaatggttatatagatgtcgtcactgagaatttattcttgcatcagattttttcattgaaattcaatatttcacacgtttttgacaaaccttctttgttagtcttgatttttattactaacaaaaatagaggaaacaatgaaacttgtatttggatacttgacttgcagggttgcaggtaaaagccataatgatgacttcacactctctgctaaggcttgtttaccaatcatcgatgcaattttggtggaggtcaagaaccatacatttccaaaaaaatcatttttgaatatagatctgcctacagatgtcgctaatcataaagtaagtaggaagtatcaatagagtaaaaacttgtcaagagcatgcaaaaaggctttaaacttagaactatgtttgtaagacatgtttttggcactcaaaaccatagtctattttgaggcttacaactcaaaatgtgataggattgctaagcctcttatacgactacactagaaggagggctggacaaacggggtaggggtaacttgtgtctttttggtgggtgagttggctgtgagtttgttggagggaagctttattgaattcatataagagagaccatagtctcatacaaaaaaaaagagagaactctccatgatgcctcagggctttcggcttatgattggcctcatgagagagagagagagaga

SEQ ID NO: 379515 - DNA, 4134 bp, Cannabis indica
attttcttctgtctctctctctctcttttgaaatagtcatcaataatttactttttttatacatatttttaataagttgtatttaattttagtggtgcatgtgacgcaaatggttaaggatattctacaaaaactattttattaaatcatgtgagattggatacttaatactaataacaatacttaaatactgatacttttaagtatagaactattaatcttttccattattttgttaatttggaaatattataatactatatatatttttgtatacatacacaaacattttccccctctatatatctcaaaaataactgatttacaattaaaatatagatacacattctatatatatatgtatattgatatgcttatacaaagattttttttaaaaaaataaatatcactatatgtatattgatatgcttaattaaatatcactatatgtatatacaaatatcatcttaagtaaaagtattgcatatagatttacattataatatttaaatttttgtatataaatttgtattagctaattataattattttataatatgtgtaccaattataatacatttatatatatattttaaaattcatatatgttgactgaaaaaataatcaactgactcggagtcaaataatcactagttaatcaccaataaggagttaggaatataataaataaatataaagaacacaaagatttatagagattcaacccccttttgtatgagtaatgacacactcctcttttagttgtattgattgtgagataataccaggaaaatcattataagaaagacaaagtaaagtctatctacaactctcaaagtatttacagagaatatctttcaataaagtgcgcttagatgtgtgagtacgatttcaggtctaggtcccttccccttgtgaattcattcactatttttaaagaaaaggttgttacattttgctccttaaaaagagtgaataaagaaataaatattcctatattcttattgcagttatgatttgttgaagctcctttattctcaaataaatatgctggatctgagtttgtaggatttagtttgagatatttgcgaaagcttgttaaagaagaaatcaagactcgtgtagccttgtctgatactatcgacaatgttgaatctagccgatatattggtcacccggccagatttctctcgagacttgtcttctttgtaggtttacttatggaatcgcccttgcaatcctatcttctcaggttgacaagtagatgaccaagctagatgcttcatggaacatctaaagcttatggatgttagctctatatgagatcttccaggaacacttctgccaagatgatccttatcatgtttgagagctagtttggattatgccatgtgtaagtgccaagttagatgtgcaaactttgggatagtatttgttcccaagtctccgtacaaatatctatctggatggggagttttgatagttgtacatgtgttggcatgcatgtgagctccacgtggttagtactctgatgattgtaccatgcagaagtgaacagtcacacttcagtcttttcaactgactattaaatgtcagttctcttactatggcagttttaaagcacatgggagattgtgctaacggatgcactctcccataatttccccttattttttctctttctacctccccatgcatggacttaaacaatctcctagacaatggaataagacatttgatgcttttatgcctaagaagggttttgctaagagctactatcacacttttatgcacttccatggaagtaatatgaaggatgtcatctacttagtagagaaagatctaaggtgaacctggtcaaagaaatgcctaagtctgagtttgaaatgaaggatttaggtaatgccactaaaatgctagggttcactattgtaagagacaaaggcaaagggatcctaaagttgtgccatatgaagattatatacagaaaataattaagaagtttcagatgactagtcctaagaagaatagtcagcattttacaagtcaatacaagatctctaaagctaagtgccctaagacaaagaaagatatggaagagatgagtaaagtaccctattctaatgcggttggtccataatgtacttaatggtaattagtagacttgagattgcctatgctataagtgtgctaaacaagtatatggaaaacctttaaaaaattacatcagcttactatgaaatggatttcaggtacctaataggaactacaaatattagcttggtgttcaaaaatttaaataccgaactttggtagaagaattttattactcaaactatgttggtgatagggacacaagaatgtccacctctacctattatttcctaattggaggaaattgtataagttggaaagttcagttgcaaccaatgatttcccttttaactactgaggaagaataattctacaacaaaagccatcaaagaggttgtttggattaagggtgtcccaaagaattaagcccacttaagagtgttcctataatctattcagacagctagagttgtatccatctttacaagaatcctgtctttcatgatagaaccgaacatgttaagatcaaatacatttatcagagacaaagtgactcaaggagaggtcgcagtggaaaaggttcccactaaacataaccctgttgatattggaactaaagtggtaaccctagctatgttcaagcattgaatgagcttgttagggattgacaaagaaaactaaccctagtggttaatgaagctaagaccctcagagtacattaaactttcatcgctcataaagatatttaagtagaatttgttatgtaaatctccttataagctcaaatttaattacaatagttaaaattacaagttttttcgaaggcctataacagttccgacactcaatacaagactcaaaataatttcggttacaacatctctatagtaacaagtaaaaaatcctaatagattatagctcagcaaattctaactgctttttctactcctacaaactatatattcctagatttataagaagatcgatacatgtggccttcattcccttcgtgagctgtagagtgaaagagtagagagagcagctcctcaagctcatttgtaatcacattcagagaaagaaaaagaaagagagttagaaagagactgaaaaagaaaaatacagagagaaaaacacaaattatcaaccaaggaatttttggttcaaaatctgaacaaaatacttgtaatacctgttgttcatagtgaagaatcaatctactctgaggcgagcttgacagagacgtagcccatcgttctggggtgaactctgatatcaatttctgtgtttaaatctctttctatttgttttctttaaccctaatctaatctttttgtgttaccaagtgtgtgattgtgtgtgttgtgatttctgttttcgtgtgtgtacgatttgtgagatcgtgtttgtgctcgaaaccctagggttttctcttggaggagacgaagaaggttcgagattgtgtatcgagttgatatgagttatttaacaaattagggttttgttgttctgcttgttgagctgggccaagccttttgtacttgtggtgttttttttaacattttcaagttgtggatgcataaatgaaaaagttgcaaaaatatcataatttgtttttaagtattaattgtgtacttataagtgttaggagcgattctagcatatatgtacatataaaaaaaaaaattaagagacactttaaaatgtcaagcgctactagaggtggatactattattaatgcattttaatatctaatcctacacaatttaattttaataaataatataaccactaaccaattacacaatgtaatacaagaaaatatgttgggcacgccaaatatagcccatatatatatattcgagaaaattacactctataccttttttatattgtcctcttttattcttaccatcttttttaaagtctatcatttttacctctttttttaaacattgtaccaattttgtccctgtcacttcaagatactctccatgtgactctcttatgttagggtattttgggtacaatacatataaaaa

SEQ ID NO: 379516 - DNA, 1659 bp, Cannabis indica
gttaaaccaagaaatgccgttagataggcccttttaatatataaagatatatatctccatctattttaatatttaaaataatttttcagctaaatatgtaaattataattatttaaaatatcttgtaaaattttaagaaatttaaaaagagtttaatatgctgaaattgcattcaaacagtatgttgtacacgtgactattttattttatgcgcgtgtaaaatagactgtttaaacattattttctatattgtaaattattccgaatttttcaaaattttgtaagatatcttaaatagctataacatatataaatataaaaaaaaattaggctaaattttttttctggatgctaaaataagtagaggatgcatgagtacatccatttttaagaagcgcattgtaggatcatccaaaaatatatataagatacatcttaagtacattgtttatgttcctaccgtgcagatattttattgtacgttcattattcatcaaagggtagagaaatgttaggaaatattgttaatgtgtggatttcatcaaataggattattacatgctaaagatagtttagaactatttatgaaaaggctaattatgtaaaacctcagttagtattgtgaggaatgtaaaaccacaaatattttgagccattggattgataaagagattcatttttttggtatcctaagactaatatatgtatatctaagggtagtcattttgatagaattggtaaagtgtaatttctttttctttttctttcaatgtaatagaataagaaggttaagtgatcataaataattatgggcttagttaggatttgtgtatttttaagaggtaaacttcactaattctgtagtgtgtctaaataattatcataaaataattaaataaaaggaatgtaacacgatatgggttcattcttgtactgtcatcatggtagttaattctgttattattttacagatatttctggtagttagtttgtttagttctaggggcactttagtctcttcttggtaattagttatttccttttgtagctcagtagagcaatatataaactctctgcttgtactctgatttaatcaattcaatccattttctctattctctcaaagattgatttcgtaacatggtatcaaagcagggaaaagaagcttcccctcgatcttgatctgttgttcgtcttcttttttgtgtcttcttctccagcgaagactgttctttcatcactgatgttctgttctgaagttctgttatgaacttcttctttttcttcttttcgattagggtttctgttcttgatctttcttcgtttcatccatggaaactgataaccaagctgaaagtgaagaaactaatgataagggaggatatgctactgtcgaggaaggagtaaatcctgtggtgcagaacaatcgtacacagcagaggagtcctcttgaaggtccctcaaatccttactacctgcatcatggggacaatccaggtaacattcttgtatctcaacctctaactggacaagagaattacatgtcttggagtcgtgccatgcaattggctatgtcagtcaacaaaaagattggactcttgcatggtacaattcctaaaccccttccctctaattctgtcatgtataatgcttggtata

SEQ ID NO: 379517 - DNA, 1948 bp, Cannabis indica
agttcttttagtaatttatcaaactaaaattatgatttagaaaaaattcagtataatttataaaatcaagatattttattgtgtttatgaaaggccatcttgatctccatttattccaacctcaaggtgctctttttgctgtgataacgaagtttattgggttttgagtttgacctctcacaacccaacccacaataatattggtgtattattgtattggcacaactataatatatagtagtttggtgtatactatgattttaaatagtgcatttattagaatgatgataccaaatatcaatgaatgaataagtggcacgaattagtcatggataagaaaagtactatagtgtgttaagaaaaataacaaaatattatagtttttttatttcttctatgataaatagatgtttttaaaatataaataaaaagtaaattaattaagttgagtgttgccttaatattattttttatcatgaattatttattgcacgtgtcctgtgcttgaggaaaacagagattttgaatgtgggccatagacaaccgtctaaccaatcaaaggttttcacaatattataggctttatttacccaaaaaggtggattgggcccattctcgtcatctggtctcccatagtatattatattgggccacgtgttcgttagcaaagatatatagttttggtattggcccattgcctcactttctttcatttttataaaaaaaaaattgttccaaattttaaatatatatatgtatatgcatatgtatcatatgtactagaccatatccaatgaatcaagatctgttgaaaaatagtattcataatccattaaaccagtctaatataaaaagataatttaattttaacacatcaagatagaaaatataagtcactacaaattaacacaaaataaatatatttaagtggcacgtttaataatagtgtcgtattaatatttactttaattgtagcatatcacaatcatctttcacaattaataataataatttttggttataattatgtttacacgataacactaattaattgccataattttcataatttgatttcttttaaaaaaaatcatatttgccttaattattagtatcgtgttgtatgacttgataattattagtatcgtgttgtatgacttgttaattattagtatcatgcttatattaaaatattcaataggtttaacatgtgttgtgccgacacaaatacaaattgccaaccctaatttttgtcatatgaaaatttatttcaactaaaatttactttaagtcttaattttaatctttttataactacacacattgtccaaaatgatatatatctattatatataaagtgtgcctatataaccgaattcttgatttatgagaaattcatgggtgactttttatttatattaaaaataaaatagtttttgaaaaattcatgagtcactttttatttatatataataaaataaataaaataaatcccattaaatccaaaaaaaaaaaaatacgattgggtttttgctgttgtacatctacgatttttctcttcttcttctcttcttctcttctagaattaccattttcctataaaaacactcattaaaagaaaaagttatattttagcacatacagtataattaagaagccataaaatttataatttcgtcttctgttaaataaaaataaaagcaacttaaagcattattataattatgttgctttgtacatgctgcgacaaaaaggaatgccaatcttattaatttctccatgttctagctattaatgcaaaccagaaaaagaaaaacatttactaaaacccaccaaaacttatcataattaaacctgaggcattagatgcaaaaaaaaaaaaaaaaaaaaaaaaacaaaatcagagagtacattacagcactgtttttgatcacgtgctcataaatta

SEQ ID NO: 379518 - DNA, 3869 bp, Cannabis indica
attattttagattttcaatttatgaaaaagtgggaaagtatttttcactaaatttaaaattaaatcccaaatgaagtgataaatttacttaaatatactttaaattgattaatgatagttttatttttacattatattaatatactttatatttaaccatatattcacacatttttcatttaaaataaaataaaagaaaaaatatatttaatagttttttctgggtaaatttcattaaataaaattattttttatgaaaagaatttgactaagctaaccaaactcactcaagcaattatcaaatatatcactttcagttgacacacaacatttacacattgatcattatgatgagctagattcaacttcactcaggaaatttatcaaacacaatgaaggcattaaaaaacaagtacatttgactcaaaaacagaggcccaaacaagagaccccaagacatgaaaaatagagtaccacctattccctacaccaattatatacaatacactcacatacattcatatttacacacatctttttatgtatacaatatgaatatgatcactttttttttccacattatagagagggcgtatgtatttttccattatatatttatgttagaataaattgatagaggaataaaaatccatgaccaacctgatttctttcagggatgagcttcgacaagggcgaaaaatcaagggcataagacaagcaagagatgaaatttgcttatctccaagtacaagagtggaaaaagtacacaaataaaacgcagagagaatcggaggagaaggagctcagagatgagagaactgggagggaagtttattttaacacagttttttaaaacttgtttaattcctaaaatcaattttctaaatgagagaattttcgcctctccttatgactcttaaattttgaacatcgtaaatttttttcataaactattaaaatggttagatttaaagatttttgtataattttagtaagaaaaatttaatatggatgaaaattcacggacataatttatcacatgtcaaagttggagagacatgatttgatagatattaaaatccggaaaagtacacgtacaatcagtgacatacccaaaatttaattggagggtgggcgtaaatttttttcatacataaaaatattccaaaataaataaataaatataaagcaaaacacaattaaatatttcaattcccaactaaaaaagtattaaatatcaagtactaaaaaaaacaatctaatgttcaaaatatataacatactcaatatcttaaaattttagcaaatatatcaatgtttgagctcatatatttagagttgtcatcgacgagttttcatgttttgaaacgatgaatgataagctcgttgtcaatagcattgaatacatcctttttgagatatactgtgaaaatatcattcaactattgatctcctattttgttgcgtatttgttgtgacaattaaaataataatttctttttttagttaagaagtaaatgaaatatttctttttcagcatgggcttaaatccacactggtccttaattgggtccgctagtgcttataatcaccggattagtaaaattgaaaaaaagtccttaaatacaacaatttcaatagttcatagagaatttttaacgagtaaaaaagttcaaaagcatgatttattacatgtttaagttgaagagacaaaaatcctaattaacttttctaaattaggtccaatcctttttttcatttttcaaggagcagcaaaccgaataaacgacgtgtcgtatttacggaaaacgacaaataaagtaaatcgtcgtttgtttgcaacgacatgaactttcgtaagctaaggcaacatgtcgttttcgtaacttttttgttcagattcaaggaaacttacacaaaacaaaacataacctgactgagcagaatccaagaatttcagttcattcatagaaccaccatagatctccaatccatgtaaatccaaatcttcagattctgtattttacattcgccacagacatggctcaaggtgatactcccgatgtgaagtttccgcttgaagaaccatactctcaagacctagattccatctctcaatggtgcgcctccatcaccgacgcttccgaaaaccacaattgcaacccctttgcctcaacctcattcccttgttctccggtggccctagttgatggcttcaatcccgtaagctgtgactccgattggttctcccgttccggctctgcatcagactccgactccgaccgcgacatcagctgttttgtcaccgatctcttcgagcgtggcagctcagagcaacgtgatggttatagcgatcgaaattcaggtttgtctttgaacgagtttgaaattgggggttgttctgtaggggttgactttgaattaggtgaacgttcaagcccacgaggggtcgattcgcttgtggaaggacttagagttgttcgattcgattctgagtcggattctgaagatggtaattttggggttttgggtttcaattcgttggacgataatgaaggcaggaataatggagtcaacgattgggatattcgaagtcctttaaatggcccttgtcaggaggatcaaaggtctctctatgaagagtttgattgggaagaagtggaggaaagagtcaatgagagagaaaatctaagcattgtgattgatgacgaatttgaagaagaggtacaaacaatggaggaatacgagcctgcagaacaggcagcaagaaacattgagtgggaaattctgttggcgatcaataatctagctatgaattcgagtttggaacgcaatgtagattctggtaccgaatcctatttctctgttcaggatgattacatttatgctgttggtggtgagtacgaaacccttttcgagcaattcattgaaagtgagactgctttgaaaggtagtcctccagctgcgaaaagtgttgtggagaatcttccttctgtcgagttaacaatggaggagttgcagaaaaatgatgtggtttgtgctgtttgcaaagataagattttagtggaggagaaggtgaagaggctaccatgttgccactactaccatggggattgcattgtgccctggttgggcattcgtaatacatgccctgtttgtaggtacgagttgccaacagatgatgcagattatgagctgaggaagagccaaagggctcgccgtgtctcgccaacagattcccaggtcacattcaatttcgagttatttgcttaaatgttttccatgtgtatatactcactccatgtatatagctcccgtaggtgaaaattgtgtatgaaccttgtcaaagagttttttggattgttgtaatagtgtatagtttttaatattggctgctacgtacaatccatgcaatgtcatttgaataatttgcttttgatgtcaaattgagttcttgcttataccagtgatcctttgtttgaatgaagagcaatagtttatcattcacttaagtaaattttctttcggtacttattatactagtcctaggataattaattcaaggatttactaaaagttattgaattaattttaaccctgttatggagttgtattgctgataagtcgttaagctgcattgtaactgtctatgatgaccgaatcatttgctctccctgactaattggacttttaaggtggcgtttggttggaggtaatgaaatagaatggaaataattttcattccattccttgcattttaaagtattagaatggcattctaatggaatgctctttccactattttggtggaatgactattctaattttaaaaaaaaaacgaaagaccattccaatgtaacaaaagaaaa

SEQ ID NO: 379519 - DNA, 5276 bp, Cannabis indica
agcttgcaagtgtatggttttactcaatcagcctttttttctatatgcttgatagtagttggaaacaattttggtagacgtccccacagtgtgtgtaggaaagatactcgttatattaccatgctaatctagaatggagagttggagtttttttttacataaagcactcatgttgatataaacagattaaaaccttttgtttgattgaaaaaatggaaggaaaaagtttatttcagtcccccttttttccttttatctctttccaaatccagctaagtggacgacctgtgaataaagtaagagaaagtaagaggaattctttgaatttgagaaatcatcaaacaactttgttgacaattatttgtttggtcagaagagacctccagctattcttttattggattagtgaacagtttcaatatttttatattcaaatatgaccagagaggacaaactcattacaataaaaaaaaaaaaatattgtgaattctgatatgtatcagatgtaattgagtgtgaaagtcaaattaattgaaagattcatgtttggttcggggaggattcgtggaagttttggaatggaaagatgatttactttcattaagtgtttaattagataatcgaaaacgtaagatgttgaagactgctcagtgtatgtgtacgaaaagtacttcatattttatgggtgtgtttagttttattctttgtacattgtacactttgtttatagatttcaacacggatgagtggcgcatgttgatccttacacatacgtttccatacatatcctttaatatacataatattttcatgttgatttggcaaaggcagctcaatgttttagtgtcttctgacattcttctaaatccttttaaacaggttcttttatatgatgaacctacggctgggcttgatcctatcgcatctactgttgttgaagatctcatccgatctgtacacatgaaaggcgaagatgcagttgggaagcctgggaatattgcatcatacgtggttgtcacccaccaacatagtaccattggaagagcggttgacaggttacgctttaaatttcaataatatctccttttcaccatgttgatttctcttacttgtatgcttaagtaaacagctagttcattatattattattataggttaatatttcttcacgagggtaagattgtttgggaagggatgactcatgaatttacaacgtcaacaaatccatttgtccaacaggtaacaaacaacaacaacaacctaagtctgtccttccattcgcatggctactaacatcattcgacgtgttgaacatttcgttactcaagactttgtgatgatgatttcaggcttctaatgttttttagttttcgcctttcgtcttttcagtttgcatctgggagcttggatggcccaattaagtactagccttggcaaattgagtctgcggtgctgttgttagtagtcatctacttggattcctaaatactgagaaattagcagtgagaacttgtatggagctagcccttttgcatactcaacaagaaattcgagtttaagcaattgagttcttgatgcttgatgagaagaaaaaaaaaaaagccacactttttgggtgccaactcgattcagaaagagcctgctgaatcgacattacttacacatataatttgttgtattcttaggccggttagatgattcaaccatttgatattgttagtgacatttaaaatgaactgttctttctactgtagttctataaatttataaaattccgccgattttattattttcatctaactatatcaatattttttgcaacaactttttaatattgtcaatgaaagacagttacatgaaaataaggctaaagggtaaaggaatggccaaacttttaactacagtacacaggtcaagagttctagacaactttatagaaaaagggggtaaagaaagaactccaataataattacaaagacttgttcataacattgatgtcaaattatatatatagctgcattttcacaatcagaaacagctttttgataaacatggaagaacaaattaggagagactatttgatcatcgcaagaaaactcaacttgttgtctagagaaaaagaaaaagtaggctgcaaaacttttcgtttcttctcaaacctttgtctggagaatgtagttccttgctcgagcagagcaaaagagcgtaaaaatcccaaagtagaagctaagagaagtacttaaaccaaaaatccacaaagaaatcatgccattagcgatcaggccgtcagcgttgtcgtcctcaaaggccttccccggaaccactggaaggccttcagagtcgcaccctccaccagaggactccacacacaagcctgggtttccagcaaatgcaccaggaaacctcaaatatgcttgcttcttgggaacaaaaccagaaaaagagttgtatgacagatttaaaagcgtcagatactgaaggctggaaatgtttcctgggatatgacctgacaaagaattatgggacaagtccaaggctcttaaactcttcatcttctccaaacttggaacatgtccattaagaaaattgtatgataaattcagatattctaaacctttcagtccaaataaaccagcaggaacttccccacgtagcatattaccagatatgtcaattccaaccagtgaagatagaaaataaatgaaccgtagttcactactaccagaaacaaagattgaaactttggtgcccaaatcacgccatgtgatcctttgttcctttggaattttactgatgtctcctctgttgttgaagtttaagctagtgttgaagtttccatctggtaggaaaccagagaatttgtttcctgacaaatccatcatttggattgcttcgaatgtgaacaaccagcttggtaaacttccattgaaattgttgtgagctagggagagatacctgagacttgtccatttggttatggcatcatttaacattccagacagatggtttgagctgaaatcgacaatctccagcgacttacagcctgccaaagttaatggaatttcaccagaaatcttgttgttgctaatgtccaagatcttcaagccgtccaacgcatcaagctccggttggatttcaccagaaagattattgtcattgagtttcaatgcaagaagctgaaaacaacccacaatgttcagtggaattgaacctgttaaggagttgtgtgacagatcaatcacttggagataagttaagtttccaattctagcaggaatctccccaacaagaagattgtgtgaaagaaacaatgcctgtaagcttttcagttctgttatctttaaaggtatttcacccgaaaagcggttgtgagacaggtcaagaaggagaagccctgatttatctgttgtcactgcaatcttgcttggaagaggacctgataaatcattgttgctcaagtccaatacaaaaagcttctctgaaaacacaagtctaggtggtatcttataagccaaatggttgaatgaaaggtttagaagggtcaaactcgttagtgaagccatacaagaaggtattccccctacaagtgcattgttagccacattcaagacactgagagactgaactgaagctgagaaacaaggcaaggtacccgaaaaccggttggagccaaggttgagaaaaactaatggctgatgaaaatcaggaagactaccagataaattattgttcccaaagtccagatgcttcaaagactccaagtgcaacaactcttcaggaatttcacctagaaaagagttagaatccagtgcaagtttctccaacttggttgagaaattaccaacccatctaggaacaatgcctcccaaatccttgttaccactcacaacgagctctgttaactggctaagcctcatgagtgtgttaggcagtataccatgaaaccgattgtgactaagattaagacttttaagattctgcatattaccaaaacacgaggggattgggcatgtaaaattgttttgagacaaaaccaactgttcaagaaaaggaagtttgcagaaattggggtgaatttggcctgacaagttcatgttcaccaagttaattgaaaccacatgaccagtctggttctcgcaagtgattccagtccagttgctacagttagacccaacccaactagacaaactccgactaggatcttgcacccatgacttgaacagtaaaagtgagcctttttcatctgagtcaatatcaacagactgagaaaccatggaagacagcaaaatcaccaatatgagtggcactacatgcaattttagagctttacaagtccaataagccaaaacccgtttctttcccattataaaaatctggataggagtaaaaggtttaagaggagtaaaaggtttaagaggagtaaaatggaatgaatggatggaagcttaaacctttcttcttcaagcaaaatcttggacaagtgtaagtttcaaccaaacaacaaacaacaagttaaggattcatacatatacagaaagaaagacttgcatatgaggaagaaatgaaaagggttagctggaacagtgagaaagaatgtacctttactctcaagtgtgagagaaaagagaactacataaattctctttctttggggttttagagtaaaaaagaataaacaataaatatcaattacatgatatgatttgatatatctatagctcattaaagtaaagtgagattggaggaatcaaaacctttctctctcttccctctttaacctttccttttttccttctctttaataactacaccagagagagaaagagtgagcaaatcatggaatagtatgtatatatggaacttcatccaatccatgtatgggctactacattccttttcctgcgcgtagtttcccgcttcttttgggctgacaaaagcctagagtttattgggccttactttgggctccaatgtttaagtagaaattcacggaataagttgaaaaataccattttttttgtatccattaattaaaaatactctcatattatattttattaaaatatacccacttttttaaataaatttccctatatactctcactctctacttaagtctagcatataatttacattaacctaaggagttaatggggacatcatctataaaagtgggtatatcttaaaggatataaagatggaggtaaaaattaaaacaaataaagtaaagtgggtataccatgtaattttctcaaattacaccatatatggaaaa

SEQ ID NO: 379520 - DNA, 1252 bp, Cannabis indica
aatgttaaaattacttacatgcacttgttgcatgtatttaatacgccaagtgttgttcttatggtggaacttttcgaaagtgtccacgacactaagaaagttctcctgtctcaagattttactaatatactattcaactcatctatttttggggcaatgatatttagacaatgtacttgcccaatgatgtggttaaggattgtttagatccccatcaacctggaatcttcatcttgctgtatttatttttttggttatgtttgatttttgcttgtaatttaaaagaattttttttcattagagttttagaattatctgttaaaggaaattaaatttttaattttttaatttgtacctgttgtgtagggtccttccagtaggcgatcacatctgatcacatcttctcatgcctctcccatttcagtaggcgatcacatctactcacatatgctcacacctctagtaacacccccaaaaagtagcgaagaggttcaatgcataacgaggagggtggcaaccttgaataggttcacttcaagatcaattgataagtgcgtcctatttttcaacatccttaatgaaaaagaaaaaacatttgtttgagatgaagaatgtgagactgcatttgtaaaactcaaggaacaccttggacaactacccctattagccaagccttcaaaaggaaaaaacttgtacctttacatgactgtgttggaacacactgtaagcatagagttagtcagattagaggtaaaatgacaacaacctatatacaacataagtaggaagttagtcgatgcggagacccgatacctagagatggagaagttggtgttaggatttatgtcctaaatacaagtatttgatggataatatattatagaataaatgaaataaaattataagataaatgaatacattaattatagaagtataactaataaatatctaaaaatttcttattcatatgaaattggtataatcttgtaatatcatacaagagaattaagattatacaatataaataagaaaagtcggtagtgtattatagtaagggatctttaatatggaattaccaattgtggtttactatatactatactctagtgtgtgtgattttaattctatatcacatatgtggatagacatgtagtaaatgtattgtgtataattgagctatacatgattggaccaatatgtaataacatcattcattaccgtgtcgtttaccatgaaagaattattcatatca

SEQ ID NO: 379521 - DNA, 1534 bp, Cannabis indica
taaaaaaaaattaaaaaagagtaagggatgatatttcataaatcagtgatttccgaccttgtagaaacaagagttatagtaacatactgtccaaatagaatacaatgtggttttctgttttctcaccttctaaacatgtaaaaaccaatataaatattaaattggtatgagtgtatatatataacatgggtaatcacaattataaacaagtaatatgatatgatgataagtgtgagcgggctttacttcttacaaggttgtcctcaaaaactgtacaactaaatatagaactgccagaagtaatgcaatttggtatgcatctctttgaaaactgtcatccctctgaaaaaactgtaagaacacccaatggattcatttcattaacaacaagtttggatttagaacgagcagaaaaatctagctgcaaaagtactcacctttgttggatcaccagaagggtctggataaatctccatattttggttttcttttgggaagcctctggacaagtttttaacaagatcagccaaatctttggcagcctcagttgtggcgaaaattcgacgagatgtccagaagtaggcctgagtgaaagaagatgaagatgataagtcccaagactcctcatgctcagtcacttggccactgatttggtttaaggtaaactttgagttgattcttatcactaactctcctccaacaccagcaatgaaagattttggctttccttttattgtccacttgatacttagtacactggttgttaacatgaccatttcttgtacactctacaaaacacaagaaacaataagcaactaactaactgaattcactcgggtcaagtttggagagtaggattggttttgatttaatataaatgaagaaaaacataaaaataatgaatgagttgataccagttgtaaatgataaatgataaattaaactggataaagttgtgactttttcttcttcttaccattgataaacatgaagatggagcattttcccaattttttcaatgagattaaattagttagattagattattggattacttcaatttatactctaatcaattaacaaagagattttttgaaggagaattactttatatattattttaatttttttttaaatttacgatttgggttgctccgatagtttctatgtgggtcgctatacgaattttggttgcgagttaggttgctgtgttagttattataagtgtttatatgtcgaatttcgtaaaaatgaaaaaaaaaaaaaacggttttgaagtataaaaataagaaaaaaaatcatttttttaatcaaataaataaaaaaaaataacaaagggattttagtataaaaatactccatgagctttatgtttacaaattccattgatagcaaagcaaatgtagtgatcagttgctttagttctataactataaagcaaatagccactaatctttattgtttatttctttctacaaaatttttttagtattttttttatctgatgtgtaaaatatttggaggtgtaggttcg

SEQ ID NO: 379522 - DNA, 3746 bp, Cannabis indica
tatttaggatgttaattcaaaatttcaaatacttgttagtgaatctagatcctggtaaaatattgctcataatataatgatatgccaagatcttgttcgtcactatgggaggaagatgtcaaaagctagtttcataatcaaattggatttgtaaaatgcttatgatacaatttaaatgagctttattgaagaaatgttgcatggattgcattttcttgagcaatctatacatctcattatgatatgcatccgttcacccagattttccctcatgattaatggatcacttcatggatattttgcaacaaagagggatgtatgaggaaaatcgggcagaagtcagacttcatttttcatgataaatgcaaagatttaaagataaatcacctcatttttgcaaatgatgagctacttttctgcaataaaagcatctactatctcttacaaggactcaagttattctcttaaacctatggtttgcagcttaattccatcaagttgaccatctattgcagtggaatgttaagcacagaggtgcagtgcatccttgatgcatcgggattttagagaggtgaagtacccttttcttatctgggtattccaatcagccctaatagaatctcatcaaaggaatccagcatattggtggataaaacgactcatagaataacaccatggagtaccaagcgcgtatcttttgcaggcagaactatacttgttaactcagttcttctcaccacatatacttattggagtcaaattatgctccttcctaaaaagatcataaaagaaattgagactatatgcaaagattttttatggaaggggcaacacatgatgacggaagcagggcaaatagcttgggaaaacatttgtcaagcgaaattagttggaggcattggctttaagagagtagccgaatggaataaagtggctatgttcaaatatgtatgggctattgcaactaaagaagaaaatctatgggtcaagtggatacatagtgtacatatcaaagaggcagattggtggagttactcagccccccaacaaggcagctggtactggaggaagatagttgcaatgaaaggtattcttctaataataatgaatccttcctattttattcagaacaaatacagaataacagagggatacaaacgactatgtcctatatctggccgagtaaagtggagtaaggaagtgtggggtagattaaataccccaaaacatagctttgtgatgtgcgttgctatctaaaatagattgaagacaaaggaaaggatgtatcaatttaaaattgcatctgatgcatcctttttgatgtgtaatatgggagacaaaacaagtgagcattaattctttgaatgcccattatctagtgattgtattaagcaggtaaaatatggatggggtggaagacctctgctaaccgattggctgatttggtacgacatattgaatggaaaaaagcaacaatatttcaaaagaaggttttctcggcagtcctaacagcattagtgtatcaaatatggagggctagaaatgaaagattttggcagcaatctcatgacaatccgacaaccattgtacagaaagtgaaaatttcctgtaaaaatagaattcatagtgtgtggcctacaaaagtttaaataggagatttagaatggtataatgcattataaatacagttaaacatagaaaaaaatcgtattagttaactttaggccttcttaaataggtgatgtttaagttgtaaatgttttattggagtaacgaaaaacactgctgatttcccaaaaaaaaaagaatgttaatatcactattttaaagggatatctttatctatttaaattaggatcttttttttaaaccctatactatgtaaagggtattagatcattctctcaaggctaggtcattccacaagcactaaagggtctctacaagtcttctctcatgctccatgaagcttcccacacgtgtgatacctctcttcctttaagtcttatatgccatcaaggcttcctagactcaaaacctctttttccttcattagttattcataggaacttatcagttcttgatctataacatattgttctcacaattataatgctgaaaagagctatagctagaaatcacaaggttttaacctatgatctccatggtattatctcaagagtgaatacaacaaaagggggattaccaactaaataaggggggtcaaacctctataaatctctgtttcacttttactatttataattcttatttacacgtggtgataatcaacaattaataaggctctgcagtcagttgaccaaattttaagtcaacatagataaatgtacaacctctttggcgactctttttgaaaatgatttgacaagaaaacataaggatgcaaggttcaggcgtctccaatgaaatggagtcaattagcttaacgttggtaggggtcctaatagggttggatacccagaacaggtaaaaagcttctctaataaagttattttcccacaacctttcaacttcttccttagagagcttcggaacgatctttgtcaaggagcctgcacttttgttgtacatgcttaaagttttctttgtcaatgttgaggacatgacaaatgaccttagggttgattctgatcatatccacatgtgaccaagaaaagatgtcctcatttttcttgaggcaagccctaagtgactcacttaaggcctctgcaaagtttattccaatcttgaaaacttttgttgggtctgctgttgtaagggtaatttctctaagttcctcggtcgaaccaactcccaagttaatatcctctaaacgaggatcaatgtcatccttgtcttggtcgtaccttcatgtagtcttgggtacagtctgcatcatctcattggtcataactttagaggtcttcagtgtctctccaaacatagcgggaggggtcttagtcgtccccctagctattggaacaactgaggaggccttctttgcgagcatcaatgaggtgttgtatcacttttgagcagctctttggttactgaagaggtgaccaatgtcggttgtgtcaggaattcgacagacagatggtagatcaacgagatggcttggaggtcatataatgttggccttctgatcaccatgttgtacggagacttggtggtgaccactatgaaagtcgccataatggtattctgcctcagggcagtgctgacagttagtggtagcttgatcacaaggagaaattccatccccactaaagccatacatgagttggtcgcatggctcaaggtcttttaaggacaaacccattcgctccagggtttggttgaaccagatgtttgatgatgttctatcttcaatcattactctagaaaccatcatgttggttattgggcctcaacaatgagaggatcgtgttgtgagcgtaccagacatggtctgagttgaattctccaaatgtgattggatcacactcaaagcgtagagattttagaggcctctccacaacctctaacatctttgatctttactcatcttgcaaagatctagcgtacctctgtcgtgctcttcttgaattaccggaaaaggtgtggacctccaactagcatatcaagctgacctgccactgcttcatgctgaagaggagcattgcctcctattggcacctctgatctcacataccgctggaagcagcatgtttttgttgaataaaaaattctatctcatcctgcaa

SEQ ID NO: 379523 - DNA, 2874 bp, Cannabis indica
ccactaattatttgacataacccacttcttacaatttaaattccaatattaaaagtggggacaagaacattaaggaatactttaaagacaagacaaagttgttagaagaagaaaataaaataaccaaccccagaaaaactggtagtaaaaaggtttttatgaagttttgacagtgacagaaagaaaggggacaagagttattttttttcccttactacttttatcttataaatataaatggccacttacatatatatatatatatatatgtatatgcttactaaattaacaaatcaaatgtaccaacaacacaacaaatttggggaaccttcaagggaaattccctatactttcatccaagcaatatttccataaagttttataatctcattaaagaatgaattgtactatcatttcatgacccatgagaattgagttgagaacaaatttgaaatcatcaacaataaattattagcttttttggggagtataataccaaaaataacaaaaatgaaatagaactagttagcttggcatacattttatttttggacctaaataggacactttatatggacatataccggtatgaaaattcacgtcacaataaataaattaatctaactaacacgttttccttgtacaattaatacatgtacacattttattatattattattacagaaatgttaaaaggtatttatagtatttagtatttttattaagtgtaatatattattattggtataatttaatatcgaattttacttgttttattttaataaatattataaaaaatagttaaccaattataagacaattttttattttggtacccagcaccactagtgccctcgtaacaatgctattattattattatttttattattattattattattattattgtgagttttagatttatccatatttacaaaaacaaaaaaatgtgtcacgtttatacgtcttctctaggagcatattatttttttttttttttttttttagaataagtttctctaggagcatatatttgttcgattttcgtatttataagccttctgatgacttggaataatattatttattaagttcttttttatcaatgaatatatacaaatttttgtgttatatgtggtcacatcaccaccatataatgcacatagctttctctctcttcttttatttttctttatttcttatttgcccctaataatttttgcccttttttttaaaatttttccatcttgaagaccttacttatagaagtaccaccagatagcagatacctgccataatttatatcagaatttatatcagaatgattacgatatatacatatatattataactgagatttccttgatactaagttattgacttgttgtacgactgtgcaccaatttaatgaatctgtatacaatataaatatgtatgattcaatagtgtgcctataaggctattattattatttgaactctttatatttgaagctataagagttctctaacaaattttataaaattttaatagagagccaaaattaattataattgcaaataccatgtttcatcctaaataattttttgaaatttcttcaaaatttacggttggttccctaactacaatattaatttaaaatttcgtataaattacaattttttctaattaagtgttaaaaataaaaaataaaaaatctcactagaaggtcgtttaattagaggttgcaacaaataatagacagtgtttggaagtccgtctataataactatgtaataattgcactatatcataaaatacaaaatcatgtatttagatataaaatagtaattaatatgaatttttattattattttattcgacaaaataaattaataattacacataaaaaaatagttacacatttaacagataactaaaaatacatttaacagaaaaaatataagtacgtaacagaaaactattattgggatctttgttattatacataactgctataaaatttgataaagctattcttttttgtttttctttttttttaattaaaaataatctggtgatatatccgttatacaaatttttcattcattctaattttattgaatacaataaaatgtgtatgagattattatatctatgggttgggaatcaagcatatcttttcttttttcttccctcaaaaagttaaaaatagattgattaacaaccaaacaaggtgggaaacaataacgtttatatctataaagaacgactttaatagctgtcttttccttcttacttttcccttaattggtttcattttatagcttaacactttttttttttttgaaaaacatgaaacttcgttaagataaatctgctattacagaggaattcaaaaatcgtagataagcatctatctaaatacaatctcttatactagtaacaaaagttgttagtgtgtggacaacactattcgtcgatcgcagaatagcactacaagaaccatcaccaacggcaactaataaaaaatatctaataaaatagattgaacactaaaattaatgtagaacttattaatccaaccaattgtcacagtataatcactattagtaatagaaatactaaaaccaaattgatgatcatgtgagtcaagcccagacgaatgataagtagctctgtcacattagcaaaaaactcacctaacactcctaatgaccacgccaaccaaactacccccgctgcatcccgtatcactcaatccgataaagcccctccctggaaccagatttgaagaaattaggctacttagtggcgaaactacttgtatctatggagtggccatggccccccctaactttttagaaaaaaatatacataatatataaattaaa

SEQ ID NO: 379524 - DNA, 3910 bp, Cannabis indica
gtccatactgcatcactgtattaaaatatgcactttccagccaagtcgcacactttcggtaccaaatttagtcgttgacattcactatcttatggatattttcacacgggcaatttttgaagctctttagttggagttcatcaggtaaggtacagaaattcggggtttgtgctctataaggcactgaagtgtaaggttaggtactgaagtgttggagtatgtgggtaatctttgactttgcttgactgagctacttgtcagtggccatattgatttgcattcagtattggtagttgaattatttgtagacccttgctttcgggtttcagaaactagattattctattttttttccttcaaatttttaatatcctgcagatggatttaaacctgtaaattgtttaccaatcatataagatagacgttttcctatagatattttttctaaaggttgttgggtatacagtagaacaaccagtggaccttatgatgttcacgggctacacagttgttgggctatcaccttcgaaacatttttgagctttccttataagcaatagtgtgctaaggatgtgtacatcgtccatatagctaagctttgaagctgtttacttgggctgttctgtgttaaacttgtttttcatctgttgcataacataaatgacatgatatcagataatgctaatttctgctagtgggttgtcatgtgttaaagttgtagtgctatttgccacctatttcaggatattaacgaagaatggatatcagacaagactcgtttctgttatgatggtttgaagaggcaaagactaaatgaccctatgattcgtgatgctgatggacggtttagagctgtgagttgggctgatgccctttctgtagttgctgaaattgtcaatcaagttaaaccagaggaaattgttgggattgctggtcagctatctgatgctgaatccatgatggctctgaaagacttcttgaaccgattgggatcaaacaatgtgtggtgtgaaagaaatggttcatacgcggatgctgatcttcgctctgggtatctgatgaatactagcatttctgatcttgagaagggggatgcttttctcttagttggtacacaggtattgtcgtgacttttttgtttcatttttagtatagatttggtatcaaacgtatcccccctattgtttctatggataaatgtaacatgctgggagtatgtttatacttacaaatgtaattacctgaatttatttatctaatgtctattgcagccacgggttgaagctgctatggtaaatgctagaattcgaaaaactgttagagcaaatcatgctaaagttggttacattggccctcaagctgatttcaactatgatcatcaacatcttggcacctctcctcagacactagttgaaattgcagagggttgccatccctttagctcagtcctcttgaatgcaaagaaccctgtcatcattgttggtgctggactttttgatagggtagacaaggatgcaattttttcaactgttgaagccatagcaaataatgcaaaagttatcagacctgattggaatggtttcaatgttttgcttctcagtgctgcccaggctgcagcacttgacctgggtcttgtgccagagtctgtagacagcctccagacttccaaatttgtgtatttgatgggtgctgatgatgtgaacttggataaggttcccgctgatgcctttgtggtttatcagggacatcatggggatcggggtgtgtatcgtgcaaatgtaattttgccagcatcggcattcagcgagaaggagggtacatatgaaaatactgaaggttgcactcaacaaacattgcctgcagtcccaacagtaggtgatgccagagatgattggaagattatcagggctctgtctgaggtggtagggactccattgccatatgattcgcttgcagcaatcagatctcgtatcaagactgttgcaccgaacctcttgcatgtggacgaaagagagccagcttcattttcacctttcttgaagcctaaatctgctcagaaaataagttcagatccatttggaactgttgttgagaacttttatatgactgatccgatcacaagagcatcaaagataatggcacaatgcagtgcgctactgtcgaaaaagtgaggtgaatttgtataattttaataaagttgcatattcacttttatttaatttctcctttaatcttttctttaagccgtcaaggctttgtttggccagagattctggaacctcattggagggtacatccaataaaattatttagcatttccttgaatgtaatatgtttgccatgtaaaaacatttttgctgtaaaaccgatggcttctatattttgggcttcacaatctgtctgtttaattatttctaacatttaaatatttttatttttggaaggtatctcttttgaaacatattcaaaaaatgttttttaatttttattaaatttggtaacaagtcttctcttcttgcgcttacaagatactcataaattaaacatcaaacactatggattacagattattcgcttttatatattaaacataccgaagtttcgttttgaaaaactatgcaatttatatatgtatacatttttttttttgggaaaggaagaaaattttattccaactattactgaacaatacacactgcaaaagctgcaaccaaacaactcaaaaattgttgattacagttattatatttttctctttaaaaggaaaaagcttagacaaagtacaatagtattagtgaactttaatcttaatgcaatgtttgatctgattgctaatagctcttgctgaaccacaagtagctttaaatacgcatctgttgtgactacaccaaatataatacatatcaattgctattacaacagaagtaatagagaccaccatcccattcagaggctcaacacaatgaaccatccaatcatcaaaattactaggccaattaatttggcctaaccaactcgtaacttcagaaaccatcatctttgagaaaatgtagctaaataaaagaaaaatgtgagatttagaattaaccttataaactgggcatagcaagaccccacattaagaaatttggcaagaagatcacgagtcaaattaatggcctgccacagaataagacagtgcttcatgacctttaatttgtgccaaactaccttatggtacttcaacttatctgctgaaatgatggacaagtagaaatttttcgccttaaatttccctgaactactagcagccaagaaagcatgcttatcgatgacatctctaagcttgacaaattctctaaaataccaacatctattcgaactcgtcgtaaagagccaaaagtcttgattcttcgtatagatactattgatccagcgaacccaaaagtagtcttgctttgtgaaaatagcacaaatatgttaggccattttgtagatattttttacatgtttgcaaataatttttttaaattttgtataatatatttgtcactaattaatttcattgtgaattatgttttttttcttcttaaaaattacacaaaaaaaaatgtgtaattttttttccaaatataaaaaatgttacatcctaataaataagtacttattttttatttacagttttatgattttaattttaacaactcaacttttaaaacttcagttatcaagaaaaaacaaaaacatattatttttaagtttcaaaattacaaaactatggttcttagcagcaaaccccaaattatatcaataaaataaaaattacaaatgaacaagacataacaagtaattattttttttttatttcacatttttatgattttaattttaataactcaacttttaataattcaactataaaaaaaaaaaa

SEQ ID NO: 379525 - DNA, 1962 bp, Cannabis indica
atacaaatgaattaaaatccaaaagctgtctttttcatgtactctgtggttaagcctttttttctaatttgaagggattatttcattaaaaccactaactaatactcttcttctaaatcatttttcaaatattcaatgcaataacaattattgatcataaacgatacttatactataatcaatttcagtcctattagttattgcaatcaactagatcacatagcaaataccttagcagtaatagcacgtaggtacttggcacgaacatccccaggtgctttagaccattatgcgcccttgtttctagaaaggcagtagcgacagcaagctccacgtcttctgctgtagctgccggaatgtcacctattgcacaatccagaaaacacttcagttaccatagtttaaataaatcaaaaatccaaaaagcaccattgttaatcccagttcaaacatagtaaataagaagaaaagaaatgttgatccatcatatttcaatctccattctcggataattcagtatatagtaagaaaattgaaacatggagatttagaatcaacatagataaatactgtaattgacaacagcacagttcttcctgatctcaccaatttttccaactttatatacacatatatacatattttgagatacacataactagtaacttaactatattccatcagcgaaatagataactcacctgttatatatataatcaaaatacagaactcacctgcagcttggctttgggaaagggcggcagctgagagaatcgggaacgttgaagcttgaattaaaggaaataggttacggggaccagctccagttttagaggtgcaacatgtcaggacaaaaggatcgacgagagagaaagaaatagagagagagggggagagtttcagaggtgcgtaccggcaatggggtaccggacagacagtgggtcgttggtgcggctcggtgggatgggtctgctggtctgctagggtttcgaattggggagatgcgtgaaaaatgaaattagacattgtaaaatttgagtttcgtatatgcattaacctttttgcttcggtgcacaactgtggaaatatattaacctcagtttttataccgaagcaaaagagattggcttcaattttccactgatgcaaaatgcaaaagataaatttttaaattgttacattttacctcggttatactttttgcatcgggatatgagctgacgctaattgttattttttagcttcagtcacaaactgaagcataaaatctccccttatttcttgcctcggtcaaccattttggtgagacgcgttgaccgaccaaaaagtactttttgtagtagttgcagcagtgggttgaaggtgatgagggttcagctggtaagtttaaagcaagaagaagagaagaagagaggaagtggctgctagggttttcaaaggagaaaaggagttggggctgctagggttttcaactgtaaagaggggtttatatactgccataaacggcagtgtttttattaagggaaagcctcttgaatccgcacaagagggaaggtcatttttgaccttgggtttttgtactttgtggtgttggtgtaggggcattttcggaatgctttatttcctacagtaaagaaagggttttgacccctatcttcacctcagcctttgcttttctcattgattagttttctattttttgaatttgcatgtaacagagctatagagagagcattttagttgagagccattgtaagaaagaaaactctttttgtgttattttctcagtgtttatttgcaaaaagaaaataagagagtaacttgtaaaaggagagaaaaacagtgagaacaatagcgacaaagttgcaatctttatctgatatgtcgatgaataaagataaagactgtaacaccctaactaccttaggcgtattacgtgagttttaaacgtactgtgcagct

SEQ ID NO: 379526 - DNA, 1037 bp, Cannabis indica
aaaaaatcagcttttttcagctaagttttggttactaattatctgtccaaagtatatattctttgtttcgtgtgaagttttcaaaagtgcctattaatagattattgtggaaagttatttggccagaataacaaatcttttagctggttttggaattggatattgtatttaacaactcttgtttattggatatgtttgtttatcaaaaactttgtttcataaatctttattttaatttatcattaatttgatttcttcaacctgtgatggcttcttccaggtccttaccatggaggtgtatggaggataagagtagaattaccagatgcttatccttataaatctccctcaattggatttataaataagatctaccacccaaatgttgatgagatgtgaggtttttgttttttggaattagatatcagtcttcaataatgtcaatatcttgtgctttttttttggacaatggaatactgtaagtaaattaaatctcacccttcttttggcgttttctaatttcaggtcaggctctgtttgtttagatgtaattaatcagacatggagccccatgtttggtaaatcagtagtctttacaaatcttttttcttgtcctacatcaagttgtttttttttagcttatattgcttttacagttggatttgtgggtcttatatgtgtatataattttgtttgaagatctggtaaatgtgtttgaagtattcctaccacaattgcttctctatcccaatccatctgaccctctgaatggagaagctgctgctttgatgatgagagaccgagctgcttatgaattaagagttaaaggtaactttatttctcaaaattccttgttcaataatggttaattatgacttccctaacgagcaggactttaatgttaatctgaagttaccaagttaagtacttggaaaattagcattttgctgttgttggaacaacatatctaccttgatgaactcaccaagttttatctcaaaaaccttgatgaactcaccaagttttatctcaaaaac

SEQ ID NO: 379527 - DNA, 4924 bp, Cannabis indica
actgaaaaacagactcgaaggatggagattaaagaccctctcgtatgcgggtaggatggtggcgattagttcgattgctcttgcagtgcctgtatactctatgtccaccttccaaattcctaagaagatttgcaggaagatggacaccatggtgagaaggttttggtggacagggggtcttcaaaagaacaaattttttgctgcgtctaattgggagaacttgtgccagccaaagcaaagaggggggctgggattccgaaagttcgaggacataaacaaggctcttgttgctaaattggcttgggacatggcgagtaatgcgaataagttatgggtgaagatatttcgggagaaattttgtcattggaattccttctggatggtggaaaagagacttggtgatccgagtatatggcaaaacattcttgaggcgcggaagaccattctcgagggttcgtgtaccatgattgccaacggggaagatacggatatttggcggcaaccatggatcccttggttgagttacgaagaattccgtaggaccatggaaggcatacgagataaggccccaagcctcagatcggtttctgatctcatcatccataatctagggaggtggaacaaaagttatgtttgctatctctttggtgaggatctgggtttgcaaatttcttcaattgatattgtgggagatctggggaaggatcggttggtgtggaaaagaactccttcggggtgcttctcaaccaaagaggcttactgggcaaacctgtaacacaggctgggggttgatcataaaatatggaaacggatttggtcatgtaagattcatccgagagcaagcctattcttgtggagaatatgtagcggagtgttaccaactcgggacaagctgggcaacattgatgatgatagatgcctcctgtgtaatggtgcggttgagagtactaaacatatactctttgaatgtagcctaactcgatctctctggtttggaggccccattcctctcagaatcgaaaggttgcagggcgagaatgttatgtccttggttcttgaactgtgtggtgatttggaagaggaggaagcttcaaagctgcttgtgtgtggatatgtcatatgggataccatttggaattacaggaactctattcggctgggtgggagatgtcgggattgcttgagtttgctgacagaagtgaggaaaaggtttgaggaattagaaggtttcgtcgatatgccaacgtctgaggcttccactaaaactgtccatttggtgcaaagggcccccttcaattcaaacattattgtctcggatggttccttcaaagatgggagatgcggtttggctgctgtcggttttgacaggaattcatcttcttggatctcaatctgtaagagctctgaaggctactcggcgcttgattctgaacttcaggccatatacatggctcttcaatgggccaaggagcaggggtggtcgtccatctttcttttctcggattgcttggtggctgtcaatgcgttgattaaaaagagtgcgccggattggaagatcgcaggtgttttcttgaagatactgaagttagtaaagtcttttgagtattgtaattttgcttttgttaaccgtgagtttatctcgggagtcaatgatctagctttacaaactagacttggcaatatcatggacaatgtttgtgtaggggaaggattgccccctgtcaatcctattttgcttggttaatttcgaatgaactgatgttctactttaaaaaaaaaaaaaaaaaaaacaatatataaatatgtatttttatatttgagataaaatagaaaataataatattgttacacgtctagactactacatacaagattacgtatattactcatacaaacgataacatgtggcaatttgctcttttacttactaattatgcattatattactttgaaaaaaagacattatttttttataaatatatatgcattataatatatatcagccatattataatttctatactttttattttaaattataataaataccaataattaatatatatacgcaaattacaatgtgacatatatatgtatctacaaaaataagcaaaactcgaggtaaaatacatcataaaaataagatatacattaaaaaaaaagttaataatttttgtttcattattttttacatgtaacataaaataacatatgaatacattttcgttaatttgaacatgaaaattaaattacaattggaaccaatatataattatgtacgtagtggtgtgtgtattatatataggctccactactttgattactattacaaaatatgacaaaacaacttcaaataaaagcttttatttatgtattttggacatgcaaaaggggccaaaaaagcagaaaaatatttaatacagacgtaacagattcgtgatcccaaacagccacgtgggagtactacagagcgttataataccacgtgtcacgaaacctgcggtgatgactcattgaccatccaattatagctgagttgtcaaatagctgattgcagatcctacacgtggcgaaggaatgacggctaatttaatgtaatattattaaactaataataataaacttacttttactagcttctgtactgtttccctatcttatacttaaattaaaaatttatatataaatggaaaaaaaaaaagaaatattaaataataaggatagaactggaccaaacttagacagtcacgtccttgtcacgtggctttccctcagcagggcggcaccgccctctctctgttattttacacagttttaaagaatggagtgggagagagaagatatataaagtttcgactcaatttatttatttatttattataatcaatcattaaaattttttgaaatgcatttcatgactatgttattcaatcatgtagtatctacttatttgacaaacacattgcaattttggatatatttcaaattaatttataattattatttcatgaggattggaaaaaagaaaacgccaaagaacataagatgagattataatttctttcttttggaggaaaatgacgagtgagaacaaagcttagcacttcaagttcagaacttattattattataaagaaaaaaaaactatttatgtatgttggttgcattattagtgtgtggtgttaatttaaatgcttattttcatacggttgtgaaggaatagtatatgaataagtattagattctttttcaaaaaaaaaaaagtattaactttagattgactaataatatatgtgtgagataattattaagaataaattaagagtgaaataattattgtaatgataagaagtgacacgtggagtgaagtggttgaccgatgaggaccaaaagaccacaagtgagacatagtgacagctctttatcttcagcatcaccatgaaccaccaaaattgtccttttgggaccaccatttctccactacgtcttagccacccctcttttcacaatcccatttcattttaccaatctaccctttttttccttactaattattatactttttttttaaattaaaacatttataaaataaataaagaattagaccttctcattattacaaaaaataatatcatgtatagagaagggctcaaccaaatccgaaatatttcgagcaaaagctcacctaaccatattatgaactgcaaaattataatatttaaaaataaacgagaaattacagcataaaaaataattatagagttgattacaaaaattaatataattattaatattccaattaaagtagattcctttcagaactttgataaattaaccttttctgaattactcttcaccaaaataaaagggtgcttcattaaaacagttgattctaacgctaacagacacgctgcagcttcgccaatcagtagatccgtgaagttaagcatgttaactgctacccacaaaactgtccctgtgtgatccctagccaacgctgccacgcacatggaatcaccgccaaccttaacatcgcagttgattttgatctaatcttctggaggaagggaccaagtaggatgcaccacagccaatgctcagcaaacaaccaagttgcataaactgtgtaacaaatagagatagaatcaatataatgtttaatgttactcgaggagttattatgaacctttttgattcgagtcttccaaattgtattcactacgatcgaagcatataggaacaatttttcagtatccacctctttcgacttcaaattccaaagaaaggttatccaatcccacacacgggctcctgattcaagtatcagaataagtccccaaagggaggacctccaaaaatggtatgcaatagaggaaaaggtgctccatcgattcctcaccttccccaaaaaaggggcacgacacctcttcaattctaattctttgaaccaggagggctcggacaggcagagcatcatacaaaatgcaccaccagaggaccttatgcctctccataatttttgagttccaaagtttgttccacagggctgggacaacaatgtaggcatgaccatactctaattaaagattggaccagataagtagacttaatagtgaataaaccattcggctctaagtccaaactcacctatctcccctaagaccactgggtttgttggagattattttaccaggatctagatttactaccatgtatcttgtttaacatcctaaacatgaatttctaaaacaagagaatttaaacacatataaagttcaagaaaccttacattggttgcagcggaattaaatgactccttccactcaaatctctaacccttgtttctttctatcgcatattaatatcaagatctgagtctgattctccttcagttgttggattcttcacagtcttacacactatg

SEQ ID NO: 379528 - DNA, 5407 bp, Cannabis indica
gtaaaaccctcaaaaaaaaattagaaagcacaatttggtagtaataatagttagagggacaatactattaaataacccttttttaatatattggtagaattgcgatataaaagtgacactatatgtctctacctatggaaagaattatgattatttttaagtgacagtataaattatagagggtacgtctatagtactctttaaaaatgacattttggtagaatattgtcaattttggtattcaagaaagttctttagtttattttttttatgattatatatgttgtagttattaaggactatccacggtgaatcattcaaaaaatttagaaaatttacacttaatcttatttaactacatcgtacacaatgattaaaaaacaaattaaaaagctctcctagatatttaaaaagaagtctataaaaatactcatgtaatgtattacatattttttcaattatagatattgtataagcatatattatctatcaaatttttagaaaattcataatttttttttcttttgtataagcatatatttataaaccgctgcgaagcgcagtttgtttcctagtttctaataagagaagttcatgattgtaatctaaatttctataccatatgagtaaagaaaaagagagtacgaaagaaagaaaaataacataaacattaagaaatgttgccacctaaacgtggtgtttagtattattgtaagatgtaatatcagtacaatttaatgtcggatctcacctattttaatttaataaatattacatataaccgtcaatcaattatattacacaaagaagttggctgaaacggcaaaaagagttggccaatttaatagccctcaacacaactaatcttaagctcaagtttcaactcacgcttctcattcccctctctttcctatgattcctacttctattatgacccttcatatacaaataagaatacaaatttgtgactacattcaaattattatacgaattcttactacttgaaacacccaaatggttttctccaactccttattaatctgaacaatagaatgaataccgataccatgtcaaatgataacaatgttgctagaggtctattcacattttctgtggcaaaagtattttgggtaacacgatcttgcttagccatcatagccaccaatcttgcaacacgagcttgaactctcataggtgagtccccgagaagaacctgcataataactaatgtcccgacctcactcacaacactcctaaccctctctcgctcattcggcactagaaagcactgtggcggccacaattcaagactgatgaagagcactcctccaaaggcttcaacaatggcgaaaccccatcttcctcgactataatattttgctcctatcattgtcttgagccaacaacgcaagcaggttaaccatttcaatccaatatgagagttgacccatttgaataggaagctatcattgaccaaatccacgatcgactcattaatagtgattggaggaagagaaacgatttcgtcgtagagtgattgaatatcagcttccataataatgaaagaaaaataaattaacctatcacagttttattggataaaaaaaagtccaatattggtgtcatttgttaaggtcccatgtgagaatttttcttaacatatattctgtcgagaaccaattcaattcaaagatttacaaaacgcactcacttttagactagttctccatcgagaaggagaactacaatgtacaatgttatatcataatcagtaattttaatgtgtaatcaatctaaaaagcagagttcttcaacgaatttacaataatgttcatctctagatttttgtttgtatggattactaatgcaaaatgcatcaccgagacccctgcaaaaaacaacaaagaataacctttattagaaatgggtgaaaaggaaaaatagagatatcgaaacaaaataataggagtcatatatgaacaatcatactcccaagtgatgaagaaaaggcactaacatatatatgatgatctctacaccatatggtatgttaatcccaactattccgacttcttctgaatgccttcttatcggaaagaaccttcttgcttttaagacgtttttgttcgccaatagcagcccttcaaaagcaacaaagatcgacattaaaatccagattggatacactcactttccgtgcaataacacagtaaaagaagtagaagacatcatagattggcaggtaaaaacaatggaaagagagcttacatctttgcaattttcttcttttgttcttcagaaggaggtggaggaacataagcagcagcatcaatgattgcctattttaagatttcattgacatcatcgccgaaatgatgaagagaaatttcaatactcatcataactcgatatagaaataagaaagacaaatcccttcattaatacctgaagtttctccaaagcatcttcaatgttacccctgaagaagaatggttgaatcaatccaaaggctttggcaactcagaagcaacatggataattaaaggagaagaggaaagaagtacttctgtgttctagtccttgttgaagatatcacaagctccccatccttgtttattcgattcttttcctgctcattacaaggaaaatggcaagtcattgtcgaaagacggaaaaagaaaaatgtccccatccaaacatagtgagttgaaaactaaacatataaactaatgagcagtggaaaaccatttgcataatcctgtccctgatcctttcacttagccaatgagcatttttaacattgaagcgcatatccaccttcgtatttactgtaagtgaaaaaaaaaactagaattgggcatcaaaataagatgggagataaacataaaaaataccgatctaaaatagtctttaagcaaacctttattaacattctgaccccctgggccaccacttctagcaaaactcactgttacatggtctggtgaagaaaagaatggaaaataaataaataacagaatggcgattaaagatagtactttccatgtgtagtaaggcttgtttggtgagtaatatataggataaaattgaattggattaagaaagtaagaacaagaaaaaaaggagcgaaatgaactttaatctacaaaaaattatgaggaaaaaaatatatatataaaattgtaaacttttgtacatatggagaaagaagtcagaagactaggtaggatactgaaaataaatatcctatattaggcgacttgattaatttttttgaagatactctctaattacgtaaaaataaaaatttgatgctgaaaattatccaatacaaacctattgattttactaactagtctgacacgcctgaactaataaccatcaacaacaacaaatggtctgtagtctgcaacacataaatgagaatgttctttaccagggagaagtagaaagagtggatcaatggatatgtacacacacatattatttttggaaactaggtactctgtctaaacaaaaaatatttggggatcaagaaattattacaattactaggtaggtacctaaggacatctagaagtaaaccatttaactatatacctgaccatttgtgctctgtaggaaattttaaatgatcatcaacaaattttaaattgaagatagctcagaagtttaacgtcactcgactgtgatttcctcttcttaactagtattgctacatcaaacaagataaagattttggtcttcctacttcctctgataccaaacaaaacaagggcaaagttctatccctactatttatttctaaatacctctcattttcttccacatacctagccttcagttaaaagccgaatcaaaaatcactctactctatgattagacgaatgaatcaccaggggctcctatgagagttggtttaaccgctataactattgcagagtatctcccagatgttaaagaaaaaaacgtacttctatttatggtcaatatctttggttttctccaagcaatttttatcacaagtcaaattactcatcaagaggcgaatgacgactaaagaaacatcttccttcatcgcaatctttcaaaaagggcttctatagttcattggttgtattaagtttttctcgaatctacgctactgaattgaaatagataattgtgaatgagatcaattagtcaatataattaagttcataaaaaatatgagccccaacatcttaaattttgcatacccagagtgatgttaggggtaggaccgtcgtcagcctcgagagcccgctcctcagcctcctgcaagagctgctgcacatgcgacaatcgagacgaaaccttcccgccaccgtcggaacccgaagccgtacaccgtactcgggccaagctgatccctcgctgcacagctgggcggtgcggcagcgcattgatagtggcgctgagcttactggaatcggagagcagcagggaaagagaaagcgagggttggagaagtctattgagaatgacgttggtggtggtggttctcagaaccgccattattagtttattttatttttttcagctctgaaaaccctaaagacaatagtattgataatgcgtctcgtgtgattaatttgggatctgattttcaaatcaaagttttggattttatattacaaatttttgtggtcaatgttttgtacttttgtcatccatcatctcttatggtcccaatttaatctcgtatgaaatttgtcaattgtcccaaaaacattgttattggagcatcttttatttgtggtgaattataattggttaatgatatctttttaagttatatagcatttatatttaattatactaataatactatgtgacactgagaaaggtattactcactaataatgttttttttttatcttttagtatttctccaccaaacaaacaaatttaattctctaatttatttaatttttttaagaaaaaatgacatttttattattagtaataagtggaatttccatttaggccctttacaaaaaaaaaagaaaaaaagaagaagaataaattccattaaggccactccggccatcaactggcaaatctgtcttagtgtaggatatagactaagatttaaaaccaataacattatgtacacacataaattatacacaaataggacatacatttggcaagttatttttaattagtgagatcaccttaaataaaaataattgattgaagtgacttgtcacataagtcacatttgggtgggtgcatatattattactcattaaaactaatcctccaattacttatagatggcatagcaaactgtttgaactttagtgaaaatttacaaaatccttgtaggataagtgaagtgtgtgagtgtgttaagcaaaaatttcacatttaaaatattaaa

SEQ ID NO: 379529 - DNA, 2363 bp, Cannabis indica
taaggaattgggtattgttgaatgttggtgatgattaagtttcacatattacttgtttaattatacaataatttagaactaattaataattattgatgataggtcaatggtcaagcatccctagagtgttttcactttttgaatctttggagaaatgtctttaggtagtagtgattattataggctcaaaaaggttcacttcttaaccttagaaagcttttggctttgaagaagaagatgacctttttcacaatttgttccacctttcgtcaatgctataatgaaacaaccagagaaagcaagagagttcatatgtatggtaagtgcttttggctttggtcaagtcccttcttttaaggagaatgataatctatctaatcccatgattccatctcatgtacacatatatatacaaataaaatttcaaacaaatattgtcccacccaactctaaagccactatatacttgatttcatagtcaatatgaatggaacccaacacaacatgtgcacatgcatatatatatatatatatatatctactaaaaattgctagccataataacaataacatagatcattttcatttcccccaaattttccaattacactactctaccatcaaaagaagagatgtattgtatatcacatatctttgttcccactggctatgtatgtggacctaagtatccacccagcttagctttctcttctccattattcataatccctccaaatccactaaattttacgtcttatactttattttcaatacaattaatttattcaatttttttttcattcttcggagaaaattttgggtgattagtagggaacaaaattgtctttaaaagtcataattattgagatagaaccgaatctcaacacgtaagtaaatagcttattattagcttggattggatggtgttatgttacatatgtgaaattgattagtataaattctagtctataactttgcctagtaaaataagaataataacgaaaaaggctatatcattatagctggctagtagtgtagtggtacatatatgtgtggaatatatgacttatatagagaaattaaatttgaaatggaacctgggtacgttgggccaactttggttgacttaataaattttgttctagaattatgctccctttagacaaaaacctccaattacagaatccaacaattagttttagccaaattcccagttgaaggaatattttaacttggttttttgcacattaaacataaatttgtataataataataatataatactatgtgtgtcttcccgaccagcaccaccacacatttccaagttgtattattccctaatgtttatgctcttaaaaattgaaattgttggtatataaacattaactttggaatgagaaaagaggaataaataataattatttgtaataaaaaagagatggatgataaatatacattaatgtgtcagtttgtaaggtctcaattggctcaggcagagttcaaaagatatatatgtctggattctcccactcatctctcttttcaataccaaactttctttttcttttaatttctttttgtattttgtttcactgtctatactcaatattctttatcagaaataatcagagagagagagaggggttggaatgattttcttctgtatagactatagagcctcaaaaataaataaacaaaatacaagtttgtcacatgtatgaatatgagatatatatagtataatacatcttatcaaatcatgtcatcgataaaactattccttcctttttttttcgaaatgaactattccttcctaataatatgtcttaataagtaagaaacagtgtctgtcatttccttttttcactcaacaataattgtaattttgttaaatttgattatatatgtaaccaagcttacactgtatagagaagactttgtaatatactatagtatatatgaaaatatctcatagctcatttgatggacaggacaacttttgtagcattatattctctctctctctacataaaaaagaagaagtgggaggaatatgtggtgtttaaagagacaaaggtcattttataagaaaaaaataatttactaagttattatttttaaagttttcaggagttaaaccttcctaagaggactcatcataacttctctaaatatatatataaagaacccaaatgttatattacttttaaataatataatttatagattaaatatatataataaattaattaataatatgtaagatatgaaaatatatattagttgtcatcattttgtaatatatagtgaagtttatttgttactatgagtaacccttacaattatcatcaatattaagtgtg

SEQ ID NO: 379530 - DNA, 1417 bp, Cannabis indica
gtcattcctctttggcaattgacagtagtagatgggacgaacctaccccccagtcccccttttttctttttctttattttgcttattatttctgtgatctttatctctccattctgtgctgttttgtttcgccttcagttttgttctaaatttttgtgttttaaaagatgctggtacttttgaaggtttataattggtttcttcattgctggactcccttggtatcttggagccgtgctttatttctgttccaggaggatggactaccgagagaaaccaggatacatcgcctgcatagttgctgtgagtaacttctttctttgctcaccttttttacttgtatgtttttgtggtgggtgtttagtgtttaataagcaagcgtgagttgcatatatactaagtatatatttatgcttttgctatgtaaacttcctttcttattatatgtaaaagcttcttgatctgtgctagtggcattgaacttcttttcctttcgtttaaagttagatgtaactttacttaccgtgtgcacttttagacacttatcaaatccaatgttttagtatgtttctttgaattgattttgctattaagatttagttaccatggactgcttttgtgcaggctattcttgccacactggctattgtgttcggggtaaccaagggagctgatgattggtaaatttgtgtctgtcgtgaagatttgtatagtttgtgaaaggggtcgtatacatatttgcagattcgtattactgtgactattttgtattttattcattgtgtgaatttacgagattgattatgatatctcgagaatagtcgagattgattttagatgctcccaacttgaattatttatttaatatacttgatgttaatcttgttcatcaataatgtatgtacatgtatgcatctggcctttaataatcttgttggggttttcatctactgactaattttcaaaagcatcgacaggtgccccctcccaacattacatttttattagtatagtctattccaaattaaaacttcttgtctcgaattgtaggagctataatttcagggctggctttgagttaatttgaactttagaaaaaataatttttttgaatctttttataacaataaataatattttttaaaaattatcaaaaaaatatgcatatttattgaaagttttttttttatttgagcttctaagaatgctaaaaatttatacattatcaaaaaatataatattttattttatttatttttcacattatttttggcactgttatagtcttacttttaaaaatattctaatgtataacactctttaaaaatgttataataatgatatcacacattattatttaatatatattttaatttttagctacaataattttttagcttcaatcttttattaaaaa

SEQ ID NO: 379531 - DNA, 4827 bp, Cannabis indica
ttccctttcgtcaaatgggtaggtggcgaaatcattagacccgtatcccaataagtaacacaacagctgagatttggcctattcctaatccgtatttggaaataatgattgtttctttcactcataattatctagtttattatgaggtgaaagagagtagtagcaaattataaacaattcaattgttctcatctcaaatcgaaaaaacgacattacaaagttacaacaacttacaatcttaatttgaatagagagttacaagcaagatttacaactagattgtgttgtgttgtgtccctcttgagtcttgaagtaatatttatttaaagtaactttaaaaagaagggaaaaggaaaaaccttatccaatttcaaccaaatgcaaaactataaaattaaataatattacaaaagagaaaaaaaaaaagtgaagttttttttctttactcgttaaggtattgactttgttaataaagggttggtggtgtagtgtataggtaaatagtgtattagtgtatacctttgttggggcaaggaaaattgataaacgcgtgtggtgagaaaaggtccctttcaaaaaaaaaaaaacaaaaacaaaagaatgctcttaaataaatatgtaaatggttccatcaaaaaataaataaataaatatgtaaatgaaaatagtagagaattaagaagggtaatgttgaaaggtaggtcctagctctttggatagggggcaaggtccctataatagggtatgcaagctaaactaaattggtatagagtggaaagtctaagcctatatagtagattcgcaaaatatacatataaatatgggaattaaaggagagttaaggatttcatagctttatttgtacctatgtctccaaattatatagatttagaaaaatttataatacatagttttattttgatgtaactttttatctatttcaccatataatatagctttttttaattaattttttttttcataattacgtgtgtttgtaattttttaagattacttgtaaaaaagttttaaaaaattaaatagttaatagtgttaaaaataaaatccaagtaattacatatacttataccgcgtatataaaaaaattgcactgtgcaacaaaatacattttaatcttattatcattggttttaaaagttatttttcccagtttcttgaattggtcaaagattaataataatagccgtattacaaatataatataccatcttgataaagtattaatttcataggccttgatttttcaaccatatatttcatttacgaataaactatgaaaaaccaaaaccaagttgcttttacaaagtctccagccaaaagtgacatagaaatgtacaaaagaaaataatagtttaatacaacaaatcctcttctcttactaataatacaactcattcttgcttatcaagtttttgatgagttcgtgtagtgtaaaagtagattataatatacataaattaattaagaggaaagtgtggagaaagactagggacggtggagacggtggtgaccggcggagactccacctcagtactttatagccaaatgcttaagacaggcatacattagcttagctttatttgtcctccaccaaatgaatttcaatttattaattaagatatatgtatatgtgcatgtgaagcactcaaaattatctagctttatatatatgatttatatttatttcattattattattgctttaatttgtgaaggagcaaagaaacctttatttcaattttaatttgagagaaaatagtagagtagattatttggaggaggaacgtggactttgaaaataaagaacatatagccatataaagcggagtaagataggaaaagtcatgtccacaattctgtattcatctggaattgtaaaaaccccccacaaaaaaaaacggaacatgttacgtagtccatattgttattataatatataataaaaaaaaaaaaaccaaactcaattatgtgggatggtccaaaggcaaaggcaaaggcatggtttgggattttcgatgggtgacatagattgctacatgggcaagttatggagtcaaccaaatgatcacatagttgactcggctatagctttaagggagaaataaataataatgtgtgtttgggagagagaagaataatatataatattatttgtttcgtgagagaacactccccattcggacaaatatttatacctaaagttaaatgtgagggagttagtcttgtcaaaatgataagcaaataaataaaataagtacgtacactaactaatggcccagtacggttatttgcttttttttttgtccaaaataataattaaaaaaaaaaagtatctcttaaatcagtccacattcaccagttcaattgtaaccctaattatacccttacaaaaaaaaatgtaaccctaattatacaaacataataattctatatttctccccaaaagaaaaatcaacaaagtgaataaaatggggagtttgtgagcgctaaggttttctctctttttcccaagagattggtataactcatattctgattagggctcaccgacccttttttgggcttgagtagttggtatctgttagtatttattattcaaattagagtagagtatactcatcccccaaaaagttagagtgttggaagaggtcctatagaatgagactttataaggactgaattcaaagaagaaatcgtggagcctatgaccccacttgttatgttcctctagtagaatcgaaaaattgaaaacttccacaaaaattagccaagtcaaatcaaagaaatgcaaaactagaatgcgaggcggcagttgtcaaggggacttgagatgatgcacccccaacacaaactgatccacctataaggcgtccacgagggaggcctcatgggtcaaggacgaggaggaatgtagatgcccctgttgaagaaaacaatcaagaaaatctccatgattaacaaccagggaatactaggaaaattcttgttgacagggagatcccttaaaatcctaaaaaatcaaatgaaagacaaatgcaacctgaagcgacagaaccttctcacagaaatacgaggtctccaccaaaacaaaatcatcatcgaccaccgcaaggtccacaaagggcaggcagaagctacatgtcttatctatttgaacgacgccaggcaaggcaagaagtgcattctcaaagaaatgaatcagacactgtttgtgagtgaatcaaggataagccaaacacaaggttgatcctcacgatcccaaacatggggagttttccaacatgtgaggcgtaacactcatcataataatcaagacgttcagatcagtctagtaacttgcaaagttaccaatctgaaagtgtctcgcctacgagaccggtaagcaattatgatacaaggcgagagcaacatcgtgaaaaatatgatcaacatgatctgcgagaatatctaaatcgaagacaacctgatttgcatgaacacttgaattgtatcgctctagacctttgcaagaaattgaatagaaatacactatatttgcgtgaataattagacaatcaaacatcttatgaccccatccaattaagggtcatacaattagaagaataattctggagatatcaagatggaaagcaaggaaaattgcctagatatgattcagacaaagaaattaaatcgttgcatcttgatataagtaattcacaattctcaaaagaatttaagaacctccacgtcctttcatacgatggaaccactgatccggtgggacatttaagtaatttcaatacaatgatgcgagccaataatattggattcaacttgtgatgtatgttattcccaacctccttaacaagagtggctaagcgttggtttgacaagttcactcgacattctttattctattttggagccaccccttttgctaatgggaattgaagagttttagaagagaagatcgaggttgggcaggttgggttggggatgcaacgagaagaagaagaagaagaagaagaagaagaagaaagtaagtaagaaagaaaacaaatagattttgatttggaccaataaaatataacatgtaatatttttgggaacaacaaatatagaattgggtaccactacaaaaataatagcctttaatgacaacattatcagtgatggcctaaagtcctcactaaaggtgagagtatcagtgacgacatttaaggattgtcaccgataaacacttttctatttttttgtaaaattaaacatcaatagtgacatgccactttcaatgacgacaatgtcgtcagtaaattttttttttttgaaaaacaactgtaggaataggtgttaggatatttttagcttattacttatgttatttttagagttaattttcttctttattaccactttttagaatagaattacatttatttttgttaatttcaggtctcgacacttgaaatttataaattggtcaaatctcacaaaaagatgatttataaaatagagaaaattgtgcacgaaaataaagctgaaatttaagcctaaattagactatgttctgatcagattttagagaaagtcaaaacataaaagatctagatctctcttttatctttctagaacatcttcaatcgtccaattctgaacaatataaagagagttatggctaaaatactaccagtcaacgcaacagaaagctcactgcccaaataaaagggggttatgtcgcggcataggatatccatgtcgcgacccaccccttctaatcctgttacgaaaattataaacactacgcaagtgcacgcaatcaagtag

SEQ ID NO: 379532 - DNA, 853 bp, Cannabis indica
aaaattagaaaataagggcagttatatattatattattttacaataattacaaaataatgttattttcaaattgttatatgatcataaaaatgagttgtaaattcttgaaatggatgatcacaaaacttacaactctcatttctattatatcactataaaattagtaaattaagttacttgtgtttaaatgtgattaaatgatagatatggaaaaagtttagaatgtatggagttgaaaaaactaaatgtagaaattgaaggcagactactcatataggtctatcaacatttaatttaatatttaaaaatttttaaatagtttacattactagaaatagaaataaagttcttgatatttcagtatatcatgtgtgtttaataaactttaaatttattttcagtatagtaaaatattcgaaaaatttataaaaataatattgtaactataatgaacactaccatgaaaaaatattctaatatgtatttttaaatagaaaaattaattaaaaaattataatatataagaagttgacaagaacatatctcaatcataaatacattcatttactcaagactcaagttagtaatatacttataaattgttttgttattagataatagatagatatatatgatgtggaaagggtggacttttgattatgcagatgtggccaacatattaattaatggtcgttgttgtcttttaatcactgccaaaatgcactactttattataaaaaaagattggtattagatatcggtagtatttaatattttttataagtagtgtcttacaattaattagcgatattttttaaaaaattattttcttaaattatataaaactcgata

SEQ ID NO: 379533 - DNA, 2949 bp, Cannabis indica
tgtaaaacccaaaaacactaaatagtaaataccaatcaaaagtgagaaagctcagacttcaactccattcattttacgcagctcaaacaatctcaaatttcccaaaagtctaatcaaaatgtgttagttgagattgtcagaatcaacgtcagatcagatttgagagttcctaagaaaacagagttggttttcttctgtgggagcaagatacttggtttcctcagaaattttggaagaagacgataagccttaaatatttattattattattattattattattattattattattattattatattttttaagaagaaaaaaaattatttagaaaaaaaaataaagtgaaatttttgccaaaaatattttactaatttaaagttcagtcttttttttttctttaacttaaattaattttcaaaaatactcttgatttttttttttgtaaaattactttattttgttttaaaaaaatagacttttatttgagaaatacaataaaattcaaataaaacaagaaaaaaaaattgagaaccttaaggcaactccaactggatggcatatattatatatagtgttattttttttttttataaaaaaaatatcaatttcattgaattagtttaaaatataaaatagcctgaagttcagagaaaatattatgcccaagaatgctacgactagatatatatcgagcatgcttagcaacaaaatgggcaacttaatttattgatcgtctaacaaaacgtaaatgaccatgtggtagataaaacaaaatttttttacaatcattaataaccaaaccaaaaataaaagacattaactggctagaacatattgcttggacaacgaccatactatcagtctcaatctttacccctttccaaatatataatgtataatttatttgttgtcaagtaggatgcttggggttcttaaagttcattgtgcactggtctttcgagagaaggccacaagatttcaaattatcatcatgaagcagtaagtcagtcactcgcaagccataaggcagattcaccatgatttcatgctgcctttgaaccactagtgttgggattggtcccgttaaagtagctgaaaatgagagatggaagaacaaagaattagtaaaaatatccaattataaaaattgtaaaactcaaaactaagataatttatttgctgtcaagtaggatgcttggggatcttaaagtccattatgcattggtctttcgcaagaaggccacaagatttcaaatcatcattatgaagcagtaaatcaactgctcgcaagccatagggtagattcaccatgaaataaccactggtgttgagattggtctccctaaaatagctgaaatgagatatggaagaacaaagaattagtaaaaatatccattataaaaattctaaaactcaaaattaagattttgggcatgacggatacttacgtaaaattctgaactgagtggtgtttattgggtggtcttgttgtccaaaacaaatcattctcgaactctttattgtgaagtctaacaatgcttttataatcactagaataagtgcccaagtaatagaagttgcctgaataattcttcctcgcaagacatagtaagtaatcttgaatgggattgggtattcctaccctaagatgtgataaagtgacttcaaacatgcgaggatcctataagaatttgggacgtgcaaaaaatgtgcgacccaaggtaattgtaaaaatccttgaaatattgcctaaggggaaggacatcccatgccttaacatgcttgacactccaagctcctatccttgaagagtcgctagtactgcaaccttcgtcattcaagaggtgagatggggggaaacaactaaattctccagtacgacagaatgtatacgacatccctttttattttgatgccgcaagacctcagaaatggacccatgtaaagggtgattgatttaggttcaatcaattcggtctcgaaggtaacattggagttctaaagcatcttggactttcgagctttaggaaccataatgtcaaattcaagatcatctggtagaaaacatagtgactggggtaaaaatatagtcttactagggaatttttactaaaactggacaattcagaccaagttgcttctcacaaattatgatgtctaccttcaataatttcatctatatatcgcctatagcaagctaatgtttcttcttgactagctctaaaagtgtgtttcctaattttttttgtcatttatctcaagtatggattgtggtctataggtttgaggtttaaaaacaatgacttagaattgaggattatcgaattcaacaaagtcttggcgttcataatcttgctcagaatgaggcttggtcttggttaaaaaaatatgtctcaaaattctaaaaatgcataacataaaaacctaggacatgcaaatcatgtaaccctaaatttctagccccaagttgctaaaaaaactcatacaaagacaatgacatacaagaaattgacgatatagaaatatatggaaaacattaggaaaataatgaatagtcaagagaacaatggtaaaaatacacttattggtttgctaaaagaaagaaagtctcgaacaattccccactgagaacttttgatctcgtttggttcgtgatgatgttgagattgagaagaaaaactagcagaaactcgaaagaagtatgtgagagataaagagaacatgcaatttcaaagagaataagggccgaaatttgaattccttcgaagcttcgtaaaatagtaatggcaaaatatgaggaaaatgctaaccttatatccaaataatggaaatcgttcgattataatgatgactatcgaacagttgtaaactattgaaaaaagaagagtcagattaataaatgttgaaatgatatttttctcgaagtactgaaccaccaaaatgaa

SEQ ID NO: 379534 - DNA, 4212 bp, Cannabis indica
aaaaatttagcttctatgatcaatttctctgtttatgtcactctgttaagtgatgaggtaataatggtggacgacgaggctaagggtccacagggacaggattggggttgggatgagtatatttgtacaattggggtattaatttcttgatgttttgcagtgcaaatggtggtggtggtggtggctagctctggatgtgtataggcttaggcattatatgatttggcattgtataaacatttgatatgaaacggtactataattaattagttggtgctggcaaaagggaatctagttgtacccgcacttttttgcaaactgcaccggaaaaaataacttttgccagtgtgctttattgtccacgaaaattggtggtagtagtataactcaacatttttatccgcatttttggttaacgttggcaaaagtcatttttttggcccaattttgaaaggaccgggagaattcatgtttcttgtaatgtattttacactgtattaactggaattaattagttacactgtattaactgtaattaattagttatgcattgttatatgtataaatttttgacgacggtgtcaacgttgttagtatctgtgttagtgtttattagaaactctcatataccgtatataaaagagcattgctattaggcaccactggtgcctagcaccactggtgcctagcaccactggtgcctagcaccttctcgacatgtcgcattgcgattggctagcgatattccctaaaaattattatattaaattatatgagactcgatacttggttgaaccaatagcgatattgacacataggagagtgttaagcaccactggtgccctttagcatttctcgtatataaaatattgtatgaacgaattacttctttaatacgtcaattaatgttgatataaaaatttcattaatcttacttacaactaggtcggtcttacggtgggctaagtcagtacttaggacacttacatttttcgagagtccaaagtgaaaaataaaaaaaaattattaaggttttatttaaataaaatttaatgtattgtaaataataaatattcatattatgagtttgaattacataacactctttttcaatattttttttatatatttttaagggcccaaaatgtaattagtgtttgctttgtctacaacaaactcttattctactttttgcaccacacatccacattcttaattaatcttaatctctacttaaaattattggtaatcatatcatcaacaattgtgtcatgatttcaaaatttaccctaatgccattagtttgggtccaaaaccaacactttatcaaacttttcttgtagtggataagatcaaaacttataaaaagagagaagaaaaaaaaaataatcttatagccaatattagaagtatcattccaaagttgcagcagtactgttttaaatgttaccctacaaatgtaaaagttatcatgaaatccaattactctttcctcaagttccttgcaactctaaaaggcatcataatagtgtcaaagagatccccacaatagaaaattgtacagtgaaatcactgtgttgtacacatttaatatatttatatacatatatatggttgaatttgttacaggagaaaaagtatagtacatgcataagactggttcaacatgtactaaaatttaaagctcactctatacttagacacatatatatgccaaaaatatcgagagcttgcatatgtaaaagtaccatacaacatgtgttgagactttaataatatacttatagtcataaagcaaatagcaatttgtcgttgaaatgtagctgatttttaatataagtatattcgtatatgcaagaatgtatttgtaaaaaggaaataaacacaatagggaatttttattattttttaccagtgtgtgtgtctcatctaaaggtcgaataatgatgaaacttcacatggtatggatctgagcctactttatatattccacaaaagtaaaatggatttgcatcttggatttttacatcattacgtctcatgcatttgtctctctacagtgttcaataaagaattaaaagatcattctgaaattatgttagttactatagtacccacttttaatcatagaaacatgcactacatctcttcactcctctaataacctctctctctctctctctctcaattagtggtatattctagcaaatcttctgttattttttttttgtttatttcaattccaaaagtgagtttcaacaagtgcttgagaatattagaatactggtcagaagctgcaataatgttatatttatgtgagggctcttagttccttaatatatatattatatattgaaaaatataaaagtgaaaagatactctttggtgatgggtggcttgaaagacaaaaaatgctttagacttagaaagaggaggataggaacatttgatctactttccatctaggaaagacaacaatatgggtcaagctctgcaaaggaagtattgaaagatgtgtccataaaaaatatagtttggaaaaagctctctctatagtctataccattttaaaagattaaaatagaaccaaaacactatctcaatatgaaataattaatacaaaaaagaaatttattagaatatatatacatacgtatagcattcttgtatggctttcctttttcttttccttatattttatttggaagcgttcgtgtatgtttggttgcctaagaaaataaaggtttgttacagaagaaaatacagagtaaatgaagaggcattatggtcagagctatgtgtgtttaagtttgttagagattttggtaatcctcatagaatcaattagttgtcctttttcattctattattgcattgttattagcattattttcttttttttgtaatgattgcttgtaccacgtgtaaggctgtgattgttttcatctttttcatttgtacctctgtattgattgtataatggagatgttactattagcatcatttgagctaatcaaattcatttattgaatctttagaaacttcacttggtatcagagcacaccggtcaacgtcatgtctacctctcaagaacagactagctcccctgaaccaggaaaccaaggtgatcagactccaattggtataaccagtgtaccagtagcaggcataggtcaagcaccagttgcatcaagcaatgctttggctggtagtccttttagcaacacattgacccaacccttctcactaaaactcgatcgcaacatttttgcactgtggaaaactatggtcaatacaatcatcagaggccatagacttgaaggcttcatcaatggcactcgacctccaccaccacaatttattcccacaggcaactctgcagttgacactctaggatctgttgtggaggtgaatatcgaatatatgagaactggcttgtcttcgatcgactcctcatggggtggttgtatggatccatgattgaaggaatagcttctgaagtcatgggttgttaatcagcctatgctttagaatgcacttgaagagctctatggagctcactctcgagccaacatggatgacatcaggaccaagatccaaactactcgtaagggatctcagtcaatggctgaatatctaaaaatgaagaggatgtgggcagattctttggctcttgcaggtaaaccctacccaaaaaaacacttaatatctaatgttttatctggccttgatgcagaatatctgtctattattgcgcttattgaatctcaaccccatacttcctggtaatcacttcaaagtaccttgctaagctttgatggcagacttgagagactcaatgtcatatctgccaacaacaagcttgtgggaaatgcgtctgtaaatctttcacacaagccatcaggatcaagaaacactcacaacccagggagctataaaaggcaaaaccctcatcgaaacagtggcaggggaaatcagaaccatactgtggtggatacagaggaagaggtcgaggtggaagaggaaatgggtctaaactcacatgccaagtttgtggcaaatatggccactcagcagatgtatgttacaataggtatgatgagagttacatgggccatcaactcaacacagagactgctgaagacaaacaatactcagccctaattactacacctaagatgtgtcggtctttataccctaaataaaactcat

SEQ ID NO: 379535 - DNA, 8125 bp, Cannabis indica
tgaaaggttgttaatttctaaaccttttggacggtggagcatccaaataaagcatgtgctaatattttttattttttgtgacaccgtcaacaaaatggtgagctcactattcggcggtggtgaaggttcacactagtgggaagaacatcatggcacacctgacaatggaaatgtttgattttctaagataacgtcatcttccttatcaatttacaccattttcttggttatttgtaaatgaaggtgaaggcttaaattggtgtagaatgtcttatgcatgatgatagccagagttgactatataagttctagatggggtgaatgactaatagctttgatcttggcttggtggatgtaggagttgaatagactgaatagcttggttattataatttggatgaagggattgaatctgaaatacatcccattctccgctggctattatgagagtggacacattgctatcaagggtttttagtgtactgagataggtaatttttttatatcctaggatccaggcatccttaaagatagaataaagggaaccaaacccccattttatttttttgcataaatccagcaagaggagttctttgccctaagaaatgttattccagactagagaagggcaatgccctttaccagaaataagaaatgcaaaatggggatagtatcgggctttgaggagggtagctacaagtgaggaaggagcctgaagaagatgccaagcttgctttgccaacattgcttgattaaaggctttcatggagcagaaacctaggcctccatggaatttggacttacaaagatcagaccaactattccaatgaactttctagttgtgttcagttccaccccaccaaaaatttgccatcatggactccattcttttgtgaaaatagttaggtaactggaaacagcacatagtgtaagacaatatagcttggaccactgaattgagaagtaattccttaccacctttggagaaaatgtggagttccacatgtttagatgtgaccacacacgatcgtgaaggtagaggaaagcttcctttttagagtgactaaaggattaagggactcccaagtatttctcaatagagacccgaataggaacctggagtagggggtgattcggtttttgttctcatcggtggtattgggagaaaaatagagcgaggatttatcatagttgattagttgttccaaaggcagactgtaatcatgaagtagttccttgatattgttggcagcaacgggggaggcatcactaaaaagaatgctatcattagcgaagaacaagtgggatatgattggcacagtctaggaaaattttagtctaatagcgtgctttcttggaatatgttgatggactttttgcgagatgagcaaagaaagccccacaaaacataagaggaaaagatatggggagagcgggtcgccttgacggatgcctctggaagggatgatagaacctaggagttgttgattgatggaaaaagtaaaggaggccgttgagaggcaagccataatgagattgatgaaataggatgggaaattgaatttatccatggccttccagaggaaaccccactccacacgatcaaaagccttgtccatgacaagtttaagagccatccaacctactctaccgtgtttacgatgagtcaaagaatgtgtgacttctggcccaatgatgacgttattagagataaaacgattaggtaagaaggcacttttggatggtgaaataagatgacaaagaattggcttacgatagttaaccagggtaggggagaagtatttatacaaggtacaacaggggaccctccccctaggggagcgagtcactcaaaggccaatcttcaaccggctaggactgggaacgggtgaaaacacccaaagcaacgatttgagaagtgaaaatgatcacttcaagtatttagatccacataactctagcaactagtgtgatctaccccttctcaatacaccagcaatatcatctaatcggggaatcacgggcggcaaggctctacctactatagggctagccggccatggacagttgtccagtatgagcttagctagccagagccaatatcccttcttgggagtggctgggcaaggccaacaacacagcacagggttggccgacctccaccatacattctcccaaagtatggccggccacaccctggcatatttgagcctatagccctccaaggagggccactcagttaagtctctacagcaatggatccttctatgcaagcacaattggacaaaatgagagacatgatcaagggcctagctggttaaaaaccttcaaaacttgagctagacaagtcagggggatcaccattcttggaatacataaatgccttgcccttgcccaaattaaagatgtcaatgtggaagtgtatacagggcaagaagacctgctgacacacatcaaatactttgagatgcagctcgatctccaaaggattactagtgatgtgcgatgtcgcatattcccaataactttgtcagaaacatctcatcaatggtacttcaaactttccccacgaagagtcagtttcaggaatgacttttcttgagaattctacacataattctcatcttcaaggcttataccatcacagctagaagaccttgtcgaagtcaaacaacgataaggagaacctttgaaagattacatccaaaggtccatagccaaggccaccaaagttaaaggccttacagaagaaggtcggtatacgaacatactgggggtatcctctcattcagtgacttctcgaaagacatccagaggatctcaactagcaacatgaaggagttccttaatagagctaatggatttatcaaactagaagaagttgtttgacaggcccagatatggcaagtcaacaacaggcagtcacgagaaatcttgcagccccatgacttaccaagcacacaggcaggtactagaactctgcccaaacctccagtggcaagaacactaggagcaagcgcaacaacaacaactcttgaagaaatagtggaaaaagggggaagtttaacacttctccgatgccacgaaactagaaggacaagggggagaagtacacatgcttcaccctcctaatagagaaacccgaggccatctttatcgccacttagggaatagtcccatacagaaagccctttcccatcaaaaaggagttgaggaagagggacatgtcaaagttctatcagttcttcaatgacttcgtccatgacaccaacgagtgatagaattttaagaaggagattaaattcctcataaggaagaacaatccccacatgtgtcgttatatgtagaatgactagactcaggcacaaggtgcccagaatgaagatccaatgccaccaccaatggtaagacacttaggagtcatcatttgtagactccatattgcaggcaagactagcaaagctagggagcgctattcttggaaactccatcacgagcccaaaagccacatcttagcagtcgaagaaagaggctttaagcaaccaaatcttagagagttcacgatctctttctcagaaggagaggctacccaagtaagtttcctacacaataaccgctggtcattactacacaaattgggaatatgattgtggcgagatgcatggtggacaataaagcctcctccaacattcttctcaaatgaaaagatggggctccaactcgcaaatttggtaccctacagtcaagtgatgtatggcttctttggccaaggcatcgcaccaatcaagtatatcaaattacccctcacagttggagaaaatccaaccccctaaactttgatggcgtagtttgtcataattgatgttcccttagctttcaacgccatgataggctaaccaaccccatacgagttgagggtagtaacatccatctatcacctttgcctgaaattcttaacaaggcatggggtgggatgtttaagagaagaccaaaaaatttcccatcactgttacaacttcgccttgtttaaagccaagaaagagaagatgcctgccaagagctttgaagaggagcccagcaaagggcaatgaagtctagcacatagcagggacgcatacatagatccttacttttgggatcctgtagacagcttcgaacctatagaagagttaaaggaagtggaggttgatcccatttctccagccagaaaactaaagatcgggaaaggtttaaagccagaaataaaatcattattgataagatatctaagggaaaacctagacctttttgcctggtcacatggagacatggtctgaatcgacccctctgttataactcatcccctcaacattgatccaaactttttacatgttcaacaaaagcagaggttgctggacaaagaacacgcccaatagtatgatatttaattgagcatattttattacatatgtaattatttttgataatgaagtaagattatgatcttatttaggttaattggtgtgaatttagtaaatacttaaataaagtgtaatttattaattacagagattttactggaatatgagagtatcgtagatactaatttttaaataaaatattttcgggctcgacgaccgttgaaaactcgacgaagtggtcaaaaatatcaagacaatataagatgaattgtattggaattatttcggactagattttaatgttgtgaagccagttaggtcggggtagttggaaaatgaccaaaatgcccttaaggtgtgctttagtttaggtgattttgtaaggagtgaaatagccttttggggtttggtttttgtcttatattggattatctaggctgaagtaggaatttattttattttattttatattaaatttattagttttaatttataatttggaaattgaagataaaaacataaaactaagaaaataatacacatatattgttttctctctttctctctctcgaagaccatagaaacccaatagaaaaactaggatttgattctaattcaatcatgtctaagctgaaccaaccaagggtaagagttgttcatacttgaggtaagttcctcaattctttcctttgatttttgtaaggtttaagttgagttttttgttagggtttgtgtgatttcggggctgaagtgtaaattgagtttagaatgtgttattgggcttgctttaaaatttgtttgggcttgaaatggttagaaatagtgaatgtttaatttgaattggtttaagtgaagattattgagtttgatttcatttgagtatgcaattttgagtaaaaggatgaattattgtaaattggtgcttgggatacattgtgtttatgatatggaattgttctggaaggtttgagcaggtttggtgaagaattggtttggttttggagcaacaaaccagtttttcctgtttctgcagcagggaaaattggttaattggtttcataggcatagtgaaaccggtcaaccagttttgcctataggggaaatccttgttttaggcttcaaaactagttttatttgggttgtttcccagagcctagaataggatattttaatgatgtttgagttatttttgaactagtggggagtaacatatgttcggttacgaaaattagggttaatttcccgagtttcagtttgaggtatttattggtttttgttgtcatgacataggactcgagatcatcaagctttgtttttctacttaggctgacatgcacgcttaatctctgggctgaggtaagaaaaatgttttgcaccatttatggttaacgattatagttgtaatagtctcaattataatcgagatcctattatgtgttttttataacttgattatcatcgaggtaatgataaggaacgattattattgttcatgactcgattatgatcgaggtaatgatatggaacgatactatcgtttgagactcgattatgatcgagtaaaagatacggccattaccgttatgagtaattactcgttgaaaccgtagataggtttcttacttatcgttcactttatcgggcaacaatagtgacatacacagctcatgaataacgagtggtaggggagctttattaagctttgagaatatgtggttagagtgcttaatgaaagattgaaactatgtgtttatggtaatgtacagttacagtgctttatgaagcattgaaactatgtgtttatggtgatgtatagttagagtgctttacaaagcactgagattgtgtggctatatgctgaatgaatgtctatttggtgaaaggataaaactattgattatgagttactacgattttcttataatgtgaagtttatgggttagtattgacgctaattaaatatgcatgcttaataggtattgaatcacgagtatgtttattatgttatgatttgaatacttgtattccaatgcttatgatctagtagcttttcttgctgagtcattgtgactcacggatgctttgtggtgcaggtaagaaggaaagcaattgtgttcatccatgagcctgaggtctcccagtaatgtacatatcagtcatggtgtcttgacttccaggaagcaggatcaacctattttctatatttgggaatgtgaccttatttttgaaacaatgatttttgtaacctattgtaaaagaattgtataaacaggggatccttgtattatggtatatttaatatgaaagttttatttcaacttaatcaatagtttttaattaaaccactttttctaaactaatagattagtaaggaataagtttgtaagagcacacatgtggcgtcccagagggtcagagcgttacaaactcactgtggctaaatcccaaaggccagcagaagagagcttatctgcatcgctatcatcaagctcctaaagctcatcatccacagaagcaaaggctctctctagatgcttccgagctgcctccatagttctctatcccgtggcggagcctgctccacaactagacttcagggtgcccttacttaaaggtcgttgcctcctcactagaaggccatgcatcatgggctgctcagttggtggaggccatagaggaagacgaggaagagatgatcttgtagcatctatagcacgagtggtccgagccaccttggccctcagataatctgaaggctcatctgaaggtccactaataagacctttcaacctgaaagacacatctcaaaaggaaagtagcaaagtcagaatgcaagacataaatattcaatgcaagataagaatataaaagatggtgtaatcaactatcaaatatcatcattcttagaagaggaatcatctgaatcctcaaaaactgccttgcccttgcctctagatgcatgcaagaggtgagtgggtcctgtagtgctctggcttctaggcctaatccaaagtgaagtgtcaccaactgtgccctaacaggcctagtcctagtggagggccctctctctcttcttcaaacctcgagctatttgaggttgaggcatatcatcgtccatgtgaaggacttgtccatcacgaagacagacctccttagaagctggggctctatccacaccaactgatagggcctgggcccccgtaattccagatgcaggagggtacagttcatacctctaaaacttagccacactggctaacctgattatgttcctcttctctacggggagggacaaggtatgattcacactatcccttatctataatgtagggatggagagcttgtaaaaatgcacccactggaaccaatggtgtcaaatctcatgaatgttcgaagcaatgaagtagttctgggcatacccaccaactttggacatagatgtgctattggtgtcacccaaccactgatggctaacctagttgaagtaaaagtatcgaattctttctgctttgtggtagactttagatcaaagtaatatccaatctcaaataaagtaggctaaggaaagcctagctccacatataaaacaaatatttctgaaaggtactttatactttttggggtgatttgtattggacacatctcaaagtaagcagcaatgtctctaaagtatgggtgtagtggcagcaccgcccctgcaatatatttttgggttttatgcccta

SEQ ID NO: 379536 - DNA, 4521 bp, Cannabis indica
aaaaaaataaaaagaaataaatgtacacgagattctctagctaatataaatttaattactaagttttagttgagtaaattatctattttaaggcatttgcttggtgaagatctcggacctcttaatgtgaaagagttgcaaaatcttgaaaaacaacttgaaggatctcttgcacaagttagacaaaagaaggtatatatatgcatcttatatacatgtaatgatatatatgttggaatttaacttctttattaattcctttttccctttcgatatatatatatatatatatttatacaatcaaatgcaacacattcatctcaatattatatacaccttaaaaacatttattcacagatgcagattatgattgaacaaatggaagacctgcgtaaaaaggtgcgcgcgttctgtgtggccatatatatatatatatatgtattcgtgatctaattagctacttttgatattgtttttattaatgaataataatcattggatattctgattgatcatcgaatgattgatatccttgtgatggttctctgcttcaatttggcaggagcgtcaacttggagaccttaacaagcagcttaagattaaggttattatatatgtttatatgtaattggcaaaatgtcctctgtttttgacgtgtagttaagatatatattatataataggtagtgtgtgatatgtatttgttttgtttgatttggtcagcttgacgcagaaggacaaaacctgaaagccattcaaaatcaaaacatatggaacagtaacttggcgtctggaagcaccagctttgctttgcatacttcttctcagagcaacatcacaatggactgccaccacctttcggaacccattttacaaatagggtaaataaagtgacaattaatatatatgatagttatatagtgttgccaaacaaacagccaaaggaaactataatttaagtttgtgactctgttgtttcatttttgaaaacagatatcatcagtatgtcccagctgaagggacttctcatagtataccaaagaccatgtctggttctgagactaacttcatgcaaggatgggtgctttgagtgagtactgccactatatatttggaccttataattaattaaagaaacagtataactttaattaaatcaacttatggtgtttgtaatacttaatttcatttctcatcttctaccgatcgactcattatttctactaattgcaaggcaggagttattagccctttcggtttttatctgtgatatgtaattccaataatatattacatatatatttatatcatatgtaaatgtgtgcagtatatttatatctatgagatgctctaagtgtccctttatggtgatataagttttcatgataaaaatgatattggaacatatcttacttaaggtactcttttttgtttttttttaaacaaaatcttaaaattacatgtaaacaaaatattatattcctcatcatcacacccatatattttttgttcataaaaggtaataatattaggtcgttcaaaaatcaacactatacccccacataatatatatataccatatccattcataagatacaaattacaaattaagctagtaatatacataggggaaatccctccccttgaaagttcatcaaactgctgttagctagatattctagcatcctttgaagcttgtcaacaaattgaacaacatcattattaacaaaagtaaaggaaacatctaccagtcagggggtcttccactagacaatgtgcgaaccactcgtagagagtcagtaagaatgatcagattgtcccattgatgatcatagcccaaagcaagactatttttaaagcctccaatttagctgaccaaaggctagtattgcaccaccaaatctttcatctttaaaacatccatcaataaaaaaaaaaatttctttgcaagagaagtatgcagtgttctatttgttagaggtctctggtaataaggagtggaagtgtaaagttgcatctccaagaatctccccacaacttcctaaactagatttcctataatcacatagttagaaaaattatggtaaacacactattcttccatttccaaataacttccatcaaaggcaaggcagataagaaattcagttatgttaagaacttgtaaacgagataaggcatttcagatgaaatcaacccacaaaagtaaaggtccaccaaaaccaaaaagcatgcagtcgcaacagagcatcaaaacaaataaatgaaaagggttttcctcataaacatgataaaataaacacttcttatcatcacgaaaagaatacttatctttggtagaaagaacgccagagacaatcctccaaatcatcatgctctatcttggattgtcaccaactccaaatatcctgagtagtggtaaatttattcttttgatcttctagataggcacttttgatagaaaaaagaccagaatgggaggctttccaaatcacagtatcaacatctaattgagaaagaatttaattgttcctactttttccccagttcttccccaaaaagaaattggagaaagtcttagtttcaagttctggatcttctaaaaaggagattccaggtattttacttcgaatagattacataatctcccacaattcttcatattccatccacgggatccaaagctgtcaccaaagatcaatatattcactagtggcaatgatagtccaggctccatcaagaacgatctttctagcctcaagaatatcattccacaaaaattatcagagtttagaggctgaacactcaaaaataattcataggggaaatatatatgtggctttgagggagatagtcaagggtctattggagtttgaagtcaagaaacaagcaattagccaaaagagctagatatcttccatacgtctaaaactcaaaccttcacaagatttgagttgacagaggtaatcccaagattttgcagccagaaatctattttatccaaagttccattcaaccagtatcttctgattgaagcatccaattctcggtaggaagtaattagaattttaacggtagacatagagtaggttgggatagcaagagcaatagagtttatagacaccattctcccaatagtagacatagtcttcattttccatccttccaatcactgacaaagttttgatttcaagaaatcgaaatccttttttcttttcttagtaaaaataaaggtgttgaccccgcttttagccaacgaggggagtctttaaagcatttggatttaataaaggttcggccctttgatgatagtaatagcctactcccctttttattatattattttgataattattaagatcacaagagtccgactaagtgagtttcttaacaatctcgaaaaaacttacaaatattttagcagcataagagctcttttgaaagtcgaaaaaaggatccttcctcagcgaaatgactcccctatttataaagaaaatacaagatgcaatgtttgaaaatagaattcgagaaactaactattaaatcccacgattctcttaatcagataaaccaatcccatagaaatatggattctaattaagctataattgtggagaaatttaaggaaaatatctttgggatcttcaattaccgcattcttctgtacggagaatggaactcagctagacatatctaatcttctagaagaagtgcgaggcatagaacttgctcagatgatacttgttgaagaactattcttaactaacatggccttgaatcgttgtggacgaaaccttaagcgagtataccccgtttaggtagaaatatgcttgatgtgtgttacccagttgagtgccatgtcaccttgtaaaaattgggataacatttgtcctccaagtctgtgtgggaacaacagctcgtacgtggacttcttcggattacaggtcgattagacgggtgacacgagtctgctcccacgtgacgtcctgggtataacacgaccttcccgaagcatgcatatcccctcacgtcactttagtatctccatcatttaatgctttgtctagaaaattatacattggatatcgtgtagacagttatggggaaacaggcttctgtcggttatacttcatgatgagctttaattgtcttcttttggggagggaagtgaaatttaaaactaaattactaactttcctttcgagtagcatataaaagaaaaactaaattccatttccaccttttttagtcattttcaaaaccaaaaatctaggcgcaagaattttcttcaaagttcttaagctttcaagctccgtttaagtgatctcacgaagtttcaagtgctcgacgatcacagtgagtaagtctttgccttattcttcctttacatttctgtctatgattgctctgctgcaaacttttaaatccccaaattaatgattgaaatctcaaaatcaaaatctttcataataaatagattgagaatcgagctttaatgggttctgtaacgtccccgcttca

SEQ ID NO: 379537 - DNA, 5753 bp, Cannabis indica
ttagtcacaataagtattgtaataaaagtacatttagtcataataaattgcaatttttagaacaaatcttttagtcataacacaaaaataattaaactcgctacttcttcaatgtgtctttatttttttttcttcttatacccctttaacattttggtgattgcaaaatatacaatacattatatacaaaattatagatagtaataagattgaaatggaaaatagaaaggatagaaaaatcattatctcattgctactaacttcaaaacaaatagagtagcaagacccagttaaagatatctccatatcaaaataaatagaaataaagatgagatatcaaacactgcaatatactctatatatgtttacaaattacattgtcattttttatcatatttctgaaaaaactttcctcaaacccaaaaactagttttacattgtaactaaaatcaaccccataaacaaaattatgaatgaaaagtaaataggctaaactcagtgaagcaataaacaagcaacatcatcttaggaaaaataaaactaaattcagagaaattggttataatttttgaaaaattatttgagcatataaaacacatagttcctaaaatctcacaaatcaacaaatttggagttgagtgaacattcgaggtggaataacagttcgcgatgaagcttggtgtgtgtgagtaaaaagctaataaaagcatccaactcaaacaaaattcattaatagaatttcaaaatctgatgaaaattcaaattaattttacaatatagaaatcaaatatgtaactacatcagtacatagagcccacttgtaaattggggattttggtattggatgagaaaaaaaaatactttgcataccatccaatgctttacaactgtaacccttaacatttttggttaatgaatctttagctcaactatcattatatttctcattcaaaaaactttagatacagtgtatatctagtctagatagagaaaatacgaaacaataattgacgagaaatgagaatctgtagcttgaatttgaaaattatatattatgggaaacaagagaatacataccttgaatttgaattgaaataatacctttgtaaccggagtcattaaaaacaaaggtctgatgaagatgaagctatggtttagcttctaaattaaaaaaaaaaatcattttaggagtgtttagatgaaattcttttttcaatttaaaagttcttttaaaagaagctagaatttgtagcttctctcttttgaacttttgagaagttacttttaagattaaaataatttatataatttctaaagggccccatggcacttctagaggactcgaaaacatcaaccaaccatttggtgtcgggacttacaacacccaagtgtgcccaaagtaaggttcatgggcccccacaagcgtttacaccctagaaacctcaatctatcaaggaaactaacaaggacttgacttattggggcatgaaaatgacttaagtttgtgcataaagtcaatatggcatcaaattctcaagaaaaaaggcatatgcacccactaccatatggaaatggcagcgtccatcaattttggtgggcactgccacaagggaatggcagtggtcgctccttactaaccatgaaaggaaaattattcaaatgaattccctcaacaccaaggagtgaaaaacaagtgagggaaaccacttcccacctaggatttaccttagtcgatcgaccaatgccataacgatatgccagtgcccaccaattttgatgggcactgccaacaagagatggcaatggtcaaacaagaagagaggaaatgagattttttgccaacaatgcattttcataaataatatgtcaaaactaagtgagaaaagacaccaagtggtaaagaaattacttggctgaccattgccttaaggaaatggtagtgccaatcaattttgatgggcattgctacaacggaatggcaatggtcagcccttgcataagggaaagggtttcattggccaagtgaaattttcaacatatatgcatcaaatacaaataagaaaattcacccaagacattataaagtccatattcgaccagtactgccataagaaatggcagtgcccatcaaatttggtgggcattgccacaatagagttgcaatggtcggctactacgcatggaaaggggatttattggccaaattgtattttcaacatccatgtagcaaatacaagtgagaaacaccacccatggcttcccgcaagccatggccgaccattgccaccttccggctccaattggtagtagtggtttcccattagggtttcgaacatcgaaataagatttttgggtctcgaaactcccaaaatatgactcaccataaaaaaaagtcaaaacacacctcaaagggtccgagaacatgcacggacgagcactgctatttggccatgtcagtgctcgtaactcgtacaagttagcattaactaccttcaataaagtaggcataactctctcaattattacccaatttacctggttcaacttacattagaaagataatttcaagacggatttaagtgtgtctcacaaccatgggtcaattcagaagttatcaaatccaaaattgactcacaagacaaactggtacattttctcgggaattgagtaatatggttaagtgagggttgttggaggacactgccaaagtccatgtggcattgtatgcgagcattgacactccaaaacaaaagtttttagtacttatcaccaatatcattcatttctaggcaagaggtgatatcccatcactccattttaaattggtgcatcctcaaccaaaataacaatttcctaatgtttgtgggatttttgcatagaaacaaggagatttttataaatatttatttttttgtaatattttattcattaaaatgagtggtatacatgatttgttagtgagatactcgacatgtgggggatcattaacaaaccctatagcctatatatagctcaagtaggaggctgggagagggacttttggaaccttacaggagacactacttcttctctctttttgtatccttttctgaaaccttttccttgtgactcacttgacggcagccaagaacatcacacttattccttcatcatctccattgagtccaccatactcaatcgacacaggacctcaaaacaccatcgatacacacctttctttacactttattggtttattattctcaagaaccttacaaccactaatttagatcatatttattagtatcaagtctcccaatagtcctatatttatgaatctcgattaagatttcacctcaaaatcctttgctatatatttatccacacactcttaagaacataactttggtgtgtcggatctaatcaataaactaaactagaagtagccccattactatcgcgatattggggtgaactactataaatccctagtgtccattttaatttattgcggttttattagtcaaattcattcactgtggtcctcttttattttacaatcttctttgatcagttaacgaaaaaccacatcaatagtttggtactttcgttgagaacgctatggtgaaaatctgattgttttccccttggaaaactcatcaatttacttttttttttacaacaatggtgtttggtacgagaaggatcaattatgagaaggataatgaagtcgcaagagaaattaatcaatccaaagtgaaggaacctttgtccctccacaaccacatggagagggaacctctaggcgctaagagaagcgtcccatgcttcctatgccagaagatgaggggcatgtccaagattgtgagagttcctcatctccatctaaggagcgcccaccaatcaggtccatacctgtccatgaggtgttccaagaaaatgaaactctatgcgtctagttggcgaaaagcctgcgccacaatagaaagctccaagagcaaacccaaaggcatggggaccaaccccctgtaccaagaaatccttctccacctaggagaagaagggagcgcccaaggaaagaagatgcccctatgaataatccaacaaggagggggaccaccaacctttaccaaatgttggagcccatggaagacatccacaagaaacccatgtaccattacatggaggtggtcaaaaaattcatgtgacctaagttgttcctcctaatcgtgagaataataacatgggtggagaagaaaggagagaccaaccttctccaattcgagaaccaccgtcacctataaggtacgacgatcctttaattgctaccatttcataagaaccaaggcggtccacctcccatggtaatgtgccatatgtttaaccacctagggggcataggcgacgcaccgtacctcacaaagattgcgcctatcggaggccagatatcgtgggcaaaaacaaaggatgcccccaaaggcaccaacctgcccaagaaaaagttatgtgtccaaatcagacaccactttgacgatgtactctgagccgcccccacactctcctcatcatccacaacaacaaagaacggtaagctttattgaggatagcagtcattctaactctaaaagacgctccattagtgttcataataatgaatctcgcaattataaacgtcgtcacaataaccgtcctccaggggatgcaagaagacctgatttgcgagaactcctcaatcaaagacaacctgatttgagggaacatttgaatagaaggtaaaacctaattccaccagtggcaaataacaaggataatatcgatgggggacatcaaaatagcatccccaagctggccatggcgaggaaagacaagtcaatgaccctaggctcaatgctttggaaatgatacaataactaaaatgtcactgggtatgattcagatgaggagccagagccttactctcctagaatattggccttaacatattcgcaagggtttaagatgctgaccacaacgaagtacgataggagtacggatcctagagtacacataagtgactttgacacacttatgcgtgcccaccaagtagttgagacttgagatgtgtgttatttcctgtaacacttactggagtagccaagacttggttcaagaaatttaagaggcactccattacctcatgggacaaactctcacgcgacttgaagaaggaattacgcggctcaaaggctagaaaattaaaatgttcatgccttaccaatgtgaagcaacaaccgggtgagagcttgaaagcttatatcaaccattttaatgtcgaggctgccaaggccaaagacgttgatgataatagaagacttatggcgctgggggtaggaattactaatgggtcacaattttgggatagtttgcaaggaaagggagcacgcactatagatgagttcatgaaaagagcacaaacatacattaatagggaagaggcaaggttggccaataacctccctcttgtatctggagcaatagaagctactcccacttcaacaaacaataatccctccaatgcgaacacttccaataagaggaaaaatgtaacaccctactagtttaggcgtgttatcgtgattttaacttaattgtgtaactagttgctaatcaacgagtttattaaaatttatgaataattaaaactttattttattacttataaataccaaaataataacatatacatatatataactgggattccgtttacaaaatatttacaaatgtttcatagt

SEQ ID NO: 379538 - DNA, 4416 bp, Cannabis indica
ttttttttttaaaaaaagtaattcgaaactttacttccaatcttaatatatttatatatttaactcaattaatagtaatttaaaatattttcattcataatttaatataataataaatttataaataatcgtatttttcacgttaatattttattttaaatatctcgtaccaaatattaccttaaataatgtagaatttttttaaaatgcacctcataaaacaggttcatcaatacacctctacctgttttaatattttggagaatttttcagttaatttttttttgttcgtctatgttgtaattatttaagacatctcacaatattttgaaaaattcaaaaaaatttgacataaaaaaattatgaaccttatttttaacatgttaaaattttcgaatatctctaaattttataaaatgtatgtcttaaataactaaaataactacaatgtagacgactataaaaaaattcgaactaaaaaattctctcaaaagctgaaacaaataagaggtgcatcagtagaacccttccacgagtgtattgtagaagtatccaataatataaagagcattgctattgggcaccagtaatacccgacacgatcgtcaaatctaactatattaccccttttttttagagcattacaccttctcgatatatcacgttgcgattggctagtgatactttctaaaaactattatattaaactacccgatacttagttaaaataataaggatacggacacataagagggtgtgtagtgacctttagcaaattttttttttttctattattaattaataagaaaaatgttagaaataggacgaccaaagacttttcttttgtttctttctccattcaccgattcgaaacgtcatccatacgaaacggcagatctcatcttcttcttcttcttcttcaaacccaaaaacaaacaaagaacacagagcttttttcaatgcttttttgggtctgacattcatcttcaattctaatggcccgaactcgatcttcctcttccaaattgaggtactgtaaccctgcttattacctcaagaggcctaaacgattggctttcctcttcattgcttttgtctgtctcagtttcctcgtttgggatcgtcagactctcgttcgggaacacgaggtaaccaacctcctttttttcatttttttttcaatttcatttccaccagttttgttgctgagaaaaattctagacgggaaagattcaaattaaattaaaagtttgaattttggactcggtggcttcactttttctcggatctgattcgtttttacggttgggtttgttgagtgttgttctttgtctcttatttttgaattataattgaatgggaaggattgacagtgttttgtttggattgtttgaacttcagattctctacatattggttttgatattcgttgaaataatgtcttggattgttttatgatgtgatagttctagaggcttacttgttttctactttaatggaaaaaaaaaaccattctcaattgcaggtagagcttgcaaagttaagtgaggacgtggctcacttgcagaatttggtaagagattgatctttcttctactatgcaatctttaatggttgatttgccttgataagatttgggattattaggcatgatatttctacaagttcttataagattttgaaaagaaaagtatatgttgacattagtgttgctctttgagattggtgttgttcactgtccatttggtcaattttcttcaattctagttttatgtgagctattattatttctcttcaaaagtgaaaatgaaggttatgttttcaatttttgaaaataaaaacagaagataaaagtattctcagtatgtgcacagtggtattagatggtttcaataattgcaatttaccctttaatgcgtaccccgttcaattattgcaatttaacttggtgaatgctttgttgtctttaaatatatgaggtttgaggtttcaattctctgtaacttgggaggaggttactcatggacatttgacctttgtaattggaaataattagataagtcctcacaaaataattaactggtggtaaaaatagttaacatagctactttgatgggttctctgttgcgacttaattgtgaattctaaatgaatgttgcaattatgttgtcaaggaaaagagtaataagaacccagcttttgttaaatatgggatgttttctctcaacacaccagttttttttttttgctcattagtgctcagcattttgcattttaagctcaatgtttagcagtgatttcttaatccaattttgacttgtaccttcagcttgaagagataaagactgatggcagtgctgtcagaaagacactgaaagatgttccagatgatccaattgatgttcaacgaagagaaaaagtaaaagatgctatgcttcatgcgtggaattcatatgtcaagtatgcatggggccaagatgaacttcaggtaccaagtacacttgtaaaatatatctgctgtattagtggttgattccctgagtttgtatatttctaacatataaacatataactgtgacaggaagaaaataattgttcttgtgtatgggtctaaattgatgttttctcctctttttcaagttctcttgtctgaatttttactgttgggtattttgatttaatgaagcaccaggactaacttgtgtttttcattttaccagcctcagtctaagagtggtgtcaatagctttggtggtcttggagcaacattagtagattctcttgatacgttatatatcatgggtcttcatgaacagtttcagaaagcaagagagtgagttgatattttcgtctttattgttttgatgatctcatttagatgcctagaatagacattctgcattccacttttggtgataacacgattatttggaaatgagttctgctcgctgtaagcttctttcttcatatagttgtatatatttgctcaagtcaatcttaatgtcctcaactttggtccaatttcaactctggtttctgtgattgtcattttatattattattttaatcttcttttatggtactttaattcaaaagtttacattttattttacatgcttgcgtgaaatgttgatattcttttcttgtttatccatttgatatccaattcataattatgtgatactttttgcaggtgggttgcaaattcattggattttaacaagaattacgaggctagtgtctttgagacaaccataaggttgcattataaggtttaaaatgttgttggtcttgattgttttcttcatgcgaatgaattatcattggatcttagttttctaaggctttcaatagttatcgcagagacaactttagatgctctttctgacatcttttttattttttttggactcttttcaccgagatccagagttgtaggtggtcttcttagtgcatatgatctgtccaacgatcaacttttccttgataaggctaaagacattgcagacaggttgctgccagcatgggatacgcctagtggaattccttacaacattatcaacttggctcagggaaggccacataatccgggatggactggggtaagtcgttacatctccaattacttgaagtttgatcttgtatttttgttgaattgatttgttaatatttgatagagaagtgcttcatagtaatattgtcaatagaccaagtgagtcgtgctctaaatatactgatatcatttagcaatgtctttgtagctaatatatgttttgtactttatttgtttccattactggcaaagacttttaagagttcaattaacaaacgattattgtttgctcttagggtgaaagtatcttggcagattctggcacagagcagttggaattcattgctctttctcaaagaactggagatcctaagtaccaagaaaaggttaatgctttttcccaattcatttacggttgtgaataaatggatgtgattaatgtgacaaaacatgtttgttaactcgttatggttggtatctagcaaactgtaactttgatgatgttataagtttaaaaattgttctaggagtttagagaactaagacctctgaaatatctctggaaatctatttaatgacacctaaatgattaacaaatctaacggcatatatataaatttgctaatcctagcctcgctgagtcctaattcaaataaaaatgcaaatagtacgattaagcactgcagattatttctccttatttattttcctctcgatgaggattccttattctctctattgtaatttattttttcctttaacaaaagctttttgtttctaatgatgtgtgggtgtgcgctcatagaacagtgagctgaattatgtccatgttacttttccaggttgagaatgttataacacag

SEQ ID NO: 379539 - DNA, 1504 bp, Cannabis indica
tttgattggaggtttttcttgggagtttagtaatcagtatatttgggatttgttcttgtgcactgaactatgactatgttttccagtcacccatcaccatctgtgctcattcctgctcttcgtactgttgggaatattgtcactggagatgatttgcaaactcaggtttaaatttttctttagcttgtgtaattatttgcattctctaattttgcatgatgacttttcaactggagttctgtttgcatcttgagctaagtatctgttactctgttcaggtcatcataagtcatcaagctcttccctgtttgctgactttattgacaaacaattataagaagagtatcaagaaagaggcatgctggactatctcaaacatcacagctggaaacaaggagcagattcaggtatagctgctgatctgaattcaaaaatgtttcagtttctttcctctttattttatacttaacaatctttggagacatgagaatttaatcttggactaatgagtgattgtatgtgtgatttacatttgagactttaatcttgttctaatgagtggttgtattttatgatttgcatattacagtgtgtagttgaggctggtataattgcccccctcgttaatcttcttcaaaatgctgaatttgatattaaaaaggaggctgcctgggctatctcaaatgctacatctggtggttctcatgaccaaataaagtacgttattttacttgattgtattgttaattattttatgtgcagatgtgctgatctgtttgttccttttttctttggtttcaggttcttagtaaatcaagggtgtatcaaaccattgtgtgatcttctaatctgccctgatcctaggattgtcacagtatgtttggaagggcttgaaaacattttgaaggttggagaagccgaaaagaatttgggtaacactggaggtgttaatctttatgctcagctaattgatgatgctgaagggttggagaaaattgagaatctacaaagtcacgacaatacagagatatatgaaaaggctgtaaagatccttgaaacgtattggctcgaggaagaggatgacacaatgccacctggtgactcagctcaatccggattcaactttggagggagtgaggttcctgccgttccttctggtggattcaatttcagctgaaggtagttagtgtatacatacagatcatgtccctgaattgttttgactacgatgattaatttctgatatcagtttgtttgatttgtataacagagcggggcaaatcttaagagtggctcgaccaagctatagcatggggacttaatatacgacaaccatctgtgacgaaaggattaaagccaagtggggtttctatttttggtgagtcgtttatcccgaatggctgttgttgggttatcacatacagcggatgtcaagtcttgcatttttcttcttattcttatttttgtttttagttttgatagaaaatgttgtagctaaaaaagt

SEQ ID NO: 379540 - DNA, 1872 bp, Cannabis indica
gccatagaaacgccgctatacacatcttagctttcgccgattcgattatgaccaaccacacaatcatcataatcatataatcatatgctctactctattagttttttttcttctttttttttaaataccaaataaaataatattctattggctttttttttctcttttttatacttaataaaataatattagatgcaattttcactttggattgacattgttgtggttgtaggcattctattattgaatttttctgccttagaagagaaaatctaaaagttaaaactaaacttatgacactatattcaggaagttttgaaagataaattttcttgattaattataattttgtcataaaaggaaaatagttggttatttctctatataaatcttctaaacatttcatttgtttagtgtgctaatcaattttctatttattttgtaggtttataaaaattgttcatttagattaggtgtcttatttgggatagtttcaagtagttttgttcaaatttttgaggtaatttggttatatataagtcgctttgttttgtagcgattcatattctgactttgtatacattttggctagacaattggcttgttggctgaaagtctctttgcgtcaacctttgttttttcgtaatttaaatcacttattcaaaaaaaaataataattatattagatgcttctacaatgtatcatgtttatgagtttgaatataagatacaaggttaattaggatttttgccctcgaactttaacatgtaccaaattataccccctaaacttttaaggtcgttaaaaatttctcttaaactattgagatttttagatttaaggattatttttttcaattttagtaaaaaagtctaacatgaatgaaacttcacgatacatgatcgtcctgaagcaatgtttcttaaggatcttgctttcggatgtaagatccggtggggaactctccaagcagatttgggagagaactctctcgtaccttagctatatccgttagtgtgggtattaattgcttggtttttccttattcttttccagatgctattatggcaatgtagtccatgctaagaaggtggaacttctagaacaagaagaaatcgaagctccacaagtagtgtataatttatctcaaagagatatggattagtacactaatgagtttcaaaactacgaatcattacgagcctacaaagaaaaatgtagcctcaagaacatcccaggcctattctggaataggcttttgctgctgggggaattgccatgtaagtgtgcagataaatttggtgtctggaactaggcacacgtaaaagtaggagcgcatcttccacttgtagctatttcgtacgtttctgtgcagcaatgggcatagcgcccttccaaatgattccccaagcttacacgttgttggcggattggttcgtcctatgcatagaccaaaatgtggaaattccaacatcatatgagattctttacttttaccaagtaaagtcaaatctcatgcagaaaaattgaagcaagatcaacttctgcatgctggaaaggtggtctaaattggtgatttgatggactagtactttgaaatacacccacaacttctaggactactggttcttcaccactagcttcctgttaaagagatttccaactctatcattagacttcaatgttctaggtatgtgataccactttttctcattttctctcaaaacttcttctaatttttttgatataatctgtaagtgtcttgttttgtgtggcaaattagatattgcttttgttcagtatttgttgtctctaacatctgttctgtagttagttgcatctgttttcactaatatcattttagtgccatg

SEQ ID NO: 379541 - DNA, 2579 bp, Cannabis indica
ttagatggggctgggggatgatactcctgcttagacaataattgtttaattattttattttactttttagtagtatctttatttcttatgtattttcttggtatgatagtaattttctttttcaaatatatctatagaattttaagttatatttgttttgaataataaataatgtgtattattttaaattttacgtaatttattttttatatatttaattttatatataaactttggttcaaaataaagtggtaacatgaaaaatttttgctctgtcttgataaaaaatgcgcggagatgggggatgggagcgaggataggagaagcactccatgcctctatgcatccctagttggcattcatgggagtctgaagcatctttgcatcaaaccgaccattcaaattgttttgagtcataccaccacattcataatatttcttgtggttttgggcgttcataaactactaaatcttgtctccgattgtggtggcattgctgtgtcatggactagctatttggacatcccaagtaggcgggacgtgcgatacttgttggcatactgaactaacaagtcaacctaaacgcgtttgcaggcaaacaaatccaattgttagatacgatgcatgtctctcacatgttgagtgcaacaacaaaatatgagcaagcacatcataagtcattccaaggttcaatttcacacaactcacaagtaaacaacacagacaattagcacacaataacccaatgaaggcaacaaacaggcaacacatagaacttatataatcatacataaagaactatggataaataacattttattgatacgtggccttggtagggcaacaaaatacacaattgaatccttatctgttagtaaaggtacttcataagtcaccaagtcaccccaccttaaagagcttaatggggtttcaaaatatttctagaaacatatatgattttatctttgcataaatatgtgagggaaattacaaacaatgataattacaaaaatgctattgttgtgaaaattactctacgcaagtgcacacaatcgtcaacaagtaataaagtaataaatcgagtatcgtctccacatggattgaaaattagaaaataatttacaaaactaattactcataattagtttcaacaaaaataaaataaaataatacttgctcagtcaaaatagagaacttatctgatctagtgtgtgatgctctctcctcctcgtcatagctaagaagaagcggattgcctcaaagccagcaaaatcagcaccaatggtgaattgattgatcgagaactccctttgatccaagatgagagtgaagagattgctcagtcgaaagtctttcacgatccctgtgatgtgctagaactagtgcagcagctaacagaggaaattgggaattctaagtccaccccaaattgatgagctgggcggcggaggtggagaaagttgacttccaatcgaatgcaaaagagacttggagaaaattcaagaccatccaggttagatctctttccacacgattggatttcacagagccactcaaagtaggagatcaaataataacgaaattggatcttgatgaaattgaaactgaagcttccttttggaaatattcaattgtttgtattgtgttgggagccaatcctccttttaaggtttttgaaggatttgtgaagaggatttgggaaaatatggaaatagaaagaatagaaagaatgcattcaggatttactcttgtgagttttagggatgaagatacaagagatttaatcctaaaaatatgtgttatccattttaacaattgtcagttgttcttcggccttggtctactgatatggacactgcacaaatggtgaaatttgtacctatgtggattcgactaaatggtctagggctgcaatattgggggaagaatagtctaagtgccttggttagcactgttagtaaatatatcatgatggataaggttacctaagaaaaaatgatgatcaaatttgctcaggttttagtggatgttgaaatcacagatgagcttcctaaggctattacatttcttaatgagaaaaaacaattagtggagcaatccattaagtgagtggttaccttctaaacgtgcagcttgtactatgttgggtcatacagttactaactgcaacaaggagaagggctttgtttggaagaaaaaaatagtggctgacaagaaagaaaccaacctgggtaaaaaatcttcagtagcagaaggtactgctggtgcaaaacagaagtcaaaggattagaagcagaaaatatggttacctcttgtgataaagagaaggatataattgaagataaggaggaggaggagcagagaaaaatcgattctcatcctgatgttgaaatgagcaaaatttaggcttttacagaatttaatttagattttttatgaattagttatgattttttaaagttttaaaaacaaaatttctaagggagcatgcctccacgctcgcatggggacacaactgtgtgtcatgtgcggctcgctcggacaagatccctttgttgggaattattttaccaggatct

SEQ ID NO: 379542 - DNA, 7148 bp, Cannabis indica
ttttttttttgggtcaaaataatgttagtgatttgtgtaaattagatttgatttgattagcaggtgcaatagataagattttgtttggttttttggttgtcttcgacatcgacggtagacgacgaccgtagctgagaatagggtggtgaggctcgacgtggctggagatggaggtggggttgttggattgagagagagaaacagaatgaactctattcattaatggagccaatagctcagtatatatacagtgcgagaaaggaaggaaagagcaacagaaaataactaattacagttatacataacgatatacagctgtaacagaaacaacaagcaactaaacacacctaactaacaccagtactaacaccccctcaaacttagtgtggataaagacaccagactaagtttagacctaagcagatgaaaccgtgtagaggacaaggcctttgtgaggatgtcagctatttgatcacaggctggtgtgtgtcgaacaaaaagttgtttgttggctactctttctcgaacgaaatagaggtccaattcaatatgttttgttctggcatggagaatggggttggctgccatcaagactgtgctttgattatcacaccacatagttggtggttgtgataattggaccccaatctcagaaagtaaagcttgaaccgagataacctttgctgtagtttgtgccaaacttcgatactcggcttctatactggacctagaaacagtttgttgtttcttggagggccaggagacaatattgggaccgagatagacacaaaaacctgaagttgagcgcctgtcatctgggcctgaagcccaatcggcatcacaaaaaccaattgaattgagtgatgcagagggtttcatgtgcagacaatttctcaccccctattttctagtgtgattctagaggtgtttgcatgagctgagacactctattgacagcatatgatatctctggcctggtgatagtggcatactacaaagcacccacaatgcttctgtagtaagttggatcaacaaagggatcactgccttgtgcaaacaatttctcaccccctgtcataggtgttggtaaaggattaacattgtccatcttagttttggtaagcaagtccataatgtacttcttttgagacaagtgctgctcctctgtggtgtgagacacttgaataccaagaaagtaattgatggagcccaagtcttttaatgcaaacatgtgattgagactggagatgagatctgtaacagcagtttgagaactaccagtcaccaaaataccgtctacatagaccagaagaaaggttgtgtgagaagtcgtgtgtctatggaagagagaattgttagctttagcacaagagaaaccaaaggagtgtaaggcatctttaagcttgttaaaccaagccccaggagcttgtttcagtccataaatggctttggttaatttgcagactagatggggagcttctggatcaacaaaacccggaggttgagccataaacacctcttcttgtagctccccatttagaaaggcactatttacatctagttgtctgatagactagttgtaagataatgcaattgtaagagcaattttgactgtggcagtcttcacaactggactataagtctatgtaaaatcaaatccacattgttagaggaaccctttggccactaaccttgctttgtattgagtgacacttccctctgcatttttcttctctttgtaaacccacttacaaacgattgcttttcttccaagaggtaagggaaccttgacccaaggtttcttttgtgtaagcactttgagttcagtttgcatagcagcaaaccacttgggatctttgagtgctgtagctaaggtgagtggttccttggttgctactaaaactttaggcttggacacccctgccttaacccttgttaccatagggtgtttattttgaggagcagtaggggctggtgcaggtgattcagcagcaggtgctgtgacaggggtagtgtctgaagctccagaacttggttctggtatggagttggagctagagatgggagattgaggattaatggtggggagagtgggagtggaagatggtgaagtgggaggaacatgggtggagaggctaatagctagggacattagcagatgtattagaggtagggacatgtggagtggtgtgaggggaaaacagagtagaatatggaaaatgatgttcattaaaaatgacatttctagagatgtatattttacctgtttgggaaaggcacttataccttttgtgttttagactgtatcctaaaaacacacactgaactgacctgaattccaacttatttttcttgtagggccttgtgttagggtagcaagcacacccaaacactttgagttggctgtagtcaggatctttatgaaaaaaagccttgaatggggtagagttcttaagaacagaagttgggagtcgatttatgatataagcagaggctctaacagcctcatccgaaaaggataggggcatagaagcttgagcaagaagtgtaaggactgactcgactaaatgtctgtgttttcgttcagcaacaccattttgttggtgtgttgtagggcatgagactttgtgagctataccatgagtcaacaagtaaggttcaagggcttggtattcaccgccctagtcagattgaagggctttaatagaaaattcaaactgtttttccacttgaattttgaaattaatgaaagtgggaagtgccttagactttgttttgagtaaaaatacccaagtatattggctataggtatcaatgaaatgaacataatacctatagccagatgaggaaaattctggggaaggaccccagagatcactgtgtattagctcaagtggttttgtgtacacggtttgggagctagggaaaggaaatttgtgcatcttacctttgcagcaagcatcacaaatgtcattgacaattttattagaattggaaatattacaaagagacattacatgttggacagttctagcagcagatgtgctagtttcttgtgccacaaagaaaaattagaacattgatcatcattacagttgctcttttgagcattatttacagagtaggagacagttggtaggacagactgactggtggaagtgccttgaaattgcatatgtgaagaaggaatgacatagaggccatgtttaagatgtccctccatcaacacaaccgtggaatcttgatcttcgacaaagcaatgattaggatagaattcaaaaaaggcattgttatcaaatgcaaattgggagacactaataagattgttggtgatttgagggacatgaagaagttgatttagaactaaagtctaggaagtgtagggtgtgtggaaaaaggtcttaccaacattttggatctacagacctacaccatcgcccatatgtctctgatctgttccaaaataaggctcctcatgagtgaaattagtagcattggcagtacagtggcttgtggcacctgaatcagggtaccacgaagcatctgcaactgtgtcagcagttgctaaattagcagaaaaatgttacacattagctgctctactcctggaaaatccatgttaaatcgttgatagcagcaagaagcaatgtgccctggtttggagcatagttgacaaacaattcgagatctaggggcaccattggagtaggtgttgggagcagattggcctagtagagaagcagagactccacgaccttaaggtgtggacattaagttagatagagagccaccaacaacacgaggtgggacaacatagggattccaagattctcgtcctcttccatttaaggcagaggaaggagtaacctgttatctgcattggaataagaataaccagatccacgacctctagatggtcgattagtggcaagattaatagagtcaagctctttgtggtgactatccattcgacgctcttgtgagagcaagagagattagatttcagctatggtgtatggttgattccgtgaattaacagatatgatggaagtgtcatatttagtaggcaatcctttaaaggttgcagatatatgttctttaacagaaacatgatgaccaacagattcaattcgatcaacgacaattttgattttgagcaagtaatcattaacagaaagagaacctttcttgattgtagataactgattagtgaactggtcaattttttgcaaaggtttgagtggagaaatatacctcaagtgttttccagacttgagcagatgtctcattgccaacaacacgagtcaagacgccttctatcatggaagaaagaagccatgagtagagaagctggttttgctgctctcattggagatacaaagggttgattcgtcgagcatgttgatccagtttagttagaaactttggtggtctggaggagcagtttcaccggagatgtaattgacgagttgatggccacgaatcactgacaaaacttgaggatgccagagtaagaaattgttgttgtcaagcttgatagagtgtttgtgggagaacaccactggttgaaacggatgagctgcaactcctggaacgtcggacgtggccggagaagatgaaggagtcgtcattgatcaagaagcaaacgattgagaataacagatttgagctgaaaacgaatctaagaagagagaaaaccgattgcagaagcgaaaaaaaacgaggctacttagataccatgttggattgagagagagaaacagaatgaaatgaatagaatgaactctgttcattaatggagccaatggctcagtatatatacaatgcgagaaaggaaggaaagagcaacataaaataactaattacaattataaataactatatacagctgtaacagaaataacaaacaactaaacacacctaactaacaccagtactaacagggtgagggtcatggctgaggtgggtgaagaagacgatgaagaaaaaaaaattttaaatattttttagttttttattttaaaatttttaaaaaattatgatctggaccaataaaaaattgacacgacatgttattagtatttaatagatcagttaatagatcaggttatgagtaaggagtcaaaatatgatctttaacaccatctaaattatcaatatactacaaattagggctcggtcaagaaaatatatagtttattaacactattaactatatattcacaaccttttgtgtaagttttattttgtaatttgtgataacaagattgtatcttatttaaggcatacatgaagatcttattaatagtagtatttacgtgggtaccctattatttctctatttcttataagatccagatcatcttcttcagcaataggttcatcccactccatatatttagtgttactagatggaattgtatgagtccatctagaagagatttgaccaacatgcatatcatattcaaaccaatcttccacaatgcctcctatcttttgttgtgtaaaatagacacaattacctttacaacccactttttcagccgaaaccaaaatacaacaatcacttcccacaaacaatgtcttctcatcaagactcttcattttgatccaacataaatcatccaaacaaagcttataaacctcaacatcatccacaactctatcttcttttccaaatacaagaaaaactaacaagatatcaccttcatattctatcaaacactctctaaaacccttgcaaattatcgaaggaatcgctcgtgtttttccaaaacatgtgatttcaaaacgatattgttcattattggtaaagaaaccgtgttcatccacacgctcaataaccgcaagagttccttgtgagctcaaagcgaagaactttccattgacgccaattacatttgtgaatcgcatgtatttctctctacgataacattttttgtctcgaaatgtttcatcgtgtggatcaacaatagtacaatcttgtttaatccatccgttacctgcttcaccggtaagaatgatgaaagccggcgatgaaatcgccgtcacaaccatcaccatgcaggatctattcaaatcgtattcagaaggaggtgacgaaatagcaacacatttaacaggaatgtcgtcctccaaacttggaagagtccaaccttgggaataattatacgtatcaacagggttgaaaatatttagttcagttgtcaaaccaaccactcgtcgcaccaccaaatgaccatggcaacaacccaaaaagtgttgccatggatattgtttcggtgcttgcctccattgaacccaatagaatggatctcgaggaaatgacattttacagtatcctgaattgacatggttttgagtgttttcgtctggaaaattgtaatcttgatcggattcgataagccaatcatatggattaatactgcagtgccttttgttcgaatgagatctccatgactttattacgcaattgaagttgatggttggcatcatagatgagtgcttttgtaagtgtttgatgagacgttgtggaagatttggccatgaatatttggagtagttttggttattggggtcatttttgttaggagatataccttttttcttggtcttcattgtttgttgtataacttgtaataataatgtatttgattatggaattgaacttaatgtataacaaatttaagacgtggtgtccaagttccacatatatgtttgtcaatttttttgatattgttttccttcaactccaaggaacacatacactcttattttattcggtacataatttatgttattagagttgacttagttttgctttgacatttttattaatcataattgagcttatataggtacgtattgtttgtaattattatattatttttgatgaatctcctatggttagtgtcttctgtttatatttataaacctataaaaacaattaattaaactcaactaattaattaagtcttcttagcataataataaaaaaaaaactcctaactagaatcaatccatgtgcatgtatttatatgtggatttttatatataaatatatatatatatatatatgggtatgctcttaatgggtattacccatgtatgtgtatttaattcttgaccattggatcaaatatctaatg

SEQ ID NO: 379543 - DNA, 4096 bp, Cannabis indica
aggaaaatctttctaacacagatgggtttagctgaatttacttctaaaagtaatagttctcgagaggtggaaattgaggtcgatagctcatctaagataatggcgagggacagactagttgagtgtggtggaactgtttctcgtggttctatgttttctgttagtcacattgaggaaactttggattgttgtagaggggaagagagtggtgaagcaaattctttgtctaatgtgctacaccaaaaagaagatcatagtatagttttagctgtagagtctccacctaaagaagctgaagttcatgtagaatgtcatactcttaatgatgataaccaaaaaagtgaagagttggtggaagcgttttgtaaataagagcaagggaagagtcagtagagtggcgtgtgatgcctcaaaatcagtaatgcaaactactaaagcatcaaagctgaaggtgattcataacaagaagatgtgcttagagttcacggcccctgtcattggacaagaaatccgtgctcatgagggcttcatttgttcgatgaagtttagtccagatggtcagtttcttgcaagtggcggtgaagatggagttgtacgggtttggcgtgtaatgacaatggcatcttctgattatttatcagctaaaggaagcttttgtagtaaactgaaggagggaaatccagttttcaaggaaacatccaatccgtgcctctgttatctttcctgagacatttttcggattgatgagaccccagtacatgagttttatggtcactctagtgatgtgttagacctggcttggtccaattcaaatgtgagtctgccttttcaaaattgagttgttcttttgttaaaattagactaattagttatatatgctgtcttattgagctggaaatgatctttttcttattagtttttcttttgctttgctgcagtgtattatttcatcctccaaggataaaactgttcgactttggcaattgggtcgcaaagattgtctcaacaagttcgagcacaataattatggtaaatatagttcgaagcattcttttaattaaatagattttgccattcataaatctaatgattttgcctttctattataaccagttacctgcatccagttcaatcctctagatgacaattacttcatcagtggctccattgatggaaaagttcgaatctggggattatcggagaagcgagttgttgattggactgatgtccgagatgtgatcactgctataagttaccaacctgatggaaaagtatgattcatgatacctttttactgcataatttctgaattgtaaaatttccctccaaaatactaaccattttagtctattttacacatgcaggggtttatagttggctccatcactggcacttgccgtacctatcgaacatcaggtaatttccattctctcattctacaaaagaacaattccatttcttgtatgctgtacatgaaatgaaaattaccatccattggaagtgcctaatatattgttatttctatgcaggcgaatgtcttatgttggattcacagatacacattcccggtaaaaagaaagcttcaggcaataaaataactggcatcaaggtttgcactgaatctctttctagtttatttctatttaatatttttttacacctaatgcttagcttctattctgagactcaaagttcatgtaattcttatagaaaaatgtttttgctctttccagttctcccaggataaaagtcaaagtgttatgatatcttcagaggactccaaacttcgcatatttgatggggttgatcttactcataaatataaaggtaagagcgtcaaatctggaatcattttcaatatagttacctgtacattgagttttttcttcttttatattagaacttagtagaacatgattgcaattctcaaataatagatatcttaataaagtggttgtttaatttaatttgccaatttgtgattgattgcattattttcttgttatgtaatcttatttcattttaaaagattggcaacctacacttttctctgttttttttttttgtacagcctacccttttctgtaatatctaatctagattatacactgcatcggtgcatctaaattccccaagtgattttgtttttcttgggtaaaatgattttgatttctaatagtcctttacagctgggatttccacttgttacaatgagtgttttctttgctaactagtccaaggccacttgtttttttttttacttaagagtgtcattatttagtgagtaattatgtgcacactcaaattactcacaaattttgatagcaaaatatttcaacttttcacttttcacacattcactgaatctacacagtggtactaaaataattaatgcaacatttgatctagtcttggtttactgatcttgtcatttttgtaacaggtcttcccaagtcaggaagtcaagtctcagcttcttttacttcgagtgagaggcacataatatccgtcggagaagattctcatgtatatatctggaaccatgatgccttgtctgctccttcgtcgaaacaaacaaaatccgttcgatcttgtgagcatttctttcacgacggtgtgtctgttgccattccatggtcaggaatgggaacagaacagaacaacttgagcaatgcacaggaccacctagaaacgacatcatggaccagagattcagagcgtttttctcttggtagttggttttccatagacgggacatgtaagggatctgcaacttggcctgaggagaaacttcctttgtgggatatctcattcacagaagaccatgatagtttgcagcaacaccaccataaccccacagctatatcagaaacatgggggcttgttatagtaacagccggattagatggaacaataaggacattccataactatggattgcctgtcagactctaagctcatcgttctgtgttatcggatttaatatcaacatttctgctgaacagaatgtgttgtgtatgtatgtacattttcatacttgttcatataaactaggcagttctcttggtatcctgccaaggagataggactacaattttgtttcttattttctcctcttttgtgaagaatagtttaatgtatatgagaatacagaaaaagtaaaatacaatttattattttattttattttgaaagggaattattatatatttctgtgttttgttctgcttctttcaatgtgagctttaatttatcccaatgcaactcgagtcaacaagctgacattggtattcattgttcaaatcatttctttctattctttagaataacatcatttatttgttatttcagaaaaaggttctctgctagaaaagaagacaaatggctctcaatgatgtaccaatgagggaacacccttggaaagaagttaaaagtgaaaaaaataaaggaaattacctatatatattattttttaacttttatttttaatttatgatttaggttgctctggtgatttctatataagttgttatgcggattttagttgcgttccgttagttgctataggagtttctgtgtgaaatttcgtaaaaatgacaaaaaaaaaaaaaaaaaaaaaaaaaaaactagttttaaaaatagtaaaaaaaataaaaaaaaaaactaccaaaaaataaaacgaagggaaaccaaaaaaaattagaacattaagcaatgataaatcataaatgttcacaaactatgtatcaaattattaggcatgtgtcatattaacaaaccacatttgttatgatgctcctactataccaagaagagtattattattattattaatttttttttttttgataattagagacttttattgaaagaaagctaaactagattagaagccacaaagggagccgcttctcttaacaaaccagagtttttgatctttgccactctaacccaactggctaaagagttagcaataaggttctccaactgaggaataaaggacacaataacttctttaaaagacttacaaaggttcaaacaaaaagagaacagaggataggtgctccaaccaaacggaacaagccaaccccaaagg

SEQ ID NO: 379544 - DNA, 4493 bp, Cannabis indica
tttttctcatggagacaaaaacacaaggacaacatatggaaatgatagcgagacgattgggatactgtaattcaagtatagtctcagctagaggcttagcggtggggttctgtttaatgtggaaccgagatgttatatttagtgacattcagtttgataacaacatttttgaagcagaggtgaaagactccagctctttatggttcatggagattgtttgcaacatatggtgttccgtatgctaatgaaaaagatgagttctgggacagtatcacagagaaagttctctcatgcaagtccccttggttagtagtaggagatcttaattgcatcctgaatgaagaagaaaaaatgggaggcagagctttatctagcaaggacacaagctggttgaaagatttcctatactattcaggggggattgatttgcgatacaatggctgccaattcacatggcaaaacaaaagatttgaaggagatttgatcagagaaaggttggatagaggtattggatcccctgattggattgctctgttccctgatgcagggattagaaatttccccatcacaatatccgatcacgctccaattatcctagatacgaagatgcactcaagacggtcccgaattcctttcagattttatgaagcatggtcaatggaagactcctgcagggaagcgatcaaagaggtctgggatacgaatactattaatagtaccaaggctatgttgaaaaagtttgatcagactaggaggactctgcagcgatggaaaaaggacaatgtggtgatttagataaagaaatctattatttggaacaacgacttgaatggatccaaatgaaacaaatcacaaatgagttgaaactggaagaacaagagattcataaaaagcttcacaacctctggtgtaaaaaagaaagtgtgtggcgccagaaatcaagggaactctggttgaagctgggggatagaagcacaagattttttcatgctgcggctgcaatccgaagacgtagaaatcagatttggtcaattcagaacattaatggcactatcgtggaaagtagaagggacatagcaggtaccatcaaccagtatttttctaatcttttttcctcaaactacccgaatatatcccctgaatttgatgatttgtttgagacaaagttggatgatttagcaaatgaggaactggttaagattcctactcagcaggaaatcagagaagttgtatttagcatgcaccctctgaaatctcctgggccagatggtctcccgggatgtttctttcgaaagtattgggatcttgttggcaagaatatatgcgcggctgttcaagaatgcttcatccatggagaagttcatgagaagcttaattacacgtatatttgcctcatccccaaagtagacaacccaaggagaatggagcagtttaggcctattagtttatgcaatttttcctataaaatcattgcaaaacttttagctaatagacttagaccgctcatggaggatctcgtttccccacttcaatcggcgttcataccgggaagatggatagcagaatcctcgatcctagctcaggaaataattcataagattcgtcctcaaaaaggaaagggaggccttatggccatcaagctagatatgcacaaagcatatgacaaaatggagtgggggttcattcaaaaggttctggaggcaaacgatttcagcatcaaaagtcaaagaatgatcatgtcttgtgtctgcagtgtgacatattcagtacttctaaatggatctcctttgaagaagataaccccccaaaggggcctcagacaaggggaccccttatcccctttccttttccttctttgccaagaagtactctcaaagatcattttgaaaagggaaagagaaagtatgattcatgggatcaagatatctaggaatgcgcctccgatttctcatttgatgttcgcggatgacacaattctttttgcacgggcaaacactagagaggcggaaaaccttctactctgtctcaatacttatgaagcgtggtcgggacaacaatgcagcaagccaaaatcaagtgtgcttatttcaaacaacattccagctgacaagaaaaaagaaatcctgcaagctctctcaattgacgaagtgaatggagaagaaaaacatcttggaaatccgtttattttcaagagacgcaaaagggaaaactatgttaaattgaaggagagtatgcttcaaaaacttgaaggctggaaaatgaagctgttgtcgtatgcaggaaggcttacactcatcaaatcggtggcggctgctatgccgatttatatgatgtcaactaacaaagtaccaatctccacttgtagaggcttggatgcaatcctaagaaagtactggtggtgtggtaacatggaaaaaaatagataccttgccttaaagtcttgcgacaagatatgccaaccaaaatctgccgggggactcgggattagacgctttgaagacatgaatagagcacttatcacaaagttggcttggtgtatagcaaagaaggatgacaagccttgggttaaggatttaatgcacaagtattgttcgactgataacttctggcaggtacaaaaaaaaccaagtgactcctacctttggaattgcattctagaggtgagaaacataatcttaaaggggtccatgacgttggctgcggatgggagttcgattgatttttggaatcaaccctggatcccctggttggatcataatgagttcaaggaactcatggacagacttaaacttaagagattcacggtcagaacaattgctgatatttctatcggcaatgagtggaataaggaaatggtaattcctatctttggggaggagcttggcaacaaaattatgaatatccccagattgccttttccctacagagataggataatttggaaggaatctcaggatggggtcttctcagtcaagagagcttatggtgtagatcaaggagccagatttgaaagcaaaaaagaagtgtggcagtggatttggaaggcggacatacatcctagaatcactattattatgtggagagtactcaacgatgcactgcccacaaaagagcgcctgaagtttgttacggaaaaggaatgcccattgtgttatggggacatcgagactagtctacatttgttcaaagaatgcagttttgcaaaggccttatggttctcaggtcctttccctatgagaattgaggaatatccaggggaaaacatgatagattttctctgccatttgatcaagagtttcccgaactgtaaaagatccgagatgattacttatagcggatgcattctcgatcagatttggaggcagagaaacaattgtctccttagtactgataatgccaatattgaacaggctcggtacaaggtgttgaaagctttctcagaaatgacggatgcatgccttaaagaaggcataattgagtgggatagaagacccttactgtgtaccgagggcttaacaacccagatggagactccagtgcaagagctgaaagcgaaccatgtaattttcactgacgcctcgtggaaacaagggaaggccggattagcagctataatggttaatcgaagtgttggtaattggttctttagaactcaaagtattcctgcaacgactgctatggaagcggaactccgggcaattctaatggcactagaatgggcgatcgaaaacaattggaaggaaattcagattctttctgattctctgattatcacgcaagctttgtcaaagggagtatgtcctcctgactggaaaaattttaatgtttctttgaagattattagtctatcaaaacttttaattagctgtagttttacttatatcaatcgtagtggtaattcttatgcggacaatttagctaaaaatgctagaatctctagcaattcggttgacttatgtcaaggggagggtgatccccctgtgatccccattttcattcctgtttaatgaatttagtattcttccaaaaaaaaaaaagtttacttatttaacgattagaaaagcatgatagtataattttaacaaaatattataagacgtcttttttaatattgtggatattgacttatacagaataaatagtaaagtattaagttatatataagaacatgaactactttccttattattaatgaataaataataaaatattaagtcatgtataaaaatatgggcttcttgtttcttttataattgtctctaaaaagtgatgaatatgtatgtgggtggcgaatggcgatatgtcaatgatgcatttatcttcttagtaatcatcatggattggtgggacacaagacaagtagttattagaatttatgaagaatggaatattttgtagaaagtatagaaatagttttggagcttcattaaacctttttctttattattattgatttttttttttgtagataaaatagtgacattttattagca

SEQ ID NO: 379545 - DNA, 6636 bp, Cannabis indica
agcaatttctatgtacgtacccgggagggactctaacctgaacttgtaggaaactatttgagctacccgtcttagtatcattacttgtattatatatgataaagagtaacacaaacagaaggtgtacaaagaagaaagatgttgaaatacaggaaaggaaacacaaacattacgagaaagcctgccactctctacataaatcagagaaaggcacaatagcaaacaaaaatcatcagtacaagcgcaatgaggggtcaattcattctattaggaatgaaagataccattatgcagatgacaaaaattaggcccagtaatccacgtttagtctgtaaaagaatgaatagccctagccctagatcaactatattctggaattcagcctatacggacttgttgtcctatcttcaagtaactaagaaactattggaagagttgtgttggtttctcgtacattataaatcataggcaacattatacgagaacaccttcaacatgaaaagcattgaaactattaaaaatcattgaaactatgaaaaagcattgaaacatgaaaaatcagtgaaactatgaaaaagcattgaaacatgaaacatcatatcaatcatgaaaagtcgtatcaatcatgaaaatactggataattttaccaaaagactaatgaggtcaaaaatcaagaggcaatcaaaaccaaccaaaagagtcaaaaaggaaaggaaaaaaaagagttttcttattgggtggatgagtccaaccaatgaaccaaaaatcaaacagcttaaccaaagtaaattgagccgtaagtaacaaacaaaacctagaatatacgaatttatagtaaaatagtgtgaattctgcctttccttttagaagaaaagagtttgttatcaccaatgcagagaaaaatttcctaggaaccaccgcaacagactgaagggtataattagcaaatcagaaagctaacgctaacattagtttgttgataaaagtaagaaatctacaagacaaaggtagtagcaatcatatattctctgttaattcaccttctgctataaatttgatgaagggaagacattgaccagctccggtccttttcttcatctctcatttccatgcaatctattccatccacaacaggatcgttctcactgttatcaactaaaaaattaattcttctagttgttacctgaaagaatttgtaaatatcataaactttgtaagctgatagtatggaaaacacaggcacaatcaagtgtacttttttcttacttccattttctttctatataaactataagcagaaaagtgtattttttattcaatgagtacaataataagaaaaatgaatgaaaaattaaagagagcaaggaatcctcatccaagaaacagaacgtcaaacaaacacaccataaataaatactcccaagacagaatagaacattttaaactccttgtacataacaaccaacaatgaaacccagaatataaaacatcccacaggactctactttctaatgcaatcttaaaacatattctctaattcctttctatggcatgatcaccaaaccaaatatcatgagcttaaaccaagacaaaaattgtatatctttttcagttctttttataccctgcaatctttgggaggcagtacactttagcacattgcaaggtaagcccccacaaaaaatttctgaagcaaggtattaaattagtaataaaagaaatagatatttacaaaaggacatcatacacatgcttaataaagttacctgaaaggttccacgtataactcttagtggccgaaccattgatgaaggaagctcaagaacaattctttcatcaagttcactcggaacaaaaccaggggggactgctgatgaactttcaaccaagtcatggtcattagcaagtcgaatatcaccagattcaactggaactgatatggtttgctcagctgtcacagatagccgtgattgattctccacactttcttcaataccataggacctgccatccaaattatgaatttccaggtgttcatcatcttcatttaccacatccattgagattgcttctgctgcaagaataggagcacttgatgaatttataacattttctttatcttcttcgttgttaatatgatcctcataattggcagctgcaccaaaatgatctgagcctctgtaatttctccttaaacaacacctcatcctagatgaactttccataaaatcaagcttccaaaaaacctatcgaaagttaaaataatcccaagtgaatatcaatagaaaaaatctcaaaacgacacggcaaagctcaaaggccattacaattgcacaataagagttttaagattgaaaaactaacaatgtgtgagaagaaaccaaaaataaaattataaaccaatagaaatcagaataaacacaaagcaatttcagcagatcagtttaaaagatagtagtcttgttacatacacgtggaggagtgcataattggtccccaaatggcccaaaaaggcaattcatttctatcagacaatggataagcttgcgccatgcacgaactccattgcctaaacgatgtcgagcgataacatcaacccgagcacgcctatcaacctgtagagcaaagaatataaatatagtgtgccacatgaagaagtagtgaatacaaagagggtgaacatgagtgaacctcagatctttgaatgttccttgctaaagcaaaacttgcaacaaggacagcaataaacttataagataatgcattaaaatcctttccatagactgattttgtatcaacaggttgcaaacactccatccaagcaactcccattgcttcagcaacattccatctcttcaccctttccatgtcactagcattccgtcgctgtgcagatgtagccatagccactgcactaaggcctctcccagaaccaattttggcattacgctctagatcgcgagccgcagctaatgcagcagcttttgcagcagccttatcctttggaagacctggtgatttgttaggagcatctgaaggtttctgaaaacttgaaaacgtatgaagcctagcagttttacgctcaagtaacgaagaatcacgcttaagctgagatgttgaagcaggagctggattttccccaccagaggcgccagcagcaatcattgccagagccattgctgcaggtggagatgcaaaagcagcagcccaagctggagagatcattgccagagcagcctgaaagataaagcaaagtggaatcatttgacaaagacatgtgagaaagaagtcctagtaaaccttttttactaagaaacaaaaggcaaaacttttgtacgaaccctactaagaacgtcaatatcttatacaagcgccattctacaaaacaaatataatatttaaaatgaagaatgtatagtatcataatcaacgccgaataattttctccattattcacaacacaacaacaagaactaacagattgatataaatcagatgtttagaacgcatcaaagatagaagttttaaagacaactaaaataacctctatggggagggaatcagcagctaatgcacggtcatcaacagtaagcggattcaacccatctgcagttgcaagttcatgaattccagccaaaagtggcctccatctcctcaaaacagcaacaaatggaggtataatggcctcaagatacagttttcgaagatcttttctgtccctgcctactgcatgataaacctgcaagattcatacagtagtcgtattaaataaaaacagctgcaaatgtataatatttgaatggaaaaaaaaacagagtaaaacaactgttatatcacatagatttacatgagaggaaatattctatctttctatcagaaaggtgaccaatggcagttttagcatgaagtcatggcaaaaagactcttccattacacacaaatataaataaaaactatgccagtacatagcaagcaaacttgaccaaaatctacttgtgatttttttattatgaaacaacacctaaaactagaaatttagtacacaaagaactaacctcagaataaagaacacaagaagctaccaacactcgctgtctcttagagtccgaaattggcatgtttagaaccggtgaaagcacactgtaaacagcaatatgtattagctcagattcactatattgggagaaggtaacagcaagacacaacaaaatacatttcgaagatgacagtaatcacattagtactaataaaataattttcagcagaagaattcgccaaaaaaacatactcatgtctcaatcacgttattatattacttccccattctcaaatttgaaacgtgaatatttatccaaatttcttatctcaagactataatgagaatattatgcaggcccagtttagaaacccgtgagaatgaaagggatagattaagtacctccacaacaaagccgagcgtggtttcctcccttctgactttgcatcatctatactaacattcctcaagagcatactatcttcaccattatcttcttctctcatagaaagaagaaccattcgaagcatgcataagaatggctggtcactgtccaataactggtaaagagctgacatgcctcccattccagtacctgatccaccacctataccaagaccaccaccaagcccagattcatccaacagtaaggcttggagcatggcaacagatttctttaccaagggaagttcaacccagtttccgtttacatctttttctaatgcagacttccaagattcccagccactgccaccaccaccaaagggagcttcttttgaaggaaggcctacaccataccacagtcggctcctatacttccaaccctcagccaaatccacagcacagcttccatatgacacaaaagcacatgaaacagattcataaggctcagctgctgcagcagcagtaagactttccatcactgttgcagagactttaccattcacatcagctattgaattaagaacctggtcaccatctcaaaagaattaagatttgataattgcatatgagagtaaaatatcactaaaattaatacaaaaactaacactttcttggaggaaaaaattacagaacctgggtcaaaactatatgtgaagtaaacatcgaaagaaaatcacgattagaataaaggtataaagaagtttggccccaaataatatgaagccatgaattataatttttccttcaaaagtaaacaaatcctttacaaggggagatggtattagaaagagggatgattaatgctctgtttaaaaaaagaaaaactaaatgcaagacaaaaatagattcttcaacaaccaatcatcaccagctaaagaaaaattgaccatatttgttaaggctagttgatagctgtaatttttgcttttccttgctttgggaagggatggggagaaaaatactaattaactggtaataaacaaattaatcacatgctaaattattttgataaatgagaagatgaaaaacatcaaatctatgataactatcctctagaagccaatactgcaactataggtaaccaaatgcttacatcaacaggtagtcccccatgatcactagacaatgatctgtgatcaccaatggcttctaatgatccaccaccagccatactggatgaattcaacttattattcaggggagatacaagagaaaggggagatttggaaccatctgttggatgggaagcaaaagattgtttgctttgtaagcgtaagtgatcctcaacaagcattaatataacaatagcattctccaccaaagccactgaaagctgagcagcattctccgattctgccttggcatctttgggtgataatccctcggcggctactccagcagctgctgctgcaataacttgagtctgccacaaaagaaaagctggatgtagatatttttgaaattctttctgttaactaactagaaggaaggaaagaaaaagaacaaaaatatcatccacgcataagtaaaaagaacttgttataaaaccacgagatgcctacttttaaaagaagagtagaccgaaaccaaactacttacacaaggaaagaaggggaagaggggagagggaggaattagccttatcatcctaattggctttaaaaaagatgaatgaaaactctgaataaatcacattgaaccttccctaaaaaaacaaaggatcaaatttacctgaacctggagttctctggcagcaaagtctagcaagctacccaaaagccttcttttaaatatgggcagtgattcttcccgtcttaaaagatgagcatattttttcatgagaagtatgaaacataattaagaaagcaattacaaactaaagacaaaatgtcctctgaaaagctagcaataaagtgattaatcaaactatttttagtaattaaacaggataaatctgacactgtgaaaggaattctctttattttctacagtgtatacctaattctttggtcaccggtgctagatccaccaacaatagaaagccactctgcacaatgaattgtagcttcaatgtcctgataaaaggaaccaaaaataagtatgaataaaaccaactgaataaaaataaaaaatagaatgaaaaaaaaaaataaaa

SEQ ID NO: 379546 - DNA, 2554 bp, Cannabis indica
gttttaacactaacactacaattttctcggtagtattaccatagtatatgaaagagaaaaggacttgacttgtaagtagcctattctgtacaatgatttaagccctttatggtaagcatctatattgttctgggtgtgtacattttgattctgttgattacatttacataactagatcgtaaggaattagacatttcagcctttgacttatttaaacagatgttcttgttgcttatttcttagtttttaaaagcatatatgagaaagtgattttggtttctttgttttgttggcaggtatgtatgtggatgtctgacaatagatactatccaattacatacactgatgttgcaattcggctggacctaatctcgaaagttcatgggataaaagaagctgagaattattttaatgacattccaatgcaattgaaagttgctgaggtttatagtgctctactcaactgctatgcttatgcaaaacaggtggtggaagcagaggcaactatgcagcaaatgaagggtttgggatttgccagtacagcattgccctataatgtattgcttaatttgtatcatcaaactgagaatcgtgaaaaaattgattccctgatgcaagaaatggatgaaaagggcatccgttataacaaatttacatacagcatctggctcagttcatatgtagcagataccaatgtgacaggaattgacaatgctctcaaaaagatgtcatcggattcggaagttactgttgactggctaatatattccgtcgcagcaaatggatacattaaagctgggcttgtggaaaaatctttggcaatgctgaaaaaatctgaggaacttatgttaactgccaagaaactgagttcagcatttgagtgcctcctcacacaatatgcagccatagggaagaaagaagaagtattaacactatgggaacattttaaaataaagcatgaggtttataataagggatacttaagcatgataacctcactgttgaagcttgatgatattgaaagtgccaataagatctttgaggaatgggaatccaagaaggcaaaatatgacattcgaatcccaaactccttaattggtggttactgcaggaaaggtcttctagtggaggctaaaaccttggttgatcgagtcatatcagcgaatgagaaaccaaatgcaaaaacttggaatcatttcacaacaggttacattatgcataaccaaattgacaaggcagttgaagcactcaaagaagaaatattggttgctgaacctaggcagaagccaagcaaggataatttggttgcgtgtttagaattcttgaaaggaaaaggagatatcgagggagcagaagaaattataaggctacttaagcacaaggggtttgttgtgtctgaagtttcggcaatggatgttgaaaaagataaaagaagggtaaccaagaacagaaaattacttaaagatatgcaaggacagaaggatggaaggaaatagaggaattggtactacttgtgaaattgtattactttgtaaaatactttaatgtggaaacaaattagcttgtatcaaatcaagttttatgggttaaagtgaaaattatttagccaaaaaaaaaaatggcttacttgaagttgaaatggtgtgcagttgaatgttcggattatacatgtcttcttcgtaagaggactctcattttgaccaattaagtatagtgatgctctcaacactactatgtttttcagagactaagactactaactatacatattggacatatttgtattctttaatattagagaccaaaaatgaggaagagactgaattatttcagtaattgagcggaattaaactgaaaagtaatattaattacacttagaccatctcccattataagttatgttttatttgataaaaaaaaatgacattataatattttattaatatatttaataaaatataaaaaataataattttcgttaatattattatgtaaatacgaaagacattcatgatgtttaacacttttataagatgtaatctcaatattaatgcaactcatatcggctttcatttattttaaattaataaaaattataaaaaactactaactaattataagacgtcatgataagtacattagtacacatagtaatactctaaaaaaatatgaatatgttcatcatatttaatgttataattaaatatattaataaaataatacaaatgacataaagcaaataaaaaagtagtgcatcatagcaaagtagtccaacaaattttgcatcgtagcaaatattgtgttaaattttatacaatatttgttatataataaatttgcatcaccttttggtacacgagcacattttttttttataatgagttatgtggtaaataatccactctaaactaaacctattcttatatccaaatcagttggaaaatcagttaatttcagttgtactcattcctatttggaaagttggttagttagttaaataactaacttgtctcaagttgttgagggctggactgttggaaatattatttatcca

SEQ ID NO: 379547 - DNA, 3879 bp, Cannabis indica
taacacagtctgtgctgcattagattagcatgctagattttcttttaataatctgtttttcatttcatttttttaaatgaactgagaagaaaatttaaatattggtttaactaatggttctgcgacactgcagcttcaagatccgagcctggatattcacagggaggaagtaccgtttgcttgcagcacaagagctggtatctggagatcaatgtgaaggagatttgatttggtcgggaaagcaagaggcctagggagtctaatgacaacagcagatttacaaaagatggaacaaatccaaagagcttgcttcagactttgttgatgagggcaggtcactcacctccaaaatacaagaccaagcatctcaaaactaatgagttcagggcgcttgtggagttcaagggtatgcaatttgttgggaaacccaagcgaaataagcagcttgctgagagggatgctgctgtagaggcattggcatggctgactcacacttcagataacagccgtgacgaggatgataacaccccacctgatgtcactgataacatgctgaaacttcttgggaagcgtagaagatctaaaggtcggtaaggttaatgatgaatgccggtaattggtatataagctgttgccatcctgcccccggtgagttcattttggggtttgagttgatcgctgctgctttgtttgactagtaatatggagatgaattgaaaggttagcaagctgagaaggtagcagttccattattggtatttatgaaaacttccctttagtaaattagatacagttaaatttttgggaacaatggcttctttcaatgagagatatatgcaagtcaaagatgggaaggattttcatcaaattttgagagctgatcagagtcagagtaggcgtagtagtgaatatatgactcgggagagtcataatacaatattgaaattttggttgacaacaagatcttagggaaaagaaaatggatagatagcaattctaaaataatcaaatttgatgtttatttaaggggaaaaaaaagaagaaatgaattacattattgatattgtgatcaattgttaaagctagtacaattggggaaattccttgtaatatttatgtaaattgattcaagtccttgttttctatctgatataaagtataaatactacaagagttatttattgcttctcatttattttcatatctcatgtaagaccctgagcattttcgcgtcatgcgaagcacaaactgccgattatcctgctgccacagaaaatagaaaaggaaatactgaataaaacaactcaagttttgtaatttgtagtactccaagtctccaagaccaataaaatgcccaaaactatctcattaaataaattatcttttgaagtagtgaaagtcacttcggccaaaaactcaaaacatcacacattttcattcgaatcggatgggtaatgagtaatgacaaggtagtactgtagtatcgatttcttttcggtggttctaaagtgcacctcaaaactattgtatcctttttacatttttagcaatgaaaaaattataatccaaattggttttatataaagtaattaaaagagagtgcattttttttagaatttcataaaaatcctgttttacatgtgtataacaaaatgcccacaataaataaattgtttaaatctttatttttgacatgtacatccacattaaaaataattaggaatatagagatatccctttatgaggcaccctagaatttatttatttttttatgaaaaccaaatttaaattgaaaagtgaacaaatttcaacaattataaagaagaatgattcattgctgcacaaaaaaattgctttctcctagtgcttcaagagttatcctgaaaaataaaatgcacagcaaaaagcaatcatacaaagtacaaacatatatgccaagtacctagaaaggtgctacttaatagctactcattgtctccttcgtccacctttctctatttcattaggaaaaaatggtatgtgcattgctaactctattctctccatagagacactactcatcaaacagtgagagaagccccattatctgctgctgtaagattcaaaatcattgcagctgcctttagtgcccaagattcaggtgtctggtacaatccggcggaagtgccaaagcatgaagcaagcatatcagtatttatcacaccaggattgagagcaacagttgccattccctcaggcaactccttagcaacagaccttgttaagccctcaacagcccatttcgatgcacagtaaggtgcaaccagtgctgctcctgatcttccccatccagatgacatattcactataattccttgtttgctagcaagcattagcgggatgaagtgacgcaacatgtttgctacacctttcacatttgtctcgataacagtatcaaactcttcttccggaacctcccaaattttgttgttcttgttgattgtccctgcattgtttactatgatatcgggaacgcccttctttgccatcaccgtccgtgccaattcttcaacactgctattcaacctaacatcagcattgatcagcaagtgtctgtcagatgatgaagagataggttgtgaagcaggagaaccagtagcagagttgagctctaattgaagggagttgagcttttcctgggcccgagagcacccaattattgtgtgaccttgctttgccagttccaaagctagggctttcccaagtcctttactcacccctgttattaatatggtcctaggattgaccccccccagccattgctctgcttccaagcgcattcatctggctatcgcacaggctctcttgttcaaagctctatgttccctctaaccctacagttctgtatcagcaatatccatttcattgcttgttaatattgtgtggttgtatgataagaccagaaaactccaaactcaagagaacaataaaacagtagccaaacagtagcaaaacactaaaaaattatataataagatgagaaaagattacaagcaagatgggagctcttaggctcctttgatgcaaagagtgactactcaatacattgcataactctctattctcttactcacatatatagtaatttttcactcaaaactactctcccaaacaaagactcaaataactttgtatttaatatatgctagcacaccatactaatcctagggcctaacattgcaatttacttaaatactataaataaatagtcaatttgataaaaacaattagcttgtgaatcatcataatcaactttggactcatcaaataacgcaagctctaagggaagaacttataaaaacaaaacaaacagttcaaataacaccaagcccaagaaaagttatctcaaatggtgcatctaaatagcaattgttataatttcttaatcctgaaattttgtagtatttcaggtatgcattatagctaggcatcaaacgaaattcaatatatataattatatacatatatatatttttactattagcctcgtccaagaacagaaccagcattaattcacagaccactcccgaatcacttactatcacttgaaaaatgaaaatattagaacattataatctaccctacgataaaaatagaaaaggtaaaattgccttcaatacctaaagaaattattctatttcgttctccaaacaaaccaaagagaaagcaataataggtgttaggaaggtatacctggaatggaaggttcgaggttaagaaagacaagaatattgcggtacgtgagaaatgcagggcgaaacgaagagatgagattaccaatttgacgagcaacgttaaaccagctcagccttccacttggataatagagagaatagagat

SEQ ID NO: 379548 - DNA, 2233 bp, Cannabis indica
atcattatcacaatatcttcgatcttcacaagcaaatgcgtataattaaaaacaaaactcatattaagtgacgatgaaagagatgtacaaaaaactttttaaataattaaggtgtaaactactaaaatatttaaccaaagtcacaaaaaagaaaatgaaaagaaaacacaagataatgtctatggaaaaactcaacatcaatatgcatcatcatatgactctcattttcacccactcagtgatcaatcaatctcccgggtaccatatagaactactacacttattgagtgtcaagcagacaatcttgtataaacagtataaatttcaaactaaacaatttagactctaataagagagcattcaactaaataatgcaaaaccttttttgatcgttcattatccaagaaaaaaagaacaagcgaaaatcacaacaatataattaaaccaagttgaagataaccaaagaacttacttcaccggggcctccctgtccttcctaagcatcttatccatatcatcgtatggaaataccagattctgtaaacttgcagctttaatccacttgggcaagaacctcttcccaatcaaagcaaacaccctctctctcattggacccggtgactccctaggataacgctgtaagaagaactcagccaatgccagttcaagcacgtactgacccagaaagctcaacctcgaatggccagaccgaacgtgccgggttttcgtcctctcacacgccggatgttgaaatgccaaatagagcagcgtatcgaattgctttgctgggttatcgtccccaaacctatccgacggctcaagagggtacccaagggcctgtttggcctcaagcaagtactcttccatccaagtcttatccgcattgttaagccgcgaagaaggcaaacaagaacttagcaatggaaaagatttgagcgacaattgagggctattgagaaacctatctgttaatttcttgtcatccaaagggggtcttagtacgaacctcttaggaggaaccttcttcttcggagaagttgcccttttacgctcggcgagctctttaaggagtctttgtgggctgttttggggaagctcttgttgtgggtccacagcaacggcgaaaattcggaagttgtgcaaagtttggttggctaatttctggttttggggtcgaaactggaatgggaaagtggagaatgaagaagaaaaggagtagtttttacatgttggggatgaacatggtttggagagttgtatgaaggaagaagaaagttccattttttgtgtttgttcagatatatttgaaaaaaggttagtatataggggttgggatttagaagataatgggtgtttgatttagagggtgagaatgggattgggactgagctgccattaatggagggtttagctgtgagggttttagttttagaaggctggataaggtattaaggtgggaagagcccagcacacaagcttagctccagtcacttggattattatgcgtcggatcggactgcgggtcacttttttatcatattgatcgtcaaacggtgtcgtttatgttgttgttgtgttttttcattacaacaagaaaagtggctcttatcattctaatgttgattaattcgcggcataaatacttaaatttaatttctaattataaataaatacttaagtttaattttgacggtaataatacttaagttttaattctataatttgtgtagatacttgactgttaagtattaagtaaattgacaggtgacaattcctaattggtacaagtcattaaatttttatttttttttaaaaaaaaaatagtttaaatatactaataagaaaatgatacgtgaataataacttaacatttaaaggagaagtacctacagagttttaaaaatataacttaggtattattacccgccaaaaattaaaattagatatttatttgcaataacttccttatttatgttgcaaaatacttttttaatttttataaattattaggttattatatatgtatatttttagctgtataattagtttttttgtgtaaattttattcaataaataaaactatttttattaaaaatatttaaattaagtattatttataataaaaaaaaacataataatattcaaaatttgttgttacttataattttagtttaattattgtaatatttttaattttataatatttttactatttttgaaatatcatacactt

SEQ ID NO: 379549 - DNA, 2690 bp, Cannabis indica
ctttttttctaagtgttggttttttattggagaattattacgatatgaattaatggatatgaatcataaaacatatatatatatattggcatgttattttttctttctctctgcctgcaaatgttgttcactgataatcaatcatgaattattggtcgtggaacaaagttgagagtagagattcgtattgagatgagacaaatacaaatcaatctcattctttcaagttgatgaaataaattgtaatatagtagtggggtgtgaagacaaattgcttatctgttaaattttgtatttttgccactttttttttcgccttattatcatatagataagcatccagtcgcgctcatttgacaatgttaaatgttattgtcaaattctgaatcataccattcatcaacatcttacaattcttacatgtggtgccagtaataaaaataagtttttcaagatattattatacttaactagcgaattaaagattattgtacataaggaattattaaaaggaacaatcaagaccctcttgaataaaaactcatgatgaatagaatatagcagtttgaaataatatgtgtgtgtgtgtgtcaaagtttaatgtagtataaaatgaatgtctcaacaaaagtacatgtgtgaaaaaatatatatatttgatatatatatatatataaataaagtacccatgaaagagactttatgtaatttcaaactccgatcgttttggaggtctgcctttttccaggatcaatgtaatttggagtttccggaaccaggctgtaataaagggtgcatgctttacatacctacttttgctttatagactggacagcagccttgcttaaacttagtactacaaaaacaaggtttattaattagtacttgtatatgcataattaatcatcatcataataatggtttctctacagtcttatatatatatatatattatattcagatatagctgcagcctgcatgtacaaattaatacagaaaaagtattattatgttatgtaaatatatatatgtatactcaataatagtggaaccacttgaggctagctgcgagggtgtatgtattggactcgattcgagtcctaagattataatatataaatgctaaaaaaaaaaaaaaaaaaaaaccactcaataatagtggatatattttgacatatactcataattttgagacctgcctcctattattaatttgaaaaagcgtactgtacgtattgggattcatacatggtacgacaagggatatttatagcactagcaatacttatgccaccgagaagtgttgtgtgttatagttatatatatataattctaaccattttgttatttttttaacagtttttaacctttttattattctgttaactatttcagttaattttcaatgtttaaaaaccacgaagctaatgttatatatatagaggtttactcctagtaagttgtgatggattaaaaattgtatatagattaatttgggaatcattaatatgttttgagctttaaaaaaaaaactaatattagaaaattagaaatcataaagtatattttctttaatttattcttcttcttcttctttctttttttttttaattataacaatgatcttacatgtagatatgtgtaatgtgtagtaatatactagtcaataaaaaaatagccaagctaggtttaagtagctaggtataggaagttcaaagaaaaaaaaagttaaggggaatgtagctagggcttggaagagacaaagattggagcagaggagcatatatatatgtgtatgtatggagattattgtttggttgtaatgattaatggcacacatgtgaatagaggtgggtgggtactttgtttgtctctatggaatgaagacaatcttaattggatgcaaatgcatatacgcaccacccttcctccaaattaacttgcttatatatatatgtatgccacagtgtgtgtgtctgtctctgcactgcgatatgtatgtttctgtctactatatatataaacacatatataaagtctcgtgacacaattatcacttatatattccacatatataatatatgtggaaaataaattaatttatgtatatacttttactttctcaacattatgtcaaacagtgaactatttatttagtactattctatcattacattacattcaaaggggtattttttttaattagatccaatatcaattaataatatagcataattatgtgccatttggattggtataagtatatagaagacatatctggataatagtaattataatttgcacggtatgtacatacacaaacaaatacatgaataatgcaccgatttccaagatgaaaatatatatatatagtactaccatatttcatcaaatgcaatttgtctgtagagatgggtacggtgatcaggatagtgattgtgaattaagtagcataaatgtacatgtacaagcaaaggttagaaaggcacgtgtggagagagagagagagagagagagagagagagagacgagagagtgaggagggccggtacagtcaactcagaaagagagaaagagaggcgaaagagagagggctgatctgccgtgggtgtgtgggtgtctggtctgccgtgggtctgtgggtgcggcaccgagagaaagagagaaagaaagaaagagaggcgaaagag

SEQ ID NO: 379550 - DNA, 2034 bp, Cannabis indica
ctattttcatagagttatcagccatggtggtggtcgtggagttgaagatggagaagggacggttagcagtgttgtggagaaaggagttgctcagatcgtggatatggaagttattaatcaaagagagaatatggggattcaatcacacgtggaaccgtgagttataaatcaaagggagacttttgataatgaatcccatgtggacccgatgcaagtcaatgctacttttggtgggtcatctttgaacaataatagtgggcctgaaataagggcccatgaaggtgaggcagagagtgcagaccaggataggaaaaaacgtaaaatggaggtgtggctgctaatgtggattctgaagagcttcaacatttgaggagtaaaggtaagcaagttcaacaagctgctgtgggagtgggtggaggtgagacctttgttgttggagtgtcggcgggtgaggtaagagggcctttccaatcaccaaaccagaggaggcgggtgtctcttaaaaataaagctcggcttgcgaagggtggggggaacacacggggcagctctgatttggtggcggggaattctctggccagtagtggtgtacaaggagacggtcctttgggggaattttcagctattgaaggtgcacatggtggtccgagccatgggagtacgaggttacattctattgtttctgaggtgggtatttctaacaatttggatttcctagctcatctttccaacactgaagcggcgagccttgtccaacaaggccgtcgagcacaatgaaactcttaagctggaatgtccaaggaattgggaatccttggacattgcgtgctctccaatcccatataaaagaatttgatcctagtgttgtttttttatctgaaagtaaacttagtagagttcaagcccgtagattaagtaccacgttgcagtttggggagaatttttggtctgtagatcgcattgggttgagcggtggcctattattgatgtggaaggaggagattaatgttcgggtggactcttcctcaccaagacatatccttgctacggtagcaggtaaggaatttctcccttgggctttgacttgtttctatggtaatcctgatgcttcacaacggaaattttcataggagttgcttaggaatattagacgggaagttcatggagcttggctttatattggggactttaatgaaatcatgagtttggccgagaaggtggggggtagaattagaagtgcaggtgccatggaagatttccgagaggctattgatgattctagtttgattgattttagttctagcaaaactgatcttacttggtgtaatgaacatgagtctaatcctattatggagcgcttggacaggggcctttgtaatgaggaatggctacaatgttttgttggggctgatgtgaaagtgttagattggtgggcttcggaccataggcctttagtggttgagatgcctctggttagtgatgatcacggggaggagcggattaagaagagcagtaggttccattttgaggaggcatggtgtgaggaagatgaatgtaaggaaatcattgagcgacactggagagaggactttgttgtaggatcgggggggattttaaactaaaaactgaggaagttggcaaggcacttggtagttggaaccgtagaaagaagaaggtgcttaatcagaaaatcaagaagttaaagaccaccttgaatgccttgtcctccttgtctgatcccgaggcttgggcagaagtgaagaaagttgagcgtcagcttaatgggattttggagaaagatgagaagtattggcgacaacgtagcagggctatgtggttaaagtggggagacttaaacactaaatatttccatcacaaggtgtgatagtcagtagtcctgtgatccgtaaagagaaataccgagtaagctgtacaatcccacatcgcctggggaaggtcaagtgggatgattctgaggctgtgtgggtatgggactacaaggttgaagagagcttaaatggattgattggtact

SEQ ID NO: 379551 - DNA, 2819 bp, Cannabis indica
aacatatttaatcaaatttcccaaacaagcctaaaaaaattcctattaatgcataaaaatttagttccaaagcaaaggatagtatatgttcttatgttgaaaaacaatttataatcttatcaaaatgattttattcttatgagtaatcataagaattaaccttgatcagtaattatttccaatattatcattgaaaaatcatagaacagaacatgtccacttaatcaaatgactgttgatatgatgaaagagaacctgaagaagcatcctcaaaaacagaaagaagcttatttgataagcagtttgtttcttcaaatgtaaagtcctatgaacttttacttttcgaattgtttatgttaactttttaaaaagaaaagaaaaataatgttttatatacatacacataaaataatagctgaaaactggacatgatttgagctcaaattaacagccactcatgaggatgatgtaatgtaaaaatgtcgtcttcttttgctttagcattcattaaataattcattgacttctaatccaacatcagcagatgccttgtgatttgtgaaaatataatggtcgttaactagataatgtaattttttattccttggtaaaaatattattttaaagagaaaatattttatattttaagaaccttattcctttctccgtttccacttcatctttaaatttctggagtactagactagctaccaaagcagagaatctccttttaaagtgggcaaagaattaaactttattcgcactaagggcaagaaaaaccaaaacttgaaaaagcagagaccagtggtgataataagatagataagcatattgtcatcatggactattaacatttgattaaacaaaggcaaaaggttaggaatttgttacagctatatatagtcataaagctcaacgtgaaaacaattttacattaagtaaggaatcaacatcttgaaatcaaaaggaggcaaatatgtttagaagaacaaacagcacctctaatacttcttcttcagcaccaccaccaatgaattggcggtctgcaagggactccggtgttcctgctcccaactacaatgaatcaaattatgggcaattattgatgccagcctcacgttctttccgaagaaaccctgtaagtattctttcatattcctttagaagaagggaaaggaaataaaataaatgaataaataaataagtattctgcaacatcagttgtttatatatatttttttcttttgcaaatttactttttctttatacaagacgttaagatggtgatattagttgttctttttttgacatagcaggattcaagaggcccagtggaagctcatcggtcatttgggagaaggtcatcaagctttggctcaaccaggtaatctctctctctctctctctccctctgagggaaaatgatttgttttgtaactgagtttgaaatttgaatgatttattttcactgttcatttcactatatcataatcattcttgtttgttttcctactctgcagtgtaccttcactacatcgttcaccagttcgtctcttaatccttgacagtgaaccacagagagaacctgttgctccctggtacaggcagatcccccgagagtccccaccaaggcagattgaatcatggacgcatttgccacatcaacgaacagaacaacagtccagaaactcaagccagtttcaccaacaaagcaaagccttggagaatctcaagaaggagttctacaatcctgtctcgaggagattgacaaacaaagtcaacttatactaccgagacactcctgtgaatccgaaggatatagatacagatgaagatggaaaaagatgtgccatttgcttggatgactttgaacgtggacaggaggttatgctcactccttgcaagcacatgtttcatgaagactgcattgtgccatgggctaagagcaatggtcagtgtccagtttgtagagctgttttcgggcctaaaacgagggattcttcgttgagtgctaacaataatagtattatcactccaaggatggctgcttctggtttatccacacaagagttagtctctataataagggcacttggggatagtttccaatggggttactaaagttgctgtagaattagtggcctgtaatacttactgtgctctgttgaagaacataacgaaacaaaaaatgggaaacaaaatatgtttgtttgtttgttataagctcttaaacattcctgcttataatgctgtgaataaaaaaggttaagataatagagattataaatgatcgtttcatggcttcttctttgtgtttctcatagtagaattatatatgctaaaggaaggactttcatttaagatcgattaaatttctatcttaaccaaattacttgactaagatcacataaaaacatatggtttagactaattcagcatatgccaaaccaacaaaatacaaaggctaagtctaacacttacagttctgttctaagttgacattaagattcagatgttgaagagggtgaaggttaaaacagatcattatgtgcagctgaattatctctttcaagtaatggcagtattgaactgccttcaagttaccatatgaaaaacattgctggtccaaggcatacaagcttttaagcacctatatttaaaaccataaataaaaaatgggtgaagcattgtaactagtgttggtggctgtctcgaatatgtatatctatgctatataaaatgtggctatataacagaattcttagtttatgagaaattttgggattactttttatttatatataataaaataaatccta

SEQ ID NO: 379552 - DNA, 1644 bp, Cannabis indica
catagccattggtggtagtggtgagaggtgactctgagagagagagcttggttcggttctggtgccaatgttttcctatataaaatctctctacaagggtcaatagagagagatatgattaaaggacgttgattgattcaagggtatattagcaaaattttccataatggtcatcatagctttttgagtagtatatcatccaacttttctttttgacaaaatacaaaactttagcatcaaaattctaaatttacataaagggtcatcttgtatatagaattatataagttaaaatttctccttttcatctacagaaaaacagtataaaagattctcaattattagattaatatttttgggcacgctgacacaaagtccaaggctttaaaaataattatcatataaattaatcaaagtttttttttttggaaaaaatattatatatgcatgtaattcaagattattaatatcaagaacttctgaacatctgtgaagaattcagtcttccacacttttaacgaaaaagcaagcaaagtaactttttgtgtatattttaacagagattcaacacttttaaatttcttattttataaagattaaatttaagcctaaataatggtgcattgcatatataggtaacagcaccaaccataatataatttattttattttcttatttctttatttattaattttaaattatgattacatattgtgaaaatgaaaatggtttagctacaaggctacaattcaatgtagactttttctcttcttttttagcttgcttggttaatcttaacgattctcttttgtttgttctgattatttatttatttttagggaaagattttctattaagtataaaaagcttaagagaatcctaagtaaacattttccaactaaacaaataaataaataaatagaaagacaagatttgacttctgttgaaattgcaattgacttttaatccatttgacaaaaaccttaattagaaggaaaataagtttttgacttattattccattgtaaaatccagtcatctatctcatttgtggtggttattgtatttatattctgttctaattccataattctaagtttaatctaaataattagcaactataattgtataagtttgtttgaaaatagatcttaatacctcttataatatatatacataaccatatatagatactgtaatcatatcaatataagaagctcttcttgtataaatataaataactagacaatactaaactactaaagtaatataatcacttaggagatttttttcaattttattttttattgtttcttatgattgtcacatgcaaggtttcaatctcggcagagcagatatagtattatatatatataatatagtttacaataatttaatatcaccacagacaaattctactacacatacaataataccactcaattatataatatatgattagacagttatgctttgaccattttaacccatttcaagaaatactgatatgagaaattctaaagttcatatcagttttcataccattttcttttaagctaattaggaattttatcctctaaattttgacatgtaccaaatcatgtcctttaaacttttaagatcattgaaaatgccccctaaac

SEQ ID NO: 379553 - DNA, 5644 bp, Cannabis indica
cgcaccattctatagtctcaacttctttctcaggaagtttttcagcaagcttcttctcaaactcatcggcttgggatttgatggacttctcgacctcttctttttccttctcagcctcctcctttgcctttttgacttcctcttttgccttctcagcttcctcttttgcgttctcagcttccctctttgccttcttagcttcctcttttgcgttctctggtggtaaggctagtcgatacactacatgtctgacctttttgagtttctctaatggccttaggaacctagggctcaacttgcccttcttcttaaagcgccttatccctttcattggtgaaacttgtacaaaaacatggttcgacccctacctgaaattcaatgtccatgcacttaggatctgagtaacttttctgcctgctctgtgaagtaggcattcgagctttgatcttggatattgcttcattggttcgctgaactaaatcaggacccatatactttctttccccagtcacatcccagtgaatcgaggaacgaaatttcctatcgtaaaacatttcatagggagccatccctattgtactctgatagctattattgtaggaaaactctattaatggcaagtatttgctccataaaccctcaaagtccataacacaggctcgtagtaaatcttctaatatctgtactatcctctcagaccgtccatcgttctgagggtgaaaagttgtgttgaacttcagctttgtacccatatctttatgaagactcatccaaaattttgatgtaaactctggatttctgtccgaaacgatggatttttgagctccatgaagtcaaactatttccattacaaataattttgcatactgatccacggtataagttgttttcaccggtaaaaagtgtgctaattttgggaagcagtccactatgacccatattgaatcattcattcccatggttctaggtaaaccagccacaaagtctattgtaacttcctcctacttccacttaagaagcattaattgttgtaatcaccctggcagtttctaattttctgctttgatctgttgagaggttaggcacttagacacatagtcaactacgtctttcttcattatgcaccatcaataatagggtttcaagtcttaatatattttagttgtgcctggatgcaatgaataaggtgcagtatgagccttatcaagtatttattttttgagctcatcatttctcggaacacagtttgacagtaacctcttcactaatttttgcatcagacatggaatcattaagagtttcttggcaattgcctatccacaaccaaatggaaaagtggaaccaatcaaacaaactcttaaggtcacgctaaagaaactcctagagcaagaaaagggaataggcctgaacaattgcccaaagtactataggcacatcgcacaatagaaaaaaaaaaggaacatgtcacacacacttcactctaactacaagtacgaagccatgatacccatagagctcacatctccatcatatcaaggacttacatatgaccagcaaactaaccatcagcttctggccaaatccctagaaggaattgaagagatcaaataaagtttgagcttaaaaatgcgacgtatcagcaaagggtcgcaaaacactataactccaatgttaaatataggaaatttaagctaggagtcatgctgttacgacgggtattccttgaacatcaaagatgcaatagcaacagtactcgagcctaattgggaaggaccatatgtcgtggttgaagcacttgaactcgaaacttataagttggcacgctatgactacaacttgaatccagtgtctgtaccaaggttttaaccatctgtctagtttttaacaaatacaatgatctatgaagtcagaaaaataaaattcataactttgcatttttcatttccagcacaactagaaatgaagagttttgagtctctcattttcgcaaaacaacatctctaaaaactagtgtgcaactaagtggtgtcaaactatcacttaagcatcttaaaggacatcccttggacgtttctacacttacccagtgtccaagttgacgtcagatgtaaacttgggtgctgggatgtcaacctgggcgttgggacctgaactgccttaagtaaaatgaccataactcactcaattttatccaattgatgcgattcaccttgtattttaaagctatttaagtactttatcatgtcatgtctcacactccaaatgtaattctaaagctatcgtcatcaaaattcactctcaagggagttacaaaaatacgctccgagttacccgctgtgagacccgtcgggcaccaaaaatgagccatcaccaccagaagctaagttcactggtagatcattatcaatggtggaaaataacttgtttgtattttttttcctatttttgtgggcctccttcacctataaaagtagagcaaccttggctcatttttcacattcaaaaaactacccacaaggtcagagtttctctctctagagtttgaagttttttaatacttaatctattactgtaattaccatctcgtgaaaaataaaaattaaagtagacgtagccccattactatccttatataggggtgaactactataaattgcttatgtctctctaaattatttaattatttttcttattcttgccaatctagggagcgtgtgtggcttagaagtctagtcaagatttatgagtcaacaagcttcaagaggtaaactttctttttgttatttatgtcatatttaatgtatacacgtatggtgatcttgaggagtggtacgatgacattcagaaattattattctgctgcataccatatttagtaccacaaaaccagcaatcttttcttctcttttctttgtctattttttgggctctttctcctctcattgacagttccaatcctagataggtgtagtttgggtggtgtgtgtcgacgtcaatagtgcactgtctttagggatcttttatatttcctggttgttacgaagggactattctctaagatgatgggcaaggggtctgtttgttggggatttttgcatctggtggtctcactgtacagtttcatggtggataagcaaggtccttcggtgagtgttttagttttgatgtcgtgagagtttgaggtttggtcaagaattcaaaggttttctagatatgagtgtttgagagttgatttgggtgtcatgggttctaatctttgttttgttaattttagttttatgattatattaagtttctttttttattattttataataatggtgatttttcactgtcttataagattaatgagattagttattgtcttgtgatgcaaattttattttttattagttcattagtgtctcatcgatggaacaaagcaactccgatgaggacgatttgattactctctttggtggtcagatctatgggattcgtggattgctattgaccctatgtttcatgatcaaatcttttatgattgagtatcataacataattaattttattatttcctgtatttacgatttaaataatggtgttattatttcacaatttttattaaaagattattagttgatagccattgggactctgtcacatgtctatttagtttagaaacctattatacttcacatctctttaatgcttgatcgtgctggtggctcattggacacataattcaagttgttattagggttttcttctattttattatgaacgattttgtaagtctattattgttgattttgctatgtaagttatattttcatgtgataaattttgtcggatttgcctattaatagatattatcctttgctctaaaaacattaaaaattagtgataatttatttattacattaatttatttttctcagcaaataatagtaatattactttacttacactcaaaaaaaagaaaaaaagtactattgccttcatttagcaacattatagataatattactataaataaaatttagcaaaaattctaggaaaaaagtttgtttattaattttggcgaataaatgtttatttttattaataaaatttaatgtccaatcaccaacattttaaatattaaataatataattatctaactaataacaatgcttatttcagtaacatttgtttttttaattttaataaattaataaataaatagttgctttccaaataaatgtgctcatagcttatatatagaaataaatataattaatttttatatacgtacattcacatttcacataccaatattctatcctcttcatatacatgattttattataccatctcttacacactaaacaatttaaacaaccaaccacgacatcaatgccgccgccacaatacctatcttcatcccctgcctcaccaccccggaatttgacaaaaccggtggatcagctgcagcatcagcttgcggaggagccgaactcaccggggcattatcagcaacgggttcgtcagcagcagcagcagcaggcgcaggcgaagttgcggctgttgtcggcgtatcggcaaccggtgcatcagcagtactaggtgcagtggcgggagtattggccccagaatttttggatggggaaggagcagccccggacttgtttgacggggcgggagcccttttgggggcggcagaaggcgtagctgcctttggagatggtggtgatgggctggactcaatgcccggtacttggaccggcgcagtgatctgtagaacggagatgttgaatggctgggcggccacagatttgactaacttggcgtttagagaggcaccctttacggcggagccgaaggcgatctcaccctcgttgatcagcgcgactttgagaaaaccctcttgatcaacggcggagccggaggcttggaagagagtagtgacggtagatgtcttttttgaggtagtaagcttggtaatcttctcaacatcgtagtaatccaatatcacatgaacgcttaagattttcttaattacatcaattgacttaccggagagggaagctgcggcggagttatcgacaacgaggacagtgatagtttggcgacgattgatctcatcgttaagctttgtctgagttaagtagttgttgaatgtactaagctcaggattttggccaaggagttttgtgatgttgaaagctaaggatgatgataatgaagagaataagaaaatggcaacgagcatgaagagaatagaagaggaggaggctttgggattagtcatcttcttaatcattaataatattaattaattaatgtggtcattcacctacaaacaaagcccgattgtttagaatggttttgagggctttttatatatatgtaattatgagggggagagaattgtgaggagataaagctttgaataactaaattaagttggaattgagtggattgggaaagagtttctcatttaggaagaatctcgagaattttatgggaggggtggtctataagatgtttacatatatatcttatattatatatgttattatataatataaattaaaatattgatttggcacatataatatattggaagaggtttcaatgattacatttttattgtaaccatcatggttacatttttttaag

SEQ ID NO: 379554 - DNA, 1514 bp, Cannabis indica
caaattagaaatagttgacataagaaaaggagttgaatacaaatccaataaattatgcaagtacgtatatgtgtacatgtaacgaggaaattacatctcaaacaaaactaaccagatcatagtttgcacgaattgctcaaattgtctgtaccaaaagacatcgataagatagataatactaaaatttaatgaatggggtggaagacagcaactcttcatttcttctcttacccaacaagtacttgtagttgcacacaagtggaaaattgtacagtaataaagaatgctcattactactctgacgccatagtttgtggggttaatccctagagaccatcatcatctgaagaggacgagtggaacataattgcagtcgaactcttggtatgggttacactggaactttcatctttcctttgcttatggaggtctctcatggccttgaatcttaaatctccaccatagttgtttggctctgagggcacatcaggaaccatcatttgttcttcgagcatgtttaccacttcagacattgtaggccgaagtgaagcagcagcattaacgcataggagacctactctaatcgtagtttcagcttgctttttgtctacctccgttcctaatttctcatcaactaactccataaggtttccactttgttgtaaatgacaggcctgcaacacaagtatttgtttgagtaggaaatgaaatagatatgttcttaatcattcagaaacaaacgagtcaatttatacaaaaacaatgacagctaacaatcagatattgcttaaccaaaggaaatgaaagataaaaaagtagaaatatagatgtattcagagaggataaagcagtgattatcgagtacccaatctaaaagacaaacataatcatcacttggcatatagttattattgttcttcccactgacgatttccaagaccacaactccaaaactgtaaacatctgccttgtatgtgagacgaccccataatgcatattccggtgccatatatccactgcaaatcaagattacaatagtgtccataaaaaatgaatgaacatctcagcccaatttggcagaagataatataacaaaaaacaatactggcaactaacatagtcccggcaattttggtgctaatgtgagtctttccctcttcatcaagccgagccaatccaaaatcagatatctttggatttaagtccccatctagcaggacattggtagctttgatgtctctgtggacaatttttagtctagattcttcatgaagaaaagctagacctcttgctattccaatacaaattttatgccttgttgaccaattcaatgtaagctgaaatctggaatctgcatgttatcaatcaataaatacaagattatgggataatgcacaatttccaaaaagactagacataagatatgccacagtaaacaaacaaagctcaaacctagtgtatgtctaaatgtagaacatgaacacttttaatgtgtccatgacttcagaaatatt

SEQ ID NO: 379555 - DNA, 9187 bp, Cannabis indica
aattagtgttttatgtaattatagatctaatccgtttatacttaagacagtaatcttatgttatgctgtgatacattatatgatatgtaataataataaattacattatgttgtgttaaatacagagtttcctggatcaaaagcagtgacagaagcatcaacaaagtatggagctgggttggtatcaggaccaatcatctttgttcttgaaaaagtttcaacctttgtccctattgaagaggttgttaaagaagatgaacccaaaaaagaagaagaacccaaaaaagaagaacaacaagaacaagtaacaacaaaagtagagaaagagattgtgattgaagaagacaaaattcaagaagaacagcctactacaagtactactactattgctccggcaagtgaggagccacctaaggcagctgaggttgtggaaacagtggagccaccaccaccacaacccaagcagccttgataatcataatcatataataattatgattatcaactagttatttatatttttatatatacatatataaatatttcaatacacttttttgtgtatatgtcttttatatttatgttatgtgttaaaaaaaaaaaaagaacaacaacatatctctatcattctttattattattaaatttctttatgtggattttattcatcactcttgatttctttgttcatcaatctttttgattcttcctttttttttttgttggtctcaattgtgaattattgtaatattattatgtacaatttgggggaattttttttattgagtaatatattaagctcaatattattatcttgttcatctttacttattttttttcttactggaaaaaattatataattgagaaatgattaaggagactaatgaaggtgattagtgtaagagaatttaattaattaagatataagaatgtcaccgacaaaataatgtaatgttttatttatgccaccaaatataataacttcaaaataaaacaaacaaacaaacaaaaaaatgtagtaactcaataaattataaataactcaataaccaaaatattttgttactatcaagatttttttttctttctaaatatgactaacgatcattttttaaaactaagagacatattgggataactactcaaaacataatcatgtaacaaaactagtggtagtatataaatattgacttccatgtccttaatatagatagtaattttttttaaatgaaaaaaatttattcattttgtctctcagcgttattttctctaacctataacgcttttacaaatagacgtagtatataaatattgacttggtcaaaggctattatttatttgaatattggcaattatgtatttacaaatgagtaaattaattagttaattatgtaaaaagttggtattaatctcgctatgtgtaacctctccataagttttagtaattgcccacaatctcataaataatattgacactgaatattataacaagttattacatttggggtaagtaacctatttttattttatttaggtttaatattttattggtatgagagttgtcccaagctagttggggccttatgtgaataaaatggagaaaattacattatatacttttttaaattgatatatttaattttttacttcattttttaaaatttattatgtttacttatttttcattctactaattttatccctatcatttcacgataatctccattcttctcaaactaaaattttatctcaactttcctacaaacctacacatccgtctccaaagaagatctatattatgtttgacattgtttcttggttatgtgagggtgtgagagtaatttgggtacaatacttataaaaaaaatatatttaaattaaattttatttagatataaatttggttagtagatagcgaaaaaaggtattcttcaactttttcttaaaaaaaatgtattagttggctttgttttgaagaaaaagttttttgtttgttcttttttgatattagtgttaaaaattaaaaatggtatttttagaaagaattattctggtctttttatgaataaaatattaaatataatatttctgaaaaacaaattacgtctttttttttaaaagaaaacaattcactttttagtgaatattggtaaaattttaaaatatgatatttttgaaagtaaatttgagacttgtttcaaaattaattgttgttgcctaagaatgggtcttgggcgaggacccagcccacccttgggtcgatcagattgttattagcttaacaaattattttgacaatagtaactagctaccaccttcaatagaatttaaattaaaaaaaaaataaataataaactagctaccattaaaaattatattaatagtggtaattttcttttgagttatcaccatcttattaaactatgctaatgatgttattaaagtaattcattgcattacttttgttattaatagtgtgtgagttcataccataatttttgtatattactaagaaaaccaattagaatccaatctaccaacaccaatataattaatagtgttatatgagttcactccaattgacttggatttgacacaaattgttttaccatctgcttaatcttttctttcactttccacacttgtctccaatatcaacttcttttcactgtggaatataatcccactaagatctattcttcacatacacataataatatgtaccaatttcacccatttttaaccaaagtaaattaattataatacatttggctaatatttatatgttcatgaatctgacattgagcataatattttttttttctttttaaagaaatgtatgaaattattaaattatttatataaattatttttactattttgaaaaatttatagtccattatttaacaaaacagtgtccaatcagtaattattgcaaaatagtctaaaatagtatttaccctatactaatttataaattatattttgtataataattagttatgtcaggggacggagtattatcctgttcccgcaaagataagaaatagattttgtttaccgcattttgcatttaaatagagaatcattgttccattaaagaccagtaaaagccatccccacaattaaaatgtcaatccctactaataatcattcaaaattttacatgaaaatcatttaaattatattcttttccaaaaatttaatcaccatttttgaatttattattttttataataataaaataaaaaatccaaacatcccacaaatcaaaagtcaattattttcaactacttaacaataaaataattgttagtttaataataaaaaaataaataaataatattaaatgtaaagtgagagagagagagagagcccaatcgaagtggtagcggtggtggtggttctctgctcttctcagacgaaccccaatccaaaatcccaatcccgatcggagacggtggcaccctctaatttcttcgtatgttctttttttcttatgccctaaagtttcgattttttattttgattttgatttttcgattctatttgactttctcttttctgtatttattcattacattaaagattggacctttagtttctgaattgagagtcgagacgagttcccaagagaaatggaacccatcaattcggatgtggatgaatttaagagttgtgtagatgaaatatacacagaggttgataaggtataggtacctccttaaactcctcctaatttcaatctgttaatttctcacttcatttatgtttaaattcaaattcaaatgatgcccagcttgagaaaactgtgaaagaggttgaacagttctattcaactccagctactactgctgctaataaaggaagtagctcaattttgaaggaaaaggatagagacaaactcttgttgaatactcctcttcatgattcatctcaaaaggaacaaattgcttctaagagaatgcaagagcttatgcgtcactttgcttcaattttccgtcaggcaaataaaaataccatctttttcttgttcatgtttgtttcaacctcaaacttttgtctgatttgtttgttacttgttatgtggttttatcagattactcagcacaaatgggcatggccctttttggaacctgtagatgttgaaggtctgaatttacttgattactatgaggtaacattagccattaacctttgagatactatggtcttctttgaccaatcagaagattgttttaattgttattgtctttgtgggtttgatcatttatgttgattattttcatttggattttgaattttatgagtgcatagatcatgttgcttaagaactcatgaaagggtatttgattttattgagccttttattcaatgtagattatgttttcctttgtaggttattgagaagcctatggactttggtacaattaaaactaaaatggaggctaaggatggtaatggatataagaatgtccgagagatatatgcggatgtgaggttggtttttaagaatgcaatgaaatacaatgatgaaaaagatgatgttcatgtgatggctaaaactttgttggagaaattcgaagagaaatggttgcagcttttgcctaaagttgccgaagaggtaaatgtgaatcatttctccatagatgttgattaaatggtttttgtgaaagatagttttgaatgaagagtctagcttttcggtgtttgtattttactgaaaacctgagtacattcaggaaaagaaacgagaagaagaggaagccaaggcactattggaaatgaggattactcgggaggttaagtatgcgaacatggctaaggatacaagtactaaggttagtcacattagcaaaaccagtttgtagactagagaacaaaactagaagaattttacattcataaaaggttttcttttccgaagttcttttgtttgacatacttgattttctttactttcattagctttacgagatagacatccaactgagggagctgaaagaaagggtagtgcagaagtgcaggttagtacttaacaccgatacttatttgcttaaagttccgctcgattgtactttcctcctctatgatatgatgtacattttagaagggtaaggctgtcatattttagaagggcattccctccattagtcatctcatttcacacatccctatatcttttatgagtgttcatgtattcactggtcaaattgtctgtactatacttatcgatttgctcttgttttaaaagaagaaaatgttaactggggtttatttaggagaatgtccactgaggagaaacgaaaactcggatctgctcttacgcgtttgtctcccgaggatatcagcaaggcactggagatagtagctgagaacaacccaagcttccaagcaactgcccaagaagtagatcttgacattgatgcccaggtatataataggtctttgaaattatgttgcagaggcatcattcatcttaataaagtattactatttcataacagctcttccatttcgttctatttgcagagtgaatacacgttatggaggttaaaagtgtttgtgaaggaagcactcaaagttcagggaaataatgctagtaacaacaatgtcacgaataataataaggacgacaacaaaaagaataactcgaaacgaagaagagagatatgtgatgcgcttgcaaagtctactgttaaaaggaccaaaaagctttctaatttgtgatataaaatttataacaacagctacacccccacaaatattatcattgtgtattgttcaacctggttgctgttggaattgcacatttgtaaccttgttgagttactaaccttttctaagagaaatgtaagtaatagtatgtgcaggcattgaaatttttcattctcttgttaattttgcacctgaactcaattctcttgtaaatccaacccaagtgcatagctaagtatttaactatccatttttactaatgtcatttggaatggtaatgtaagggtgtcttatctccttcagttaggttcattttcaagactaaatatagttagtatcattactcaattaacataaaatatcatttgtcactacatagatcacaagtgtgctttgcttgttcaataacatcatttgtgaataggctgatcaaaaaggcaagaaagtaagtgaaaagacgttaatttattaaagttattaccacttattgagtagtaacaaaatctataacaaacttgctgaaaatacaaaaggctagagggcaccaaaaatttaacatacacctcccaagatgacaattcaaacaagaatatggtacaaaattttcagtagtttgattctccaagcattttgatcccacccaccttatagccatttgccagaatagggatgtgaggggattgacatgacaaacaattcggtcttgttacagctacagaaatgcgataaaatcgctaaggcatcggccaaggtgcattcagaggccgagttttgatagaagctctctccaccttggtgtttcttcatcgaaaatgtatgttaaaggagaaatcaaaaccccacttcctccaatctacaccaaaagaatcattaatcatttttccaacacgttcataatgtttataagaagacgaaaagaaaggttaactaatctaatcttaatgcacaagaaagaacatgattaccatggtggtccatatattcacaatcttattctcatggcatttaagggaaaactagaggaattagtttcgttatcattaagagactcaccgctcttaattgttgcacagacttgtagagttcctttttgggtacacatatgacaatggcatagtagtcagctgaaactcttccatcgcgtttaccaaaaacaggacttatagttggaccctggatacaaagttatttagaaacttttgaataaagaaagaaaaatcactctagtataatcatgaaatttgaccatattacttatgctgaaatctcacctgcaatccagacaacgatgtctgacttaggatcctctcggcaacctcctctgcactacttcctctcatgtttgcagttacctgccacagaaagagttaaaaaacaacacaacccgaacaccaaaggtcaaacaaattacacaagacacaaaatgcgcaccgtgaattgacctacagccctcagatgtgcttccagtctttcgagaatctcatgagttgtgtcaagtaaacctttcctctgtatcaatgatcttctggtcgcgacaagaacagcctgaaagatattgcatttccatagtaaaacaagaataaaagcatgctgcagaacgagctgcatgaattgaaaaaccttttactactaggcattaaaaagataggccatgaagaagaggaatcttacttggctttctaatactgttccaccttcgatttctttcaagttattttctttcaaagttgtcccactactcacaaggtccaaaatagcatcagctatccccatcttaatttgacaagaaacacaaaaagaatgttagttagcattattaccagtcagctattgcttgaaattaacattgtataagaaaaaacttacaactccaacataataaaggaatgatattacagaaattaatgtaacagtttatcttaccgcaggagctgcctccaaagccccgtcagcagtcgaaaaggtgacatgcttgactcccttttctttcatgaatttaggacccaactgcaagaaaagaaagagaaaacaaagctcaatacagttagaacaaccttacaatgaagtgcaaaagatagttagctgaaaaacaagtaaaaaaaggactctggtgaagatggtttcggggtgtcatacataggtgaaaccagtagcaacacgaagaggtttctcttctgtccattgaggcatttgagcaagcccctccatagagtttatattctcaaaaatcccatatttgggaatctgaaaaagagaaccaacacaccaaaatgaatatcacaagtaactaaaaaactcacaactcaaagttcttgaattgacaatttagcatgatagaaatgaactcactgcaaaggataaacgacaatcaccatactcaagagcatcatggacaatgataagatcctcattaccctgaaacagtacagtaagattataagcctcctcattctattaacaaagacatttcttttagtaaaattgaaagggattttggttacctggccatattcagtgaaagtgtcaagacccacaatgccaaggtctaaatctccagatatcaatttccgtacaatgtcttttgggcgctgaaaccacacttccaaattggatagctacaaacaaagcaataaaaaaataaagcacacatttttatcaaatgaagagcaatttttgtgagtttagaatcagaaatgacgcgaattgaggtttccatactcacctgagggatttccgcaacatactgacgaggattagtttgcttcactgacaattgacaatcctaattcaacacagaaaccgaatcaaaatccgttctttaattttttttatacattcatgaaattgggttttttgggggtttaaagttaccttgagaagatcgagagtatcagcagccattcgacccttactaggaagtccaagacgaatctcattccggtcagagattttggtgtctggtcttccattgacgacggccacttgagattgggtagtggcgcaacagcgaaaagaggagaagatggtgaaagagggtagtggggaagaagggtattttggtaatgttgagaaaacagccatggccgcagaggtcaccagtgttggtgaggtgagcttcgagtaatgagtagtgtatgcaatgaagagaaaaatgggttctttttaggatattctagtttttatcttatggtgccaatggacaaagccaccacaattactacacatattattcataatttgctaaaacatccttgtatttctcaattttacacaacaccaccacactattctttttttttcttttttttatctttttctagctagtagctagcataaatttattatgagtaaatactattttgaaccctgtattttgtaaaagttaccaattggaccctgtgttttgttaaatgacaaaatagaccctgtattttctaaaatagtacaaataggaccctgaattgattt

SEQ ID NO: 379556 - DNA, 6962 bp, Cannabis indica
aaatgtgaacttgatttttggcattctaaattattaagattttctaattgaattacaatcattcatggattaactatttgttacgatcttcaagccatggctactcatttttggtgggtgtctacaaaatacacgagaagcgttaggaagctctttatttactcaagtatgaaggggaatgaggtttttattgaaggagttggttaaagagttagttaaattctgttatgtatcttgctgagctggctttttagttagggtttttgttaaggttgttagccttgctcttctaattgctttgtatatacattcatctgtaccttttctcaacaaaatcaataaatgaataaacactatattttctctttctctctcgttcaacatattatcagagctttgagctcttgctctcgattctttttcattgtcgttgttcttcttttttgctatgtctggatagtcttctgctaccacgtctcatcaacaagctttcaaagaactagtcgccttcaaacattcgttatcatcaaaactcgacgagaataattttcttttatgggaacaccaaatcttgacggttgttcgtggacatcgtctgcaatagttcttcgtcttgaattctgctccccctaaatacgactcagatgctaatcgtcttgtactaggaagctcaagatcagctcctgccgtggatgctattcttcattaacgatcaaatgaacactagaatgaccctcagctgaagcttgggcagctcttcaagaatttttcacagttcagaccagctccaagataagtcattcaaaacttagttacgcaatactaagaaaaactctctttcaattagtgaatattttctaaaaatcaagtccattgttgatatgcttaaagttgttggacatgctttcactgtatctgataatattgaaactatctttaatggcctcgggccagaatacgataatttttacacctcccccaacatcaggaaagaataggtcaatattgcaaagcttgaatactaatggctcaagatgcaagaattgacaaatcatcaaaggaattagacatctccaatgctgaagctaatttggcacaaaatggaggaaattgatcctttggaggaaatcatggtggatatacagttgcatgaggaggctttaacagtaattttcaccacatggagcttataaaaatagagatgacaccagtttatcatttaatcgaggtgatcatggatcctcaggtcgtggtagtggaggtcgatggtcaaatcaaaactggcagtccaaaacaatctgccaactatgccacaaaccaggtcatgttgttttacaatacttttacagatttaataaatttttttatattgggatttaggggtggtgcacctaggcttaacattgcacgtatttagagaagaaggcaaagtagctcgtcaatgtatttagacatgcaccaaagtaaattggggatttttccttctctcgaacgatttttctcctcgagaaaatttgggttcaaaaactctaagtggtgaaaatggtcaatgggtgactcacgctatatttgtactaaaattgacgatccgcgtgcttcttatgtaatggttcagatcacgccttaaaaaatcacacttgcatctgacagtctggtattggaagagatgtcatttaatgccttacttaggatcgaggtaattcaaatgataaaatatgcctcaaaaaatcttgctgacataaaccaattgtcaacccgcatcccaagattccacacgcctttctaaggcgcttggtgtgcacagaccaagaagctctcgacacgtgtccttagttccaggcagacgaaaggaccataggcttccgtagcttattactttagaatttcaaaggtacttttttagttcctagctccgcatccataaacgaatctgaaaggagggttacaagcctccgcagctcttatgcctcgaagacttggaggtaaatattatctgaatttttggaatggcgtcatgtacaattttaaagcctaatagtagccaaggtcagccaaaagctgggcccaatgataaattcaaattgtaattttgatttagacataagcccaatttgctaacctaccaaggctagaccaccctggtccaaaaaaggtcattcagcccagaagcgaagagtctgtcaagaccaatcggtataccttcaagagataatccataagtgggtaattgaagagtcactcagatggcttttgtatattaaccaacatggaaccctccagacatggggccccacagttttgtcccttacaatagattggcagagtgcatgtgctaccaaaagaagatcaccctattatccaatgccgtattctctgacattcctaatacgaactcagctaagcacgacatctagcatcttcaagtgtacctctacttgtacggacaagcatgtcttcatgaattgggcctcactcaagtagctcaaagtcaataactattgtatttaagccatcagagggcctagttgatccctaaaagtcctatcaagtctaagtatgcccatactcagttctcccttataaatagaataacatccctttatgcaaatggtagaaaattgaattcttgggagaagaattgagaattaagattcttcaactagagtataaatacttgtatgaaatactttgaagtttttctaactcaatgttgttgactcgtaaattagagttcattaacactcaaaccacgtaaaaattttagtctcttcttgtctaatttacttctttcttaagtttatttattttataatcagtttttgaaaatttcgataaaaaaaaaaaaatcaaaaaacttttttaacttttattcttttgtcaaatcttattttctatactctaaataaattttttcatttatatatatttttatatatataaaagttttttcatcaaaacttatatatatattcatatatttattcagtttaaactcattaaaactcaaaactatttacgagaagaaagaaaacgccataacttttccaatttttattattatttttttgaaatcctatgagctaattttttcactatatatttttattcaagcttaatttttttcatcaaaacttaataaatgtatttatgagaggaagggaatcaaattaatttgtgctatcaaaccaattttcaattttaaaaaattaaaaaataatatcatttataggaattttcaagggtcgaatgatcaacaatcaatagaatgttcaattgtttatggatgactctttttaagtagaagtatgatattagctcgaagttgtatcagaattaataataattttaataaaataaagtttttttgatgcataattttgtaaaagatattcttgtaaattatactttttttttttgtcagagtctaatttttataattaattagagcccaaaaatatttaagacgactttagtaaaaagaatgtgaattggaaagggtatgcccttaagtagtaaatttgttagtattaattaataaaatttctcttgataaaaaaaaaatctgaattttaaagtttctttgtttaatatcacacttaaaaataaaattatttatacaaagaaggatatacatattaaattaattttataaaaaaattacttagtttaaagtaacatgggtataactaaacagataataaattataaattataaatatttgttatttatgtcattaattattaaaacttaggtatattaaaatgtgtttgacaaataagttattaatttttatattatgtaccatgtgaagttaagattcagagccgatatgtttaccgaaaaaaaaaaaataaaaaaagccgaaatgaaaatgacacctaagaactctacaattttattttatgtttaataacgaactctttgtcagtgattaaggttgtggtaagtaagcattacatataggcatcccagtatttgtataagtatataccaatataatataatataatgcatcaaaactcttgttatcatcggaatatattctattttataagtaaacaattttattttgtgttttgtgtctcccctgggtcacattctgtccccttatatcttgtaaaacattacattataacaataatgttaattcaattacataaaaataaatataattaaatttgaggatggggatcatggctggatacaggtgttctgtagtctagtctcgtcacatacggcatggtaagttgtgaaacatgaatattaacaccaacaatgcgacacacctctctacatttcaaagtgggatattcttgtggaatatctctttattccaactgttacttttcgtaatctccacactacctaccttatcccttaatgaacaaaccttaatctaatactaataatataaacataaaataattgttgtaatttgcatggttatatctataaaaagccagctggtcttatatataattcgaaagtagctaggactgaggtcattccttcacttcacttaaacgatatgaattacgagaactacgacccttattttcctgaccaacctgtcgtcgatctttacctcccaatatgggccaacctcccagcttttcggtccaaacctgcctttacttgggttgatcaggatggtccacccaatggtcctccaacgacgtcgtttctcacttactatcaactcaatgactctgtccaatcaatctcttcccaactcctcctggttccgttacaaagaggcgaaaccgtcgtcgttttatgctccccagggctggaactcgtggaaatcatattcggttgccaaagagctggccttttgaccgtacccatttctccaccagacccaacttcagacaactgccaccatcttataagagtcttatcccaaaccaatcccaaagcagcaatagctcaccaaacttacataaccgaagttcaccaattcatgcctcttcctcctcggccacttcaaaactgcaagcttgtaaaaaaactaaagtggatctcaactcacaatgtcaagcagtactccaaaacgacatctttgaagttattcgattctggtttgtcgtataaagggtgtaatgcggaagatgtgtatttggttcagtacacttcaggtacaactgggataccaaaaccagttctggtcaaggctggttcggcagctcacaacgttaggacggctagaagagcttatgatcttcatcccaacagtgtcatcgtctcgtggttgcctcagtaccatgattgtggccttatgtttttgttgttaaccatagtctcgggtgcgacttgcgttttgacgtcacccatgtcgtttgtcaaaaggccaaagctttggcttgatcttatatctcattttaaagccacttgtactccagttccatctttcgctttgccacttgtcatcaaacgtggaattaataatatagagaaaggtcaacgatgtccaataataattaacctaagtagcttgagaaacttgatcatcataaacgagccaatttacaagtcaaccgtagaagagtttgtcaacatgtttaggccttttggtttaaacccttgttcatttctccatcttatggcttagccgagaattgcacctttgtatcaacttcatgggaaccatcatcatccaactatccaactcacaacaacctcttgccaagcgcaaaactcgctccactccaggaatccaataattatgaagaactcgaagacatggaaattgtaatcgtaaatgaagaaacattggagccagttgaggacggaacagaaggagaaattcttgtatcttcgccgagcaacgcctccggttacctcggccacccgtctttaacacatgaggtgtttcatgggagactgaggaataagttaggccggtgttttgtccgaaccggcgatagaggtgttgtcaaagaaaaagagaggtttctcttcgtcaccggtcgatgtcttgacgttatcagattaagaaatggcattaataataaggaaatccatccacattatatagaaaattcggcttacaaaacttgtactaagtttcttagaggaggttgcttagctgcttttaaagttggagaagttataactgttgtgggagaggtgttaataacgagggaaagtgatgatgatcaaaaggagattagtagtaatattttgataaaaatatgtgaaggggttagggaaggtgtaatgaaagaaaatgagggtattgaagttggtttggtggtactagtaaagagtggatgtgtacctaaaactacttcgggaaaagtacaaaggtggttggctaagcaaaaactcattggtggtggaatgagcgtagtaatggagatgccgtttggccgaggagcaaaagaagaaggaatactagagggaaagggatcaatattggtgaaggaaagttgggacgatgaaacttcttatctttctttgttgtcaacttcttcaaatcgtccatttttgatgtctcttttgtgacatgaacctttttttttgggaagttacgacatggttggttatgataatcatcttgattatgataatattattgttgatttggcttgatgtgtactgtatatttctggatttggtctaaataatacataaaaaagtacttgtcttattcatgttatcaaattaaagaattagatttcatcgtctagctaatgatatatatataatatttttctaattatataaatttgaaatatcttaaataaattattttattaatatatctaattttgtgggggggaaaagaatgatttttaaaaaggctaattaataattttttccccacctttgacatgtactaaatggtgtccctgagcttttttgactgttagaaattctccccgaactattgagattgctaaatttaaggacatttgtccaatttcattcaattttactgtttcagtgattgtttatg

SEQ ID NO: 379557 - DNA, 5064 bp, Cannabis indica
aattatttcctttgccatattgccctaaatggatgtgatatcatttacctatatattatattaagtgtatgagtacaatcagctttattaattattaaaaagaaatctttgttagaagatacgagttaagtgatatagtagtagtagtagtagtgggccaaaaagacatatatcatcaataatatagaccttttatatatactcatcacttcagttactgttatatatatagaggataatatttttttaatttattttataattattttttagtaggttaattaattaaaaacgacagtattacaacccagatgtccaacacaagagctggcctacacccagacgctctacaacagcgcagtattcatactaatcagccgcaaaacacaccctcgatcgagttcatcaccagctggtttgcactcttgatcttattacgatctcatcatctccttccaaaacagattagccctttttcttcttcttcttctctaaatctcaatccccataaatggcttcccccgatcatcaccagctgcaatcttatcatcaccacctccaccatcatcatcgacaacaaaccctaaccctaattactcaacatgcattactccaagccacagagcagtggttcaagtagtagtaatattaatactaatgaaacccgtggccgtagctaccgcggtgttaggcggcggagcagtggcaagtgggtttcggagattagagagcctagaaaacctaataggatttggctaggcacattctctacacccgaaatggctgcggttgcttatgatgttgcggctttggctctaaagggtcaagatgcagagctcaacttccctaattcagccccttctttgcctgttccggccaccacttcccctcgtgatatccaagcggctgcagcctcggctgccgctgcaattggggctgcagcggctgccatgggggcgggtgcggccgccgccaaagatggtgctaataataataattctggagggaatattcatcgacaggatttagtagtagatcatgaggaaagaggagtttataatcatcatgaatatgttgatgaagatcttatctttaatatgcctaatgttctagttaatatggctgaaggaatgcttcttagtcctcctcgtttggacattgcaggtgatgatgatgatcgtgactactacgttggtaatgctggggatcaaaatctttggaaatttcattaataatgtcattgccttatatttatatataatcaagagtaaaactttgagaaataaaacgaaaccataacccttaattaagatcatcatgtgtgtaagatatttttaaattaagggagtgtaacgaaacctagattaattaatccatgacaaaaccacataatattagtgcgaactagtagtactgtacgagtggattgtcatcttttgttttctttgctcgatctttcgtttttcttttttgtggctctgttttttatgtttttaatcatgtgtatatagtattatgtatattaatttgaaactgctccatcgtgttatatatcccaataaatctctcccttgtatccatttctggatttcatttgaaaagcttcctttccggtcccttacaataacattatttatatgcccattattctcagattctggctaagacatgatatcttatcctaaagtctataaatatatatattattgtattagggttagaagttcatacacacatatatatggggaaaaacacacatatatattcatcgatttttccgggagctcaattttggatgttaaaaaattaagctgcaaaggggatatagtcgttcatacaattttatgtatcgaaccaaagtagcttaatttggtttggtaattaaaagaaaagcaagcaagttgggagtgttagtcaatataataatgaggacgttagtgtagtaggttttactatatacatgtagttttggaatttgaacctggccatatgaatataaaatataatttctgattttattattagtaattgtcgagtgaagttatggcccaccttagcctttgttgacgtgtcattctcaacttagaagggttactatatattcgcaacacacatagaaacgttgaaggatggatgctgactcttcaccttcttaatattcttttctgttgggggcaccttcgtcatgcaatggtcgtgggccaaacagcttatcatgcatttttaatacatatacaccttgtttatatagttacgagcattccttttaggtaccagtggtgtctagcacattcttgacatgttgtattatgatggctagcgatactccttaaaaactaaaatatataggacccgatacttagttagaccaatagtgatattgacatatatatataaacacactttgttggacaatcaatttaccttcactttcacgtatgatatttgatattattcgctttaattttatgctctcataattttatttttagacacttttttaaaaaaatctcgtattaatagtagtaggtggaacacctatattgaagattacttttgtttattcttctaatgcggtacttgggttgatacctcaataattctcctctcaaacaaaggactacgtactcgtaccttcccctctagtaaaatcatcttgtaccgcctttattaccaataaaacttgtcgcatgaccttcaacattatcatgaggactttcgatacacgacaaaaaacacatatctctattagataaggttatttggtaattatatatagttagttctagtttgttacatgttctgtttgtacaactgtagttagttacatactttctgttaactaacttgtcaggttgtatatatagaacacttttggtcaaaataaataatcaatgaaattcattccaactagttttcttctcttcacgctcattctcaatatgatatcagagtatttttatttgttttctctgcttccgtgcattgtcctcttcgatcgtcttattctttatctccattctctattcacttctgctagcttcaatggtcgctccaacaaccccaaccttcaatcctattatttttgctcatgaagtatcattgaaacttgaagacaacaattttcttctctgacgtcccaaaattctctcagctattggtatcattgacttttaaaatatcatatctgattctattcagcttccgtgcaagtctctcactccaaaagatgaagattgtggatcgatcaatcccaaattataggaggtttaatattaactattgtactcatggttgctctcttcgatgtcagatggaattttgacaagaatcgtttgagttgaaacttcaacacagatttggaaaatactttaggtatatttcattactcaaacctcaactaagatagatctatgcaccaatcaacttgaaaattgtaagaaagactctctttgtctttctctgtaaatgaatactcgcttcaaattaaaatacttgttgatcgatttggatatgttggtcacaaggtcactgtgaaagaatatattgctgcaatttgtaaaggcctaccttctgtctatgacacatttgtcatctctgttaagtcacaaaatgatcaatactcagttgttgaaattgaaactttattgttggctcaaaaaatttaatggagaatcataataaagattcggactctgttaaccttgatacaatcttggtttcattccgaaactataaaacttttcttccttttctaataatgcagataacaaatctatcatcgataatgggtcatcaactaattcgggtcgtggaccttggactccatgctatttcactaagatcgaacacatctggttcaactccaaatgactacaatgttggtcgtagctcatccacaccaactacttcacttcataattcttccatgattccaggaccatgaccaatgtgtcacattacttcaagattctatcaaagattcaacattgatttccttggtattgggcagctaatattgttaaacattcatctcaacttgctactgcatatagtgttgctaatgatacttgttaccctaactcaggtactaccaatcattgcactacaaccacttcaaacatcactcacaagcaaccttatgttggttcagatcaagtgcatatgggtgaattcaaaacattggtcacacactcttccacttaaatctctttttctaaaccacttgttttaaatcatatattacatgttccaaatatcgcaaaaaatctaatctcaatgtgaaagactaggattagaaggaaacactactaacaggacaacttaagccaggactttatatcgtagagcctttcaattacacatcaccaagtctgcttagaccttcaatatatctcaatgttgtctctactgttacttccttaattgtgattttgacttttatgttttcatgttataatttttccttgtgtcatcagaaacatgtccatccttctcctaagattgtacaacctatcatgcacctttataatattcttcaaagatataaaacaattactggtttttatgatacttgttgtgaagggaatatccataaagttcccttccctagatcacgcactattttcaccaaacctttgtaacttatccatattcatctttaggtccctctcccatgacttgatgatctggctacaaatattatattcattttatagatgcctattctaggtacacttagattttctttcaaaagcgccaaatttgatgtcttacaaacattcattaatttcaaaaccaaagttgaaaaggagttcaatcacctcattatttatgtgtagtctgatgttggaattattttaccaggatctagatttactaacaagtatgcttttaacatcctaaacatgaacttctaaaacgatatgaaataaacacatataaagtttcaggaaccttacagtggtttgcagctgaatataatatctccttccactcagatctctaacccttgtatcctttctgtagcagagtctcaccaagatctgagtccgaatctccttc

SEQ ID NO: 379558 - DNA, 1189 bp, Cannabis indica
cacaaaagccttaagtatttttttcacacagaaagattaaatatgagacaataacgatggttagaattagtaaaggattcctgtgaaatcttctaccatctcggaaaagcaattgtggtggcaaatgccctaagtcggaaaagtccagtgcaagtttatgaattgaagcaaatcttgccaaaactagtggaagacatgactagagctggaattgagttacagtcagaaagttggccaacatcgccttacagtcagatttactggaaaggatcaagatagcgcaacaaagcaatcccgtattggtagaacataaagagaagttcgaggctggtttagcaaaggacttttcagtatctatgaatgatttactgaggtataaagagaggatttgtgttccagtagatgatggaattataagagagattctagatgagtctcacattacttcgtactcattacacccaagaacgacaaagatgtatcaagatgtgaaatccttatactggtggctggatatgaaaggtgatataggtgagtatgtatcaaaatgcttaaattttcaacaagataaggttactatagcctttgaagattcctaagtgaaaatgggaagatttgactatggagtttgtagttggattaccgaaaactacaggactgtatgactctatctagataattgtgaataaatttaccaagtcagcgcacattttgccaatgcgaacatcctatacaatggattaatatgtcgacatgtacatcaaggagataatacgacttcacggtgcttcgaaattgattttctcatatcgtgatccaaaatttacatctaaatttcgggagagtttacataatgccatgggtaccaagataaagtttagcatcgcttctcatcctcagagtaactaatggacagtctgagagaaatatatagatattagaagacatgttgtaagtatgtgtacatgagaaaatatagatcacccattcattgggatgaaacaggtgagagaagatatcttgggctagaaacagtccagaaaactcgtgaagccataaaaaaatagagccgttctcgcttcaaattgtagactaaaaagctatgatgatccagagcataggtatgtgaaattctaggggattttgtgttggaattaattttaccaggatctatttactatcatgtatg

SEQ ID NO: 379559 - DNA, 1817 bp, Cannabis indica
gatattttgaggtaaatgacctctcgtcacactctctttttttctcccatgagtgagaggttggactaccaactgtgagatttctttctcgttttctggtctttcagggttttgtgattcgcgtgtctggttttttttacccgtttgttttaagatgtcgacttcggtcgaagaggggagtattgaggaactcagacttcagttcattgaagaggcgaccctagaacttgaagcggacttcgaggttaatgcagaggttgcaaaatctggggtgctggccaagttatgcggtacgcgagacattcctaaggggagactcaaacagattcttatgggggtttggtctttaaaaggtaaatggagaatgaaaacgctggagaagggtgattggagattcttttttgactctttggaggacaaagaggaagttctcaaacgaaggccatggattatagctggccagttgctgaatatcagtgagtggccaacagatgggagctggttcaatgtccctatgaacaaagctgttttctgggtcaagattcatgggcttcctaccccatatcttgtcttccagaattctagagtgattggggctaaggtgggtgaattcctggggtctgatggagttgataatcgtaccattgctcgtagaggctttttgaaacttaaggtggatattatgattgatcaaagacttccggcaggtttctacctgagtattaccagaggaagaagggagtggatccaatttaaataccgtaagttgccaaaaatttgttttaactgcggatatttggctcatgaccggagtgaatgtatcagagacaaggcgtttgcgtatcctccggtagggaatgcagtgcctctctacggtccatggattaaggcggcggttccaattcgtaattgttttgatactaagggcccttctctgttgagagataggccggaacgggaggtggctatgcaggggaggatgaatattccgtccaccagtactggtccccacgaagagcagggtacagatgtgtgcgatgagaccactatcctcaagtcggttggcgaaggtacggagtgtacgaaggatgaggcaaatggaatttcaaaacattcctctgagggaatgacaactgttgaggcacgtgttgtatctactccacgtgagaaggagcatcctatgaacaatttgggcaaaaacccagaagatgaaaatgttttagtgtgtatgatggcccatgtaggcccagatgcggcccaagtaattgaaaaaccccactttgaggtctgcaagtccagaacaccccatcaccacccagagcccacctttatcaaaggccctattcaatccgtggaggagttaactgagaaaatgactgggcctcttttggtggagagtaacaagatggactctgagaccaattggttccattcgaactctgtagtgattacgggttcaaagtcgaagaagaggaaagcgacaggtagtgtttctcccattattgttgtcgactctggaaaatctgagactccttcaaagcttaagggtcttgctgaagagaccaagattagtgacatatcccccttctctattggaacgaatactccaaagaagggatctacgggctccagaaagctgaggaataggaagattactaatgataaagaccatcatacagtttccaaaacccatggcaatgtcgagggtaggctctcaggtattaattctactcttccttgtgttgagtttggtgaattacttgtggaagttagagttgatgaaaattttcaattgggcgaggaggcgacccttatca

SEQ ID NO: 379560 - DNA, 2822 bp, Cannabis indica
cataaaaaaaaaagtttcatgtttatctatttaaattacacatttagaaatgttcaacatggttataattggtagagattgatctgtttattttcttgttatttttttccattatctttatttttatattttcttaaatgaaatatatatatatataaaaaagctctatctatatttattagtactactaattagggaaaatggctaagatgatttgcttaaatgctagactaattattaattacatctgtggggatattcattaatacgctgtatatgtcttaatcaggagtgctaactaaaatctttattgtatttatagcctcttttcaacttttatttcaaaaaatagaatattttttaatttttttatagtattatagagtaaattatttaaaaattttcaaccatcgatttagctattgtgtacactgtgaccatcaaatccaactgaaagtaccccgagtgacagttatatatatatttatatatataagaagaaaattgttatgaggcatttgaaggtgctaagcaccaagttattggtatattttaatacttgattcaatatattttattttaatttaataaataatatgaaaattgttaactaattataaattgtaacatcctgtaatattagacacttcaagttgccaaatagcaatacttatataaaaaaatattatgctaaatccttttttggtgtttctaaaattgtgtttttagtctatttattctgcatgttagtattgattatcactgttttcaataatataaagtgtgaaaataaaatttaaatattttgtggtacgtttatttacttgtgttaaacaatttttatatttttgattctataaactatttaaaagtttttaaaaatttattagtaattttaaattgttaagtgttgtagtgtacaccattataaaagataataattaaattaaaattttttcttgatgagtaaattaataaaaaaattatctaagtacgataattttaagaagtttattgtggactgatcccctatatatacatgctcagccaaaaaaacactcagaaaaaaatatagtttgttaagaatttgtttatttatttataatattataagcgacagatatatggccgcttctgcagtgatttcaaaacaatgggtgcattacacatttactctgatttgacaagtatatttatatttatttttatttttatgtctggttattggatgtatatactaagtgggtgtttccttgtttactgctatggtaatttgattttacatagagtagaattagtcctctttcatctttatctcgtttaattaagtcatcagaaaataaaataaaattccaacaacatcctgattattagatagaatagcttgtagtaatttattaaaaagcccgtaaattgtaacctttcagccaaacactagtacggattgcaatgaataatctttatttatatgtaccgtaatatatacgtatagataatgataatatattcccaaatattatataaatatatatgtactcaactaatttcctttgtgtcacttcgtaactttttgataacatacacacatttgaactcaaagagtggaatctttaattagtggatcgagcgatgagctaagatgatcaaattaaaagccactgggaatcccctaattgttttttttttatatgtgtcgatgaattaattccttgaaatacaactaagatgatcattgaatcaactatggaagaaattataatgtaatttgctataagtataattatatattctatggtttatttcctatgctataataatttaccttgatgtactaaattggatgagacatgatgagatgacataaagggttataccatataattaatggtagatttataagttgtgtaattgatgataatgcagaggttgagaaatgtgaaggggtgggttcatcggaggaggatcaggacaacagtggtggggaaacggaagtagcagaaatagatccacgtgctgaagacagagagctaaagaaccacctattgaggaaatacagtggttacttgagtgggcttaagcaagaactctccaagaaaaagaaaaaaggtaaattgcctaaagatgctaggcagaagcttctcaattggtgggagttacactacaagtggccttatccttcggtatgttctatatatatatgcctcaccaaaacgctctatttattttatattaaatcatacattatttttttttaacatattataattttacaaatttagaaaaataaataataaaaaaaaaaattttttaaataataaaaaaataattttttaaaaaagaaaagaataaaaaataactatattaataataaaaatagaaattgtttataagaagaattagagccctcaatcaaataagctaaaaccctctaaaaaaattcttatacatataaaaaattatataaatatctattccatataaaatgtcactatgtaacagaatttttattttaatattatattttgatttttttacgttaattttaacagaatattatttaattaattttataatattattatatatatttaaagataaaaattatatatataaatattttatataataaagtcttaattataaatattttatattagtcttcggtgtcatacttagtgtgcttatattattttttttccttttcgatcaatatataagtagagtgaaacttaacaacgattttatgattttattaattgatacatttcacataatttttaaaggcacatgatcttaaattataatttatataaattattttt

SEQ ID NO: 379561 - DNA, 6865 bp, Cannabis indica
ttaataatttttacaaatcacaaaattcatatttaccataatttattaatatataaagttgataaactttgctttccgtcggttaatttagtaagcaatatctatcaatacacgtataattattttatattatattctcacaaacaaactttgattaagaaactttgaaaaactaataataaaattgacgaattaatacatagtaataataatatgaaacatatatacaattatacatgacctttggccaatatacatataataaaacatgacatttctttttccaaacattacgatcaatatttacaattggacgaaaactcacacactatagctaattaccagattcaacacagaaaccagaagtggccccctttgggtttctccacatctttttttcctttttttattaaaaactaaaaaaaaaatagtaattaataatatatatatatatagtagtagcacttgtaagaaaattacatatgataaacccaataatactttgcaaatattattacaatattccacaatgaatcaacataccacatattcttaattgatgagtagtacgtacgtagactttcagagaatttttctccactttccactttcaaattttcttggtaaccaaacaaacacatggtgatattgatggagtaattaggctgctaccctgcgacgaaccggagagtactgaacaccagaagaagaagaagaaacggaagaggtcgaagaagaggaagaagctctggcgaaaggtgaggtttgaaagcggcctgagtcgccgccgggaaggcggatgtaggcgatggaagccatgggagagtcgttattgatgagccatgagctcaacaagtcgtgatgatgttcgtgcctgttgttgtttccgtttttgtactctactattactttgtacacaaatggaataagaccttccatttttaatatctatgaaagattttaagacagagaaggagatagaaatttttgaagaagaagaagaagttattagtttggtagagagagagattggttgaaatgtggaggggattataggaaagggtttaaaaaggagtagaaaatgagatgaaatagtggtgacgtggcgtaatgggttgttgtccagctagctcttcacgccaagccatgccacgtatgcagactatatatatttaaaccctgcacgaagacatatactattcaaatgaaagctctatctaaactatagccccctcctcattcttattcattacatcttaccaaatctccacacttatcacattcttttatatatttctttatcttcttggaattttctttctttctaattgttgttgctataatgaaattttagacaaagtattattgcttgtcatgaatagagtccatatttataccatttttttaaggtatttagctatataatttgttatcatcattttctaaatttagtagttacatggtaaaattctacttttttcatattaataatagtcgttaattataataaattatgactttctttttatatatatttatattttaatttttgattcaataaataaatagtaaatagtgacattaatatttgaaattaccataatttatgttttttaaaaggtttcttgaaaattaattagtgacacttaatttttagtcacttacatttaacattttaaaatgtcactaattagaatttttagtgtaatgaaaaagatggatccactgtaatcaacttttataaatgtataaaagatatatctagctcagtaattgaaaaatattcattaaagtaaagttggaagattgaacacatatatatttatataatatgtatcttagtttactattataatttattaatattacctccttaatcaattgttctggaggtttagtatggtgtcttattcccactgtttattaagctttgataacaagattggttggcattgtaatcttttgttaattattttttctaatcttaaagtatatatgcatataaataatagttattatatataataattaaccataagtttcttcctatgccaacctcatcattattttaatattaagaaatatatagttgttcaatcggatgtgttatttcaacgtgaggttcttaactatagcctgtaggttataattatataataattaaattgtatctaatattaacaataactgcaggcgcctcatgtatataaattttatatttatatacaaaatctaaagttgattagtctatacacatccaatatccaatggttttttctaaaatttaattaattaactaataataagatgcggtatttgtttggtaattgatgatattatcctcctttcatgaaattataaggaacctcccttattgaacaagggccgaaccaatggcaggaaaaggatttgaattaaataaatcacagtgatttttttattttttcttttggccatactttggcacagatataatcattgcccattaagtttatatacaattcaagaaaataataaataaaatctttaataattctatcttataaaaattaaggtaaacatagatcattttactctctatatttattaatgaaaaatacaagaaatttcatataattattaagtagatatttggttggaagaaatgaatgaaaaaataaattaaaaataggaataagtgtagtttaaagattaaaaacacaaatttatcttattaattaatactactagcaaggtaatctcttttaatctattaatgtggttccaagtggaaaaatcatgcttaagtactactttcacgtattgttaatatattaaaatataacaagtaacatcaataaggatttggaacttgcctttaagtgccatgttttctttagtaaattatgcttcttgatagtttatttacgaattgtttagttgcatctgttcttatttgcgtatttacaactgtgttagttgcatctgtcaaatatgttctcatcttgtttttgccatgtcagtttttaatttattatatttgtggtttaagttcatgctaacatggcagagctagttttagttgtttggtttggtcgattatttagagttgttaagtataaaaagctcagctagctttttctatctaactcctcatatttcctaaaatcaatttgagattcttgttctgctagggcgaaatttaatgtctttgtataatatgtgatttttgcaggttgttatttgttggatcttcaaggttgaagaaggaatgtcaatatgcgatgtttgaaggaagttcagattgatttttaaagggagttgttgtcagaagaaaggggatcttgtcatctcggatctaaggggacttaaatctttgttcttgattgtaatcaagtttattggtaacttttgtatggaatcatttaagtttacattgtttgatttgttaatcaaaactggagaatgtatgtttgaatgatttcttagtgaagatattatcttacccgattcttggggacccaagcactactcgattagaatgagtttccaatgcaggggaagcttgtaattacagtgttcatttgatttactatttttatacttgtgacagaaaacctaattatgacttagtagctttcgaaatatcttaaactttcaatttgtattagagccatcttttttatgtaaagaaattgtgatcatatagctaagtaatttctagttaggttttccttgttatctgattaggttcttgtgtaatttttttcccttctttcttgatttgttatttcaggaaatctaatccactctgacatttatctcgcagtgcaacattgtttctagttatgatttatgtaggctgataggaaagagagattttcaaaggaggatcctcttctcgtccaccaatgctagaaagatgtagttctccctattggaagaccaagatgagagccttcttgaaagttatggatgaacgtatatggatggctgttaccgaaggttggtctccacctactgttctgatgagggggaaaaagaacaaaaaattcattgaatggtcaactgaggagatggagcgagaaaatttaaattcaaaagctctacagactctctttaatgttgtctccacaaatcaggtcaaagtaatttttaattgtgagattgttaaggattcttcggagaagttgaagataaagaatgaaagacctaagtcagttaaaaatgataggttaagtggtttagccaagtccttttaaaaattctatggatgaaaatgagtcggtctttgagtttcatgccaaaatctatgatatatcgaatgaatcttatgccatcggaaaggtctattccaataaaaaatttgtcaaaaaagttcttggagtcttacccaaaagattcatgtctaaagtgacttcaattgaggaatgtcgggattgacttagatgaattaatttgttccctacagaattatgagttgactctacagagataggacaagggtaagaagatcaaagattcttaaaaggataaagttgagataggagtagcttttattcacaaggaagaaaatcacaaagagtcggacttctttgaatgttttacagatgctaattttgctatcttggctgaaaattatgctggctttctcaaaaagaattttaaaaaaataacactgggagaaaagaaaactctttcagcaaaaacttttctaattgaaacaagcttcctcaacaaaaagagataaagggaagagttattaaatgttgagaatgtgaaggttatggtcacattcaagccaaatgtgcaaacaccttgaagaagaagaaggttattgctgcaacttggagtgataatgaagaagattaagtgagtgatgagtctaaagaagataagttggttatagcgttcatggctatagaagctatgtcaaagggatctcatggtgataagtctttttctgatcatttggattcaattgttgtagtaaaaataaaccttatgaagagatgttcgctcaatggagctacatggctaagagatttaaagagctacaagatctaaacaaggctcttgatgacagtaagattgaacttgaggagaaactgaagcgaatgacgatagagctatgctctaaagatagtcaaatatacaagttgactgtcgcacttgtaagagccaagcagtctttgttttcatacctctgggcactactaccttgaatcaaacccttcataatcagaagctctatggtgataggacttcaattcgatataataagatactttataaacaagatcaagacttgtcgattgatggaactaacacatcctctttagacaaaaaggtgaagtttgtgtcttctccagtgagtaaaagttgaatctgagaagaaagctaaaaggaaatatctttaaaagtggaagatactaccagacaaccagaacgttttgttcctatttgtcacttttgcaacaaaagaggttatatcagagctatatgctataaactcaaaatatatctaaccaacatcataaataataaaacaacttctggtaagttctctcttgcttttcaacaagattcatctaagacatggaaacccaaggttgccaatcttgccttgcgagctcatacttcattattttctatgaaggagaatcagtggtactttgatagtggtttctcacgacatatgattggttccaaagaatccataaacaattttcaaaatttaaaagaagggtttatgacattaagtgacagtaataaagggtagatcgtgggacaaggggatttgaatctctcaagtgcatttccattgactggaattctgtatgttaaaggactgaaagcaaatttgattaatattagtgagttgtgtgatactaattatgatgttcaattcactaagtctcaatgtctagtttcatcggatgggaattcagttcttacaggtaataaaacttcaaatcattgctaggttttgtgtagccaaatgaaatgtcacaaggtttttctggaaaaacctgatttgtggcattatacttgggtaacttgaattatagagacttgagaaaggattgttactgtaaaagcagttcgtggtgtccgtaagtttaaattatgagaaacttgactatgtggatcgtgtcaacaaggaaagcaagtaaagtcctcccattctcctataaatgctcttcttacatcaagggtattggaacttcttcatattgatttgatggaacctatgcaaatagctagtatttctagcagatgatatgtcatggtgtgtgtggatgacttctcaagatttacttgggtgacttttctcaaaggaaagtctcatacttttggtgctttctctactctttgtttgaagttacaaactgaaaaaggatgtcatgattgggaaagtgtatcaaattagaggttaccatgggaaggaaattgagaatgctatatttgcttaattttgtgaacaaatggggatttgtcatcagttttttgctcccaataactctcaacaaaatgggcttgtggaaactaaaaatagaactctttaagagatggctagagttatgctatgtgccaaaggtgttgcttcttggttttaggctgaattagtgaatactacttgctacatatgcaatccttacttaagtcatctgcatatttttggttgtttttgctacatactaaatgattgtgatcatgttggaaaatttgatgcacaaggtgatgaagagatatttctaggttactcttgaaagagtcgtgcatactgagtatataacaaaagaacttccatggtgatggagtccatgaatgtgaaatttgatgaactagaagtatgtaatgtagtcactataatgatgatgaa

SEQ ID NO: 379562 - DNA, 4174 bp, Cannabis indica
ggtcgcgactactgaagcaaatttgacagcttcagtatctttcaagtaaaatatacattaactttacatacaaactctaaatgagttgattcaagatgacgttggaaagaagaaaaagaaatctaaagcttctatgttttgactttttccaaaatctgataaaaacatagtcaaatttaggcttgaaattttagttttattttcttgtaaaattttctccattctatagattggggttttttaaaatttgaccaattgatatattcaaagtgtgaaacctgaaaccaaagaaaataagcgtaattctattccaaatataataataaagaaggaaaacaactataaaaagtgacccaaaacgtaggctaaaaatagcctaacaaattctcccaagcagtcaaggaggttctctagccattcacaattaccgaaccaactttgcacctctaaaagcaacttcttcgtaacacaatcaaaaaagaagtgatgggatggatatgcaaaaatggttcctttctatagagtcttgtttgagtagacaaaggattatattcctagttattgctttccactcctagtgtatttgagtctctttttttctctttggtactgtttgttgctctacgatggaaagggttattcacattgaagctttcaatgaagaaatgaataaaactctacagcgggatagtgaactcgagatggaaaggatggaactttttgaggatatcacattggaggaagtagtttcaaacaaggcctatgtggggaaggtgataggatgcaaggatatgccgacatcggtggtcaaaaagattctcattggagtttggcgaagattagggccttggagaatgaagaaatgcgaagacggagttatgggtttcttttttgaggaagaggaagactgcaactttgtcatggaaaacagaccttggattgttaatggtgttattctgaatctaaagccctggccggtggaaggggaggtgcgagttgctgagtttgaggttgctagactctgggtccaattccatggcctaccaactcgatgcttgtctaatgccaatgtccctgttgtagctaaaaaggttgggtcctttgtgaaggatgattctaaaagcaaggaggaagtggttcgccgaggttttctcagagcatggatagatgtatggttagctcaccctatccttgctggatttttcttgactgcagatggtaaactggaatcgtggattcaatttaaatatgagaagctccctcacctttgtttcaactgtgggaagttagcacattgggataaagtctgtaatgctcctacggccatggtattcccgtctgtaggaaatgctgtacctatgtatgggatttggatcaagagtgagactggtaggacaaactatttcaaccatgctggaagaggcagtacaaagctcattgccgatagtgatggaattccagaatgggaactcaggagaaacactagaagaggaacttggaagaggaaaacgggggacacagcccctgagctgaattctgcaatcggaaaaggaaaagggaaaattactcaggcagatcaaatggtggctccgggaaagagaagtgcctacgtggcaaaaaaggtgcagagtgctacgcccactactgtgtacccgattgatcgtggcagtacgagtggtacgaaatgtattagcgaatttgaaaaaagatggaatgttggtgatggaggcataccagacaatgtaaacgtgataaatgaggtgaacaatggaatccagttgaatattgggcctgaggtttcggagctacctaggcctgattttgcagctgttgatgataataacgaactgataccagatatagagcccactattgcccagagcttagaaataccccacaaccgggtctgtctttcccagaaaccacattgtttccctgagcccactcctatagcctggcccaatcttgacccagaggcccaaaaaactttcttaaagctttatggacctgaatatctgaacttatacaaagcccaacaatccttattatcccaacccccctaatttattagagttgataatgcaccttctgggcaatagcaggaaaagaaaagctcacacatggttctaactgtacccttcatcgctgatccaagactttaatccgaaaccagctgtggagcttgaggttggttcgacaagtgaagaaggccttgatggaaaaaaatttgttattggcgctggggatgatgatgtgccagcgaacggggggagcatggcaaacgttcctatcgtaaaactagaagaggaccgcccaggaactcttcgagaattaagactcggagcagaaggaaaaaaggaaatgatgctattaatgattcaggggaaggagcgggaaatattaatgaactactggagaattgcattgaagttagattggaatttagccaaaattttggcagtggtgaggaggcggccataagcatgcccccaccgtcactatgaggtgccttgcttggaactgttgtgggttgcgtagacccactgcagaaaggacccttcggggcctcatccgtaacagcaatgcggattttttatttctctcggaaactaaggtgaatgtggagactatgagaacgattactaatcgattgggttttataaactgtagctgtattcctgcctctaatattgcgggaggattctgtatagcgtggagaagggggattaattgcttggtcaaggaaagttatgaggctggttttcatgtttcggttaactctggtttgggagcccccaagtggagtttgttttgtgtgtatggtactccttaccatcatctaaagagagcttattggaactggattactgagaaagtcgcggattgcaacgacccttggactctaatgggcgatcttaatgctatcctcgatgaatcggagaaggaaggaggaagaacttttaatagacaagaaggagagttcctaagagattttttgttcaactcaggaggcattgatctcggatacgatggtggttctaaaacttggcagaattcgagaattgctaacaaaagaattcgtaaaaggcttgacagggctatagctgattcaaattggtgccccatctttcctcgtgccagtgttaaaaatttgcctatcttcgggtctgatcatgcccctattctccttaacccgtggggtcaagagccaaaattacactacccatttagattccttgaagtttggatgccagtcctgaatgtggggaagttgttaatggagcttggaggaaatctcatcccagtacaaacgaaccttgtctgcaaaagaagttaagagtggtgaaatgtgatctcaagaagtggaaccaagaaaagttcggtttttgtgataggcaactcggggctttgcgaagaccattgagaaatatacaacaaaaaccaatcactaattactctgttcagcaagaagctcgtatccagcttgaaattatgacccttgaaggaaggatggatagaatttggaggcaaaagtcgcgggaaaacgggattcgggtttggggacgccaactctaaaattttccatgtttctaccatcattcgaagaaggacgtaacttcattggaagtgttatgaccccggagggagttcggctgtgacagagagatgccattggagacctattttcaggagcaatacagagacttattcactcagtcaggggtgtccatcgacgtggaattggagactctgtatcatgacaaggtaaaaaatgtggagaatgatcttatcattcgtgtcccggatgacaatgaaataaaaaacgtggtgtttaaacttcatcctctgaaatctcagggccctgacggtttctcaggtattttctaccgaaaatactggcatattgcgggaagggaagtgtgttatcttgttaaagattttttcttgaatggggtgataaacaagcaccttaaccatactttcatatgccttattcctaaaatcctgaatgctgatcgtgttgagctttttagacctattagtctgtgcaatttctcttataaaattatctctcgcatattgactggccgtttaaagagtatattggatagacttgtttcccttcccaatctgtctttatccgtaggagatggattgctgatgctcttaattg

SEQ ID NO: 379563 - DNA, 882 bp, Cannabis indica
tttctagtcaagataaagaaaaggaaaaaaatctgtttccttttataatacgagatttcttcgtttactcgtcgtttgttctgttgcaataaattttgagcaaactttggcatattgtcatcttgagttttattaaaaaaaaatgaacataatacgcaggtgttgaaatctcttctaacaaagaaaaagtggtccgcattcattactacttagcttgcacaagtattcaaatttgaaagattaatattcactattattacacttatttacctgctatcttttcatatattcctgtcatttattaagacaatgccattggatttgtgaaattggaaatgctattacaatttacaccacggacttcaagtttgtttttatttttttaatacaccacggatagtacaagttggtatccaaatttgattggacatttggactcgtgagatgataattctacaattctacttcagccaatctttgcttattatgtgagcgaaagatgatttatttgctctatgttgactatacactaaaatactaatgatgtacttgctatttactgatttaaaccaagttaaatataaagttatttattggtagtaatatcttttgaactagatcaaaatgcaagccaagccgaaccagctttcattgattatcaagagtactttttcaaaaaataaataaaactataattatatagaacactattttttgtaaaaattttatatttttgcgcttaaaattttgttttttgcagtttataattttctataaaaataacacgaaaataacaaaaaaaactacataaaaataacaaaaattaacactcaaacaacaacaaaagataacatacaaataacaaaaattaacaaaaataca

SEQ ID NO: 379564 - DNA, 3290 bp, Cannabis indica
gtttttttagtttattttttttactttttactagaaaaaatatatttttatatttttataattttataaatacatttttgtaaatacaaatttaaatagtaaaaattgtaaataaaactttaaaatttttgaaaaattctacctaattaatattagtgatatttaaattgaaaataattaaaaagagcactcaacgtgtcatattgttataagtatacaattgagtttcaacaaaatgacaccttagtagtactaggagtctaataatattgtttcatttaattttaaaagtagaaatatgtaagaattatgctatgtattttttttctaatagttgtagtattattaattatatttatatcttccgtaagaaattttttgagcttaattataattaaaaaaaaattatagtaacttaaatttttgaagtcactatacatgtagtattgtgcaccatataatgctaatataatataataactctttttgtaattaaattattttgtaaaatgacactacaatagaaaatgtaaaattttcatcaattactctaaaatggatttattattttctaatttagaagttatttaaatttgcaactaaataaaaataaattaaaatctttatgtagaatattttttataataaaaagctctatttattatttcctcctctttttttcattgtcacaccaataatgccccatacctttgggaaagttacccttttggtcctacaaaacaacaaacaataataaatattcttatactatcccattgtgtcctttctcatactatttttgttttggattggcactgaatatttcaaaaagtcatgttttttttttcaaaaacaaaaagaattaaaagtgtctaaagaaagtgataaacttaattaaagaaagtaatattcttataaaatatacactaaaacactacatcgatcgttgtgatctacaactaaagatttttgtgaaacatttaataaagattaaacccattttagtgctataaatatccataagaataattattttttgctttgtttgttgtttatgtaatgaaattcatagagaagggggcattaatttagaaaataaaataaataaaaagaggaataaatagtaaaagattgactaccttattaaaaaagtttgttatctaatcaaatgtattcataatttcatggaaatggtcaatattgatcaacaaaacagagtatcactttttctaacaggtctaactagtctgtaatttttttttttatatatttatttttgtttcaaaaaaaaaaaattttatagttgatttatatttgttgtgaagttgattttaccttattttttagtttttttactttttgttgaacaaagtatatttttatagttttaaaattttacaagagtatttttataattaaaaatttagaccgtaaaattataaataaaacataaaaaaagtatttttaaaaatttttcaaaatttttttacttaagaaaatcaaatatgtagagacaaaattcaacagccatttataatattaaatgtcaatttaaacacacacatatatatatataggtagtttaccaatccaacatttcacttttgactcacaataaactcactataactccaaccattccataaaacttccccataacaaaccacaaaaaaaatgaaaatcatgtgttatttttctatttgaatatgtacaattattgcttcaatttacaaaaatatttatattttattattagaattctaaaaaatcacgattctaaattgaattaattgagaataatatgaagtaggcagaagtaggaacctctcttaaataaaataaaaaggtcaatggtgtggtgtggttcacatccacacaaattaaaacactgtgtttcaacagtgaaattaaacagtactcacaatatatatagtgttattatttatgattctattataaagtcggtgatatatataatatgtaattatattaactaacggcttagataataattaagccaggtttgaagagctagctagctgttgtgagttgtgaccataacatacatacatgcatatattatatatatgatatatatatatatatatatatgaaatgaaagagtggactttgataacgaaattaagaagagaagatatagttattagttgagtgaagatattaactaaataatatatataaataaaaccaaatctcatcatatcatgtatatatgcctttgctttctccacaaacaatgttgtgttgaattcaaactacactctctctattaattctgatattttacatttatatatatatatatatattaataattattatcttccaaaagaaacattccccacaaaatgcacttttctttttcttttcttactttctttataatttaatttctcttttttttttctcaacctcttaagcaagagatgtgtacacgtggaaagtagtggtggcggtcgccggtggtggtggtggccgaaaaggactttagccggtagctttatacataacttgcttctatacttatagtttacttataattaattaagctcaattttggcgtgtgggatttctctttttggccatcatcattatcatcattaatacataaatataaagtatatattttatgtcatatactatagtaatattataatttatataatagtaaccccttaaataggttttcattattgtttgttgtcacaatgcctatatatgttttcttttatattatgtgtctctttttgttttgttattattattggaaaagaatagaaaaagatttataattcatgcaccaaacatgcaaagatggcttaaaagactttagcatttaggtcataataactaggacgattttttaaatttgggtaatggcccataatttatttttggcactatatatgtaatatatagtcacattgtttgtgctctaattatgtgggtagtctttctttctttttttcttccctcttgattggtaaccaaaggcatgtaataaaaaagctttaataattcattactcaaatgtttaaagaaagaaaaaaaaagaacataattataaaagagaaaatctatggaaagtcattttatgcagtgagcattattcaataatagaattattgttgagcaaaattaaatctacaaatgaaacttctaaattaatgttgaagagattagaacttggccattgatcgagttcaaacaatatcataatgtaatattcagtttatatatatatattggtatttggtatattaagtgtg

SEQ ID NO: 379565 - DNA, 3063 bp, Cannabis indica
ttttacaatgaggatcttattagatgaagtacttagcgtaatggcaaaggaaagattggtggctatgattcgattctattctattgaatactttatgagtcaatttagtgctgaaaactagcttttcaagtaccgggaagatgttagttcctagaaggtttggtcggttggttagttcctaattgggaaggtattaggagtggagtcattaccctttggagaacggtgggtaggtcggtccctaaataaagaagattatttttataggtaaaatgatcaatttgtcattgcatattgtttatttaatgccaattatgatagagatgagtattgaaggttctttattataatgatttgttcataatattcaaattttaatgcaaaatgatgaatcggctgtattgagaattaactaatagttaatcattactctaatctctctttttttataaacaaaaatttcaaattttttgaaaagcaatgaaataccaaggtattagaggatcttatcttttttgttatagaacagaaaaagggatgaataaggataggatttaaccaatttctgtgtaaaaacaaaatctgaaatctcagctataaatcgcctatcataaagaagaaatctcagctataaatgttgtgtcattttatttaattgatctcagcccccaaccatttagctaaattttgtgggactaggcttcgtttgatgggttacaaatatgacagtatttagatatttagttggccgggagaaataaaatctaaaatatatatataataaaaaattattaaattttttcttattttgaaatgatctcttttaaaatagaattattattttactgcaatggtggaaaaattattctactattttaatatgcaaccaaataaaaattgtttatttttctattttatttcattattttcaatcaaatacctagtgtttgaaattctaatagtatgatttgtgatggaatcattctatttctatgcaatacaaacctcttaaagctttcttgctttgaaattctattcacaaatcacatccttttcactctgattttatacacaataggaaccaagcatgtgacaagacttttccaaatacatgtatttaattatctgccacatttcttagtttagactattctagcattgtttttctatctaatgtcttatccaatcttatcttaagaagaataatcatatattatcatatcaaactttgtatttgaaaatatgttgttttcaagatattatattccatccatttagtcagtattattaattttgtcatgttgatgttgggttaggaaactctctttagggtcaatggccctcgagatccagtacgtacaagtcacttattacaaacttatataagtcatatgactaacaaccttatgtcatattacaacttaattttgataatgtaaaatgttcaaaaaagtttaaaaatttataaatggttttagataaatactacataaacaactattaagagaaaaaaaaaattgattaaaaaattatcctcattgttttttttttttttgaaggaaaaaatttatcctcattgttaaaacagttaaaaagtaaatacagaaacgattcttttgaaaatatactatagaatattacaagtttatatctaatatatgaatagtttttcttacaaataaacaaatatattttttaaagggacaaattagcttttgcagcttactagggctcgtttgtaacgtcgtattaggtcgtatggtattgtattgtattatattgaattggattatacatcatgtttttatacaatactatgttaaattttaatttatactaaaatattatatatttaggtgtccataaaaattaatatcacatataattttacataaaaatattatataaaatacaatttaatataatactataatacaatacatacggtgtaatatacaaggtaacaaactaaccctaaatatatgaatactaaattcagccaaataatgtatttgtcttgccttctattataaaaggaacttgtctttttcgatgttgcgtattacaacaccttcactataactatttttagccaaaatgaagctatcactgttgaagcagttgtgtttttcaatcacaacatcctataaagtggttgctatttcaaaaaaataataatatatttacacatttgtctatttatatattattatgattttaagtttgaatctaaaataaatattttttaaaatatttgaataaattataatattttagctctttgatcattttgtttggtagtttggctatagttgtatcaatacatctttacaggacgatccttattaattaataatattatcttggcactcttatttattttgagatttctctcagtgaatttaatcgtgagcttttactgaggctaattttttaatatatatttaatttaaaaattaaattaaaaatatattatatcagatgttctttttttttttttattttaaatatcttttaaaatttactctatatttataaaatattatttattattttaaatatattttagtagttattttaggttttaatattttttaataggtagatagatttgtataaatattaatattatatatttaaaatgaataaaatatattagaaattaagtatttgtgatgtactttaaaaatgttaatatatgcaatgtaatttaaaagtttgatataatatagaaatagtaaaactttagtaatatcttaattaggtagagtaaataaactaacgagaatgctttgggaaatttacaaaaatactgggacacgacaaactttacatttttactgtccaagcccattttttatttcttttatattgtccagacccaatatatttacttttatactgtaaacagtaaaaaaaaacacaaacaacacctctccttcgtgaatggggacggacaaatcaacaccagaatcatataaacacctggaaaaaaccataaaatctggaaaagagaaaaaattactaaatcaacaacaaattactgttttgtagtgttatttt

SEQ ID NO: 379566 - DNA, 6360 bp, Cannabis indica
ttttttgaaaacaagaaaattaaatatgattgcactcaaagccattcgaactccattcacagcctcaaaactcaattcttttaacacagccagattgtccaacaacaaaaatatttcaaccctttgcctcagcaagtccactgattctgactccgaagatccctcacctaaaggggatcctcagaagcaagagcttcttgcccgcatagcccaacttcaaactcagaaagtccgagttaccgagtacttagacgaaaaatcatcatatctaacacagtttgcagaagaagctgaagctgaatttggcaaggtcggagaagaagctttgaaagaaatcgatgaagctggtgatagggtcagcaccactgcattacgttcctatttgtccatgcaatgtatcaaaatgataagaacttggtttcatgcaatatctttttagtgacaacccttttgtttgatcattgtggataagcagataatggagaatatcaagggcaaaatgcaggagtttgaggagtctgcagagcagaacagactggagattgaggagagtgaaaacgagttagcagcgcttgaaggtcagatagaagaagaccgaaatgaaggattgttctttaagaacctgagggagaggacacctgaacagaaagtggaagctaaggaggaaatgagaaagattaaacaggttactaaacaaagtgcggagtcaaagattaggagaaacatttacctcggtttgattgggttggtaggcattgcaattgctgattctatcatctctacttcgtctgattggcgaaaagccgcagttcttgcggctattttagcaggtttgatttcacaagtcatctatgagcagagtatattgtcagatacaaatgaaacaggaaaaactaagtcggaggaaaagaaaaagtaactgtaacttcccaaaacagaaattttaagtttaagcccccaattgtggtaggaggaatatagcatgattaatagacccaagtaagaactaatgacttgggcttgatatatcaagacactttgcttttgcatcatcaaaatagctggtcatggtgatatgactgaaatcaccataaacctttgtaaattagttccatttgatgcttgtccaaatttctctatgtgatcactgtaaagctatcaaattaatatagcatgaacagtccatatgcatgcatctatagtcatatattcatctctcctgcatgaactttgtaaatatagctttgacagtcaatgaatgcatgcacctatattcttttgtattgaagaaacataatatgtgtatgtaaacaaatctgcctattattgctaacaagcttccaatgaaaaagatagttaggccatctatgagctcaatttattgtcaggaccaacaaaatatataaaaaaagaaataaataaatgaataaaaagttacgtccgtacatcccttatggagcagtgtttataagttttgaccgcaacagttaggaggaatgtagcatgactaataaacccgagtaaaaaactcattacttaggcataatatatcaagctattttgcttttgcatcatcttagtagctgatcatggtgatatgactgaaatcaccaaaaccattaaagttagtagtcatccgatgcttgtccatatttctggatcaatggatcctgatataatatatacatgtagctgttaaagttatcaaattaatataactgttgatagatgcagatatatcattacacctaacaggactaaaatcaaaagaatgatacatgatacatctaaaaagttattagaatgaggcaaaaaaaagcaaaaagcacaaaagagaaaagagggaaaaaagatacaatattaaagtatctcaccattgcattggcatttcagcagaaaaagcacatccaatagttttgctttttcttttatgactcacaaatatttatagttttctacagccaaacaatgctattgccaggttttccaggagtgctccacaaaaatgtaaatggcccagaattgaatttactatgccactaataattcaaagttggcattcaggttacccaacaaacgctttccaggagtgcttcatatatttgtctagaaagaacaagaatccgaactgcaccaggagaatttcgcaattattacagaacaccaggaaacaatatatagagaaaacaaatgaaacaacagtaagaaaagctgttacctgtattgattatcaaaagtataaaacatgaagctattatcatttggtagtgagaagtctaagctaatacaactatggataagtgtaagttttagccccaacaattcagaggaatatagcatgactaataaacccaagtaaaaactcattacttaggcctatatatcaagaccctttgcttttgcatcatcaatatagctgatcatggcgatatgactgaaatcaccaaaatcattgtaacttatagtagctatctgatgcttgtccaaatttcttgatggatgcagataaatttttaaattatttaaatttacaatatataatctatgtaaataaatctgccaaataaagctgacatgactaaagctaaaaggataatacttttgaatatcaaaaagaaaaaacatcataattttttttcacccttgcattggcatctcaaaagaaaaaggacatccaatagcttatcttttttttttggactcacaaatacataaaatttcaacttgcaggttttccgggcgtgctccacaaaaatgtaactagctaagaattgaattacctggccaataataatttgaaattggtattcaggttacccaacaagtgattctttcttttttttttgtcaggttggtagtcttgattccggaggacagaatgttcaaccccaatatttcttcgtgttcaaggttccaatctgcaccaggataaatttgcaatgattacaaaccaacacaaaacaatataaagagaaaacacagggaacaacaataagctaagataatacctttatcgagtataagaagacaattttatgttcttcatcttaacttgtgagacattactcgtaacaaaagcaacagttcttccagcattaaaactattgacagaagctaaaaagatgtatacaattgctggccaaattttatcaccattaaagctaaagcaacaacttctctaatgatatgaaacgctggttatattgcgctcctatatgaagtatgtgtaaatttacaaatgtaagatatgaatggaataataaattatacctataacacctacgttatcttttctgcatgaatgcattcaaaacaacagatcatccatgatagttctaggattaagtcatatccccactgttgagtactgctctgacaagaatgttccatgttatggcagtaggaagaatgccatgactcaaagcatcttccaaatatataatagcatctgatagtctattgcaagagcaaagccccttgaaagtaatattatatgatatgatatctggctgcagcccgtgttttaaaatgcgagcccatatccctgatgccttattaaaatctctggctttgaaaaaaccctccatgagggtgttgtgtgtcacaagatttggaatgcagtcaccctggctcatctgaaaatagagttccagagcattttccaccttgcccgcagagcaaagaccatgaattataatgttgtacatagttacatcaggcttcaaacctttgtcacgaacttgctgccacaagttgagagccatatcaattttttggccctgacaaaggccatccatcaacaagctatacgtgaccatatctggttcccacccctttacaagcatttccttaacgaaattgtatgcatcactaaatctttctgctttgcacaaaccatttatgagaatattgtatgagacaactgtaggagagcaacccttgttgctcatttcctggaaaaagcaaattgcagcttcgagtttggatgctcggacaaatccaccaatcaatgaattacacacataagagttcactttatagccacgttgacctatttgatcaacaactatggctgcttcatccaatcttctttgtttgcatagcccgtttatcaatgaggaatatgcaaacatgtctagatcacgtcccctgtcttctgcctctttcaatatacataaagccttatccaagtacccattactacataatccatgaactaatacaccataagttgtggaatctgggacacgacccttctcaagcaaatgttcccaaattaaaatagcttcttccacatttccattctcaaacaatcctttgagtaatatgttataactcacaacatttcgacaaccactcctacccataacctcccacaactcgaagcactctttaatccttcccgctcgacaaaacccgttgagcattgcattattggtcacaacatcaggcaacacaccactctcaaccatctctttgtaaactttctcagcaccgtctacataatgagcttcgcacaacccatgaatcattgaactgtaagtaaacaagtcctgctccctctcgttcttcttcatcctattccatatttcgaaactctcattgaacttcccacatttgcacaaaccattaatcataacattataagtagctgcatttggataaactgtagacgcttccaacaacctctcccaaatctcattagccttctcatagtcaccttttctaaacaacccatgaatcaaaatattataacacataacatcagggtcaacctctctttgagacatttcatcaaacacctccaaagcatcatgcaagttcccatttttcgcaagcgcattgatcaaagtaccatagctgaacacatcgggttcgaaaccattatcccacaaccaattcaacaacatcttagccttctcaaactgccgtttcttacaagaaattttaactaaaatattataagttcgtaaatcaggagttaccccatgtgcctcaaacgacgaaaaaaacgactcagctcgatcccaatcgtttgactcgacgaaagcattaagcaaagagttatacgaccttatttcaggttgacacccaaatatctcctccattcgctgaaacacatccactgcttgatcagccatggagcttttagcataggccttaatcactgtcaatgcaacatcttcagggcacttgcatttctgggttttaatcagttcaacgacccgacccacgtgactgacgagcctcgggtcaaccaaacggcggaggacgtggtggaagatggtggaggagtgagcgaaactcgggtcgcgactcgctgagtagaagagtgcgagtgctgtgtgatggttcttttcggctttgagtagtttcagaagttgcttaggagagatatatttggggaactccaccatgtcagagaagtgaagttgaagttctagggcttctacttcctctcatcgtttacagtttacaccatggttttagctgaagctcagctaaacacaacggccattttctcttccggcggcaactgtaatctttgctcttagcaccattaccatatttatatttgggccgactcatttatgggcctggcccaaaccaaaaaggagaatttacaaaaatattggaatttggattagttcttacaaaaatactgtcaaatagaaattttttcaaaaaatactatttttttataaaataataaaataacagaacaattaaaaaatagtggaaaaactaaaaaaagtaacagtaaaataataatgaatacttaacacagtatacagtatttttgaaaaaaaatccacggaaaaaaaaaaattaagctcagaccaaaaaggttttgtaaggtctttttgaaaactaccactattgcttcttaaatgataaatcataccacataatatataaatacatttatatcacctcgcaatatatttttaggatttttttttagataatataatagtacatccacttatttattattttatatcatatataaaataacgaaaaaaaaatgacaattttgtgaaattttacaacatacgtcaaaaatattccaacctatctttagatacaacacaaaaaaaaaatcttgggccctctaatagtaatagtcagagtcggccctgatagcttatcttatagggctattttcaaaaatatgagaaaaattattaaggttatgataaatatggcataaaaagtagagtcggcgctgaaaaagtcgtcagaattagcattgtcgctagtaaagtcaccaagaaactagtttcttgatgaagaaaccggtttcttggtaattttttcagtaattttaccggtgacaatgccaagtccgacgactat

SEQ ID NO: 379567 - DNA, 2591 bp, Cannabis indica
ttttaggtttgacgaccttggaaacccaagccaaaataccctaaggttaagaaaatttagtggctaagaaattatatataatttattattattattatctgaatatatatatatatatatatgataagttttaaaacaaaaacacataacgctaacccttaaactctccttctctcgtacaaccgaaccactaccactatcaactcttttttaatttctcactctagaaccaatctcttccaactctattaatagctagaattgaagctagtagaggttagaacttgaggtaagtgtatagtctattttattctttgaaagtttaggttttaaagtttgactgtattttttggctattatggagtgtgtgagcgtttagttttgtttctaaggtgctatgggattgattttgatgtttatttgatagctttgttgtagctttgaggtgataatcacatttgaggtgttaagctcaaagcttgagctttaatggtaatttttatttaagagcatggttctgaatcctgtcacgtagagattttttatatggatgttatgtaagtgttttgtgaagtttggaatcaattggttagcttttggtggagtttttagaagttgaaactcgagtttttttgtccctgcaaaaaacaattaatcgtttttggagcagaaaaaaacagttaaccgtttttggtttttttcaagaggaacgaaatttatattttggccataacttttcactcaggtgtccattttagacgttatctatactgtttcgaagcttgtaatgagatctacagtatagtatatactttagagccaaagtataagttttattttaaggtgtttatatcacgaggtttggtagaaaatcctagattgttttaggtgaatattaagcagtgttttaggatagcacttatcgatttaccgttgttgcgacatagggccgagatcatcaggaatttttctccactcaagttggccgacatgcatgaatctggatcaaaggtaaaaaagaatatttgtactacatagcatgttatgttaggatataattattatcgttgtgaatcgattaatatcgagattaaaatgtaattattaccattatgtgatgaaaagagttgtcttattagacaatgatgtaaaggttgtcttattaaataatgataaaaagattttcttattagataatgataaaaatgttgtcaaaaggttgtcttattagacaataatatttgagtaccaaaggattaggtatcaaaagtcatgactatacacgaaaattattgttaggttttctatttgtcgattatcttattagacaatgacagatataaggatgacgggttagggcatcaaccttgtcttattaggtaatgagatatatagatgttagaatagcgtatcaatgttgccttattaggcgatgagacatgtggatgccggattagagcatcaaggttatcttattaggcaccattagaaaatggttactttatgaagtaacaaatatggttggtattattaaactagattggtatattattaaatgtttatactgatgttaaatttgaatgaatgtttgtattgacttggacttatgcatgcgagtaatgtacgaatattgattatgatcactttataaagtaatggatatgacttgtgttattaggtcactaattttgtacatgtgaatatctttatactaacgtttatttgcaactcatattagtagtgatttagatttaatcttgtgagtaatgtgtgaacatctgatcctgattttttgagtataattgataatatatgaataataatttgtgatattttgttgagtccttatgactcacgagtgttatatggtgtaggtaataggtaaaaatatttagacaaccatgagtcaggaatcttctccaacaaatgtacatatgagcttatctggcaagtggtgatgagttgttgccaggaattgtatttcaaattttatgaacttttacatgtatttttatgataatattgtaatgacatgtcttgtaatatttcaaatagggatccccaattgtaaatgaattatgccatgattttataatttagattagttagaaaaattttattaaatcatattttacataaattgttagtttattatcataaattagtttataaatgcacacacgtggcgtctcctaaacatagagcgttacatatatactataatattataactctcaaaacctcacttatctggctagaattctatcatcactctaagttgtatacactgtatatactaatgtatataggcgtgtacactagagagaaaagaacataggaattcaaaatttattataaccaagtgaagggttatatctaatgtgtagatggtgttattgactgagaactatatagaagtttatttatagtaatttcttagggttagggttagaactaaatagaattaaaaaagataaaatagtcaccttattttactaatccttggccgaacttataggtaaagcccatgggttttataaagaggaaattacacttagtatgagattttaaaagttcttatgataaatatg

SEQ ID NO: 379568 - DNA, 3067 bp, Cannabis indica
taattttaaattttagaatgggaatcgtcgctcctcacccaattctaaatttagaatgggaatctctagccccacccaaattttaaatttagaatgaaaatctccgcctcaagagaaagtccttgcccccttatcctcataggaaaaaatatgtatatctacctaacttgaagtaaacacaccataatttcctaagtaaacacaccataaatagtttaatttgctcgctcaaaacgtaggctctttcaaaatatctgaacttcacttattttaattagttgattgcctaactttaatttattagccgttatttagtccaataaggtttgcagatttttcataaagttcatttattcccctcaacaaacacatgagaacaaaacaaaatgtcatctgaacattagattaatagttgaaaatgaggaaagtgttaattatacaattattattattaggccataatttgtggttttgaaattgaaacatgaatgaaatcctttcttttaagaaaaagaaaacatgaatgaaatgagtttggattattatatagtgtgataagtaattgggtccaactaattatgatataaattgtagatacctatgggatattcaccatcattatatgtagcaattagcatgttgaaaaggcaaaactagactttgggggctcctttccaacctatttgctggcaattgaagtaacaaatgcaacaattagccaaaagtagattcccccgcattgcacatgttatttatttatatatttattatggcattgtttagattgtattggcttctagtgctttgatcattactctgaaatagaaaaacatatctaaatgtattaatttaaacattagtggcctttgtacggtatatatatatttgttgtttgatccaatggagttagtggatagatagagagctcagccaaaatttcttttagctaatctggactgagtcactgtgattcagtttcatttagactgaatttcaactaaatttaactgtcattgtgcactaattttcttttacttttgtttgaatttattttaatgccttgtgttgattttattagatagctaagtctttagtaggattgacttgtttgttatatcatgtacgtcaagagagtacttatcaaattgagtaaggtttctttcattcaataaaaaaataataacaataaagtggatttgtgtggaatattatgcataaatttgatatataatgtcagtttaatcacatttaatgacatatttaaattcaaccacaatattgtttacatgttttgattttattttattccttggagttaacccaataatgacaagtcattagatatttcaaaagtggttggaactgtgaagttagattttgatgggcaatttctcaggtcaagtcaagaatagatttacctaatgaagctaacttttgtttagaatagactcttaatcccacaataaatcattttagtttaaatgtcttcttatttcattgtccaaacaatttggactcaccttaaattacccttaaactatttatttatattatccatataaccgaaaaaaaaagtactttgttgtagtttgtacacaaaacactcatgctcatgcctagcctagaacaaggaatattatattcattaccaattagagtagtagatataatattgaagagtaattgtgtttcatcaccaatttagtaagagtagtttagtgtttgttttctcaaactaggtatatgtgatatcatagaagaagagacataccatgttgaggatgaggatgaggagtgctgaagttttcaatgggtggatgcaaaattcacccaaagttttctaacttttgatttttctcacaaaaaagataaatagagagagtaaacaatttgtagatgaagtatcgccctcaccacaaatatttcaaaatgtaataaacaaaaccatttcccatcccccatgtgggccttcttttgtcctagaaatatcaggaaaatttggctgccatacaaatgggcccactaacaaggacacctactcaatcagattcagagcaagtgagaggtgctgaggaggaaaatcatcaacttcaaccctagtcgtaaacaccatttatggcttaaagaaaatattagtaataataattttgcaactttccttacatacatttttattttattttttcttttgaaaattttgtcctcatttttgataaaaaaaagaaaaaaaaatacagcccctaaagctactcattagtgagtgagggagcagtggaaaaaagggacataacccaaaatccctagttattagtaaattggtgaggcataataagctttatttaaaaatacacatgagatcaaataaattatattataattaagaacttataattaaataaagttatactagaaagaaaatttaaaacaccaaaatatatcaatgtaacaacaataacaataaacaatccttaatactttatcacaatagaattatttttgagtaaatataatatttatacatattttacaatttataataaaattataaaatataaatatgtatatattttattaaaatgtaattattcttaattaattttaataatgtgatcgtatttatatgttgaaactaatttaggttttctattagtcttgtcttttgacatagttctttagtcttgtcttttgacatagttgtttagtcttgttttttgacataatttttagtcttttccttttagttttttctagttcgagtcttgtcttttggcatgggttgtgtagctcaaaattatcattgtgttatggtagaagcattcaagaaggggaagattggatgtgttcaacccgaaattgctgagataataggcattaaagaagcattgagttggattacaactcattcgtgggatagagtcatgttggaaacagatagcttggtgtgtgtccaagcgattcagagtggtattttatgccttcacaatttgtgttttgtaaaacgatctgtaaataagttggctcattgattgacaagagactcttatttctctacaggtcgtgtgcttca

SEQ ID NO: 379569 - DNA, 1640 bp, Cannabis indica
aaacggaaaaagggctcaaggactaaaccacaaagcaccataaggatccctaacaaaagaaacccgtcacaaaaatgcattcataaatcttgttggaccttataaatttaaccgtatttccaaaccgggaaggacgatatttactgagtactaattttcctagtgtgaagaaaaattcctagttccttcactctaatacttcctaaatttttcgacgaatcaatattctaaacaccgctctacatgacgaagcatgtaaaaaaatagtgaaaatgcccaaaatgtatggcgacgccacctacaattgctacccaaaacctaactgccctaaaaactagttaagctatgagtttgagacctaagtacttacttggtaatgtcgagaccaagggtgttgagattttgggtgtcaaatgtaacctctcatgaaaactccagaagcgcctttccaactcgttgacgttctcctaaaagtttgaaaaaaaaatggtaccgagggtgtacgagtctttgagaatgggggtgcacctggagataaccttgatcgcaataggagaaaatagtttaagagctttgttgcagggtcttcagacattcacctaagtttcttggttttctggttcaattttctctctcgggaaatttgggctcaaaaggttaaaatggaaaaagtggtaaccagttgacttttaccccatttatatacgacgtgctcataatcctacagtttagattttcactcagaaaacacaaatatcaaaatttaacggtctgaggataccaaagtttgccattaaatggagtgtaaatgatcgaggcttattaatgatgatattctccttagaagtctcgctgacacgggtccaatagattagcaacatgtgtacttgttataccttttttggactatttaatgaaaaggttgaattgaatgtcatgtgacatacataataaattctcacaataaatacattgtgggacaagtcgaaaaaatgcaagactcaacctgtgaggtaatctcatctaaataagaatcataaagttcatgaagtgaggtatttcagcattgtcaggatgttatttctataaatattcaacatctcgcaacaaagatcttgtagctgctcgtaatactaggatcttatagctactcatattacaaagaacttgattcacctcgtaatctacagtagtgatgattcacctcgtaatacatagtactgattatttacctcgtaatacatagtagtaatgattcacctcgtaatacacagcaataatgatttacctcgtaatacacagcagtgatgactcacctcgtaatacataataatggtgattcacctcgtaatacacagtagtgatgattcacctcgtaatacacagtagtgatgattcacctcgtaatacacaaagtgatgattcgcctcgtaatacatagcagtgatgatttgcctcgtattatacagcagcagtgcacctgctctcaaataacatgatctggccaagtcaaatccacttcaaagaccacttttttttgtattttaatataaagcagttatttgtatttatccaagtattcagttttatgtgaaacgtggacagcaaccacccatcaattgtaacttttcactaagata

SEQ ID NO: 379570 - DNA, 1957 bp, Cannabis indica
gattatcattgtaccatatgccccaaattatcatatgtatatattaaactaaaagtgaatacatttacctctaaggtattctcgattcttttcttatgttgtattctcggaacggtgatgacaaagctagcaccttgatctttcagaccttccaccacacacaaggactagtatgagctagtaggataatagtgtaaataaagctcttgattaaatctcaatacttgagcaagaactgtttctttagtgatggagagaaaatgtttactggtgaatgatatgtctatttggagggcaggtttactttaccgcctgcgttgaagcaatcatctataatgttttgttttgggaattgttttgaacgcttgggcaattccctgacgctatgtgattcgagaggcttacgtcaagaatagagtttgactttgactttagtgttcttttgggactaattgtgcactctcggacgccccttcgtgtctttaagagaatacaaaaaacttattatgttaatattaatctccaaaatacttgcgtgggtcctatagacatgtggcttattcttcacttgccacgtatttggtgaaaagtacggataccaatagtacaaacttattttttgtactaaatttaacacaaattttaaatcttatataagagatggtattattttcggtactataaatatttaatttttttaaaaaaaattacaaataatcttaactaactacaatatgcataataaaaaaaatagactacaaatctctcctgaatactaactaaacaaacaatataccgaaacacccttaaaagggtgtattaactactttccctatatttgtccactaacttcaattaaataattgtggtcacctattatgattttaatgtctgataattagatggatgtgtcacctgacgcataattaaaattgaattttaataaaatttatttaatgcaatttaatttaaccagtttactatgtctgagataaattaatatttaaataaaattaaataaaaacgtggttatcattaattgacgagtggcaatataaaaaatcttcctttaaattgaaaataaatactttttatccctaaattataatcctggtagagtttgtcttttgaatttttctctattacaaaacttccttttgaactttaaaaattgttgtaaatatctcttacagttacattatgttttttatttaaacaatctgttaatataacactaacataacattaattttacataatttaagagtctagacaaaaaaaagaaaaaatatatataaatagtaatctattaatcaattataagagcatgcatatatgtttttagaattattatttgtaaatttaatatcaataaactcaattttaggtagcttaaaattatcaaaaaagcttttatataataattatacttgtaactcataaacaaattagtttaaaaaatgagcaaaatataactgcaaaggatatttacaataatttacatagttaagtgagaattttataaagaaaaattcaagaaacaaaactttacaaatgtcataatttaggggtaaaattcaatttattcttaaaaaattaccatatattattatttttttttttctttttttaaatttacggtttgagtttctaaattagtttctatgtgggttgatatacgattttaagttgcgatttaagttgttccgttaattgcaataagagtttttatgtaaaatttcgtaaaaatgtaaaaaaaaataattattttaaagtgtaaaaatagaaaacttcaaaattatttttttttaaaaaaaattaacaaggtttaatcttaccaccacatgatccaatccaaaaatatttaagaaagaacattgccaaactattgatattttgaagggtgattattgcaatagaaccagctaaaaaaggacgtaagccagtactactagga

SEQ ID NO: 379571 - DNA, 933 bp, Cannabis indica
aaaaaaaattgatttttggtaaaaataatatctaatggtacatttgtgagagttaggaaaacttagctttgaaagaatatatatgacattttaacgattcatttgtaatgtcgttgcgatagtatgcgatgaaatctaataaaaattttggttgaaaactttttcattcgaatgtcaatttgaggtgattctttaaaagatccaaatttggagtgtgcaaaacacaaaattttaattacaaacctcattgtagattaaaattataaacttcattatcgattatcattttatacttcatcatagattaagcctggtattctacgcacttcaaatttggccttctatacattgtaagcatgaagagcttaccaaattttcaaattccatggtgaaaagttatgtcttactgaatcttttattaaattttatcgcagactattgtaaatgtatcgttaagaattaaatttttttatagaaaaaattaagttttgccaacatcatcacaattcacaaatgcatcattagacatcttatttttgcaataattaataaataaataaaattttcacaataccattgcaaatgcattattacattgctttattgcaatctccataattctcgatggaaaaagaattgtaaacataacataagaaaatcttataatttgaaatccacaaaccaaatcaaaatcttctctacggatttgaaaaagaaaaatgcaatgggtgcttcaatggtgattgaagttggcattgatggtggtagcacaaaaggtggtcaacatccgagaatgacaagagagatggaggaggtggtcggtggctaggtttcacctccgaaatgggtgtggcatgatagaggatagaggagggagaggagtggtgggagaggaaaatcaatttgtttagcatagaggattgtggaagggag

SEQ ID NO: 379572 - DNA, 3127 bp, Cannabis indica
attaaatttttatttaaattattcttgcatagatagttaattgcaataaaatctattgcttagtgagttttgtcaccaaattttgtacataggtaactgcaataaatctatatgctatatattaacatttaaaaaaaaaaaaaaagcttaccaattcatgcatttgattttgattaatgtcatcattcaatttcactattatgagcaggaaaatgggaaagaaacaagtatgtaggagtgtcaatggtgggaaaaaaccttggcaagttatgggggtttggaaaggttggatcggaggtagcgaggcgagcaaaagggcttggaatgcacgtgattgcgcacgatccatatgcagccgccgacagagctcgtggtgtcggggtagagttggtgtcgttcgaccaagccgttccaaccgccgacttcatttctctccacatgcctctcactcctaccacatctaaactctttaatgatgacactttttctaaagtgaaaaagggtgttaggattattaatgttgcaagaggtggtgttattgatgaagaggctttggttagagcccttgatgctggagttgttgctcaggttgaaaattatggtcattttttgtttagtgtcttaattatttgactattataggattatttacagtgaaaccttcttatatttatttttcttcgtaaatttaaggtatcagctggatattatcgttaaataccaactagattattactgtattagtttcgaagtcttactttcacgtatacacaagtgtatacagtgatcatccagttggtatttaacggtgatatttaactgatacttcaaatttataaaaaaaaaataaacataataaaagaatcatatcactaaataaaataaagagttaagtgtataatttaagaaataaagggatttcgctgttaattactctttatatatttatatatatatatctataactaattttgttttgtataaatttggagaaaaatacaggctgcacttgatgtgttcacagaagagcctccacctaaggatagtaagctagtgcaacatgaaaatgtcattgttacacctcatcttggagctagtacaaaagaagcacaggtattaatatatgatttattataaatatatatgtgtaaaaatgtctaatgatccctttaaaattaagaaaaaatatatatttaaatattaattttatagtagtgacttttttttggtacttttaggttgggattttttatttttagcaattagagaaattataattcaattctttctctgtactgaaaataggattaaaacatttagttgttcgtgtgtttccttatgcacgtatgcaatttattatatttaattttttttagtatcataaattatttaaaatttattaggttggtatcaactcttgataccaactgttaccattagatcaacaatggtaactcgaactggcggaatttgattgagcttaagggttttctttctcccgaaaaacgatagattaacatgtggtgcataagtataatgtatatcgtcatataaaaagaaattgggttattatttctttagataccaaaaatatagatgttcctactaataaagataaaatgtaatatgtatatatatagttcaatgtatatgtattagtataatctttattgatgagaaaaatttgggtctctatgctctaatcctactccatatctaataatggatttatacacattttaggaaggtgtagccatagaaatagcagaagctgtagttggagccttgaatggtgaactatctgcaactgctgtcaatgcaccaatggtccctcctgaggtaataatatcatgatttagtcacttggaataagtatattttcataattttacttaaagcaaagtgttttgttttgttttgttttgtcttttatgttatgtgcttttaggttctatccgagttggctccatatgtaacattagctgagaagcttgggaaattagctatgcaacttgtggctggaggaagtggaatcaaatcggtaagagttatttacaaaacagctcgagacccagatgacttcgacacaagacttcttcgagccatgatcatcaagggcatcatcgagcctatatcggcctctattgttaatttagtgaacgcagatttcacagccaaacaaaaaggactaagaataagcgaagagcgagtcagggttgatacatccccagagttcccagttgactcaatcgagattcgaatctcgggtgtggagtctaggtttgctagctcggttgtggaaaatggagaggtaaagattgaagggaaagtgaaatacggtgtgcctcatttgaggtgtgttgggaatttcgatgtggatgttagcctcgaaggtaacctaattttgtgtagacaagttgaccaaccgggcatgattggtcaagttgggaacattttggcttcgcaaaatgttaatgtgagttttatgagtgtgggaagaattgcccttaagagaaaggctattatggcaattggtgttgatgaagagcctaataaggatacccttttgaaaattggacaagtaccttctattgaagagtttgtgttccttaatctataaaaagaaagaacaaaaattaggtatgaatattggtctaaatggatggttggaaattcctaattaaataaaaaggttattatatagaactttgtgtgtcatatgttatgtaatatgttgttttgtaatctatttttgggtgttgtctattagtgatgttgttgtagtatttccccaatagatatgggaggcttttgtggctttttatggctcttttagttttatccaagttgagtcaatgtaacatgtaaacttttgttgatttttgtcaaggttttgttgatttatgtaatttatgttatgcctactttatatagaattttaataaattgaataacaaatttaagagtgtttttattgagaaaacatttttttgctattgtaagaacaacaaatttacatatttatttttaaaaaggaaacattggtaaataaatttaacggaaaattcataagtagataagcattatacaagacgttctacttattatttattttttttgaaaaaaa

SEQ ID NO: 379573 - DNA, 5421 bp, Cannabis indica
aaaacacaaccataccttttttatagagagaggctgcttaaaccctctttcctcctcttatttttcacaactttaaaactaaaaaaaaaattaaagaaaaaaagaaaaagattaaatcatattgcagagttacaattcaagtcttggaatagatgctcagagcaaatgtttattgcacactgatttctagtccaagacaattgaaggcattcaataactatggctcttgggtgatccaataccgtactataactcgcaggccttatcagggtgcctcagtcaaggccctgaaagatgaaaccggtggcggtggaggaagaagcggttcccctggccagagttgggagcctggcttggaaattgaggtcccttttgagcaaagaccggtatgtacagtatctacacatatatgtttacatgataatgtttatcaggccataaatcatctttaaagattctcacctatcaataccttaaaaactagtatgctagacttttaacccaaagtctaatgttggagggttagaaaaaaatgagtgaattgaaatgccatctgggctaagcatagcatagcataatttaagttgaagcaagtaagtgttcttgtttttgttattttacgagtagtatgtttgagtaataggtgaatgagtattcatctctgaaagatggagccttgtattcgtggggcgaactgggacctggagagtttttgcttcgccttggaggactgtggctggtgacttttactgttcttggtgttccaattgcagctgcaagctttaatccttctcgagtaagttcaaacgccattcttgtaaataagcatacagcacttgttggattagaacagtttacagaaagttgaaaaagactcacaccaactgctactctgctagaaaaacaatacacaattcagtttcgtttcttttttctcttactattattattatcatttgagaatcttatatgcgtgagacttatttcatttgctaaagatatcttatgtttatgcttttttttttttgtttcaacttgcaggaacctctaagatttgtgcttgctgctgggacaggaacccttttccttgtttcactgattattttgcgaatctatctggtatggttgtcttatttaattatttatttattttgaaaaaaagtgaatagagaaagtatgttgactagttatattaacaaaacacatcccattcagggggaagaacatgaaagacttgcactactagtcaatgcattatatgttgacatgcacacagtcctaaaggctgctagttcactctagtaattattaatccaaggaaacaactcatgacatgattcctctaagttggggtttcataattattctagatacgttgtgtttcaattttaacttaataaagatctgcccttcagtttttcatccataatatgtagtttaagaaacagtcttcaaacaaagtgactaaatcaaatcatgaatatgaatattgcagggatggagttatgtaggtgatagactcttatcagcagtgataccttacgaggagagtggatggtatgatggacaaatgtgggtgaagccacctgaggttagcacccttttctagcttcctccttcccttttctcttgctagagtaatcacagatcatgataaacaagtttcggtttctttgattcttgtttctatggattatttgtagctaagaagaaattctaatagtgttggaggaaagatgagaatttaaatagaatgtagttctgaatacaatcaagcttaagaatatatggccaattgaataattttagagtaatgttttgttttctacttttctcgtaggttctggctcgtgacagattgttgggttcttacaaggtactaaaaatgagccagtattactgacatcttaagcaattgaaaaaacatggtaaatttgtattggcttagtttgtgtagaatatgaaattcattgtaaaattgtacctgtatggttataggtaaaaccagttgtgaagctactgaaacagatactagtgggaacaggggccttacttgtaagttcagttttactcttcgtcttcgcaactccagtggaggatttttttcggacgactttcatcacaaaagaaaactcctcaagtgttcaagcttcaaagctcaacacaaagttcaatttaaggtaatatagtaataagcaaacagaattaacaaacctgagtctagtatctactagcatatttcaatcttggactcttgttgtgtatttcagttatgtacataaagataaactcactcattcaaacttgtttgatttcgtttttcttgtaaatgtaggaaagaagacttgcttaaattgccagtggatgtattgtccgatgatgatctcgcagcagccgctgctgagactgctgacggaagaccggtttactgcagagataggttttatcgtgcattagccggtggacaatattgcaaatgggaagatctagttaagtaaagtggttacaaaggaggcataaatcatataaataaatatagctaaatttaatagatgccttctgtttgtatcaaatagaacatgtcattatgaatcattgcattattttttaaggaactacatatattctattggaatcacaagcatcaatccaaaaaaatatgaacaaaaagttacagtttagaccatatgaatggctaagttgaggagccaacaatacttgatttacagttgcctctacatatttttacttgtaaatatgaacatagtttattcaaagtggggccttttgtgagatgcgaacatcagaaacatgccaaaatttgagtttcaccagtcagtttgcaattcccgaagagcgttgccagaaaacatatttaggagtaacaacacaaaagcagcatgaggatcatgttcgcaagatattccacaaatgatcatgaatcctggtagcatggcaagtcatctttgtgacaagtttaccacactatggacatgtattccagtgaatcatacataacaaggaactcgtgaagcttttagcaacatttaggaagattggcttttgcataactgctggacctcttgattagcttgaagaataaaaacagagcaaatcttttgagacgaggcacttcatcaggtcaatgctgacttcgctaaacaaatttcttgcaccaactaagcattttatacaaatttcgtgaaacaacatctctgacagtatgtttccttatttttgcatcttcaagatctaaagttctatatgcaagagcaaggatatacatggcgggatgtagtctcctgtaaataacatcaatgatatggtaagtttgtgccaaagacaactatccataatacaaatactaataattaaattacacctaattcattagtaaccatctaagcattaaattcagacatggaaagaaatgttccccttaattcagagatggaaagaaaagttcccctgaattcaaaacatgcaaaagccagtacttttacaagattatggaatattatatgaaccataaaatatatgatattatatacaagacatgctttatgaaatgacaataattcaatgatgaaatgcaagggtaccaccgtgtccaacaaagcttatattattgataaagagaaaccttcaaacatagcccaactttttagagatgcctaatgtctacttacttttcaaatggttcgtttgagctgaaaccatcccaatacctttgtgaaggtatcgttcgccctttcttgtctttaccaaatgtttcaatataccaaccacctatgtcgtgcataccacaccgaggctcaaatagccaaaatctgtatacgtaagcaaattaaaaacatcactacatctaaaggattaggaagagttagcttcaggacttctatacattaggttgaactgcaccaattacaacaccttcacaaataattaattaaaactccatggcttacttgctcgacggtaacctggccctactgcatctacactcgcaaacagaaacttcattttccattccataccagtgcatgtgcttcacctgaacacatatgaggtaggatatatgtcaacaaggataaaagctagaaaagtgtaggaatcaaaggaggcaaattttactaaccagcattgttctatgtttcataatcacatgggttttagtaccaatgctattgtagacaaagcaggacccttcttctgggctagttcctaatccagttatggttcccagaggaattctagatccaacagcctcccctggaatgaattctttgccaatcttttcggggcattcatatgagttgagaaatacatgtatacaatcttgattttcttcattctgtatgccattgcaatagcctttaggagggacccttgttgcaagagcaaccacttttccatacacatgcatttccaaatcagcatatgcatgcaatttacgatcttccagagtcaatgttcgcaactgagggttatcaaagtcactcgtgccatcaaagttagcggaaatgttgacattctcctcagactgacaaatccccatatcccgagatgttgaagaattcagctttcggtactgctaaatgatagttctggtatatttatttatcagacagaccatcccaaaaagatccacgccctgaaaccaaatgaagcacgctggagtatcaaacactgatctttctcagcttcaagcagtctggaagaaaatccatcgattcattttcggggccaaagtaagctgcatgtatggctgaataaaaatctgcttcaagcacatcaaagtatccagtcccaacaaccactttcttctctagacaaaatatcttttattgcagatctgtaccaccttaaccattccactacttccatctccttataacttgaaatattggattcattcgcataaaaccttacacctttttcagattgtttgaccacaagcttcctctgtgagataagatacatatcataatgggctcgcttttcagaatccgaaagaatctgcaatccattattgatcatgctgtgaggtcagaacacctgtgtatcacagcatttatcaaagacgaacatcacgattacccaactataaaattcacatacgaaccatgatatcagcatatatataaaatccccaggaaataaatcatgcagagaagtgaatgcaagcccatggccaattgagtaccaaaaactaaactagaaacaaagctgataacttcataaaagattggaaaatggacaattcagacttatattgattgctaatttacagtaaaattcattctatcccaattaatagcaaaaaaaaatcaaaatatcctactcatatgtaaacgatgaagagattaatcatatgaatagaaacccaataaaactctttgaacattaatcaaaaccttt

SEQ ID NO: 379574 - DNA, 1069 bp, Cannabis indica
gatcacactttcaacaagtgtgagaaattcctcaagcattgtgatgatcttgcttatcctccatctttgagttacaaagatactcttcgtgcccctaccaagtccatctataaaaagagtatttttgaactttctaactctgtccctattgaggaatctcataatcatattttttcctcaagccaaagccttcaagacgttgtaaatcaattccttgtcccaaatattgctaacacctcacttttcactacttctacccttagcgttgttaatatggtgtcaagttcccttcctcaaactttggtggttaactcccaccctttgtccttaagtcccatgactcactctgtttcatgtcctattagctctgctcctattattgtttctactgttatctcctcaacctccaaaggcaaaggtatcatgcatgctgaccaacagacccctccctctatccctatttcgattggtagtacaaaaaatatttcctgtactaagagaactttctcaaggtagaacctacaagtgggatcctctgtggttccccctatgtctgattcagatggccaagcgggtgttgctttgcaaccctgcccagaaaaataagtctgatcagttggaatgcccatgggttagggattccccgtgcatttcgtaacctctcccgtttggttactcaacatcgacctcaacttctttttgtgatggagaccaagatggctgcaaactctagttctaagtttaaggtttccttgccttttgataatgtatttgaggttcccaggaatggtttgggaggtggtttactactcttttggaacaatgtaattaatataactattttatcttactctttgtctcatattgactgttttatttctactgctgataatgtgaagtttcatttatcttgcttttatgcttcccttatgttagctctaaaaatgattcttggacgctattacatcgtttatatgattctactcctaatgctccttggcttattattggcaattttaatgattttcttagtctcaatgatcgtaatagtgttcggttttgtgcccta

SEQ ID NO: 379575 - DNA, 3048 bp, Cannabis indica
tatctctgtttttcctttgttgtcttttatttttattttgatttggtatcaaagccgatggcttctccggtgtcccaaggaaattcctcagtcaaaaattcgaggaaccaagccgtagatgctcctccttctccagctccagcagccccaattccagtcttcgcaccagctctaccagcaccgctgcaccagcctcctgctcctatcattattcgcctagatcaggacaactacctatattggtgatcccaggttgtaccagctatttgtgctcacaacctcgacgaattcttgtttggcaccagagcatgccttccccagtttctcgatgcacaagacgaaccaaaccccaacataccaagacaggtaaaccctcactacaccatttggattcgtactgaccaagccattttaagctggctgcttaactccatctctgaagctatgctaggccatgtcctccattgtcgattatctcatgaactatggtccctccttgaaaccctctttgccactcaatctagagcccacatacttcagctaagatttcaactccaatctctactaaaaaaaggatccctgtcaatccacgactacatcactcaaagaaactaaacaacctcttgagttaatacactcggacatctaggaagcatcacccacaatttctagacacggctaccgttattacattcatttcatcgacgattacagccgctacacatgggttttcccactcaaaaccaaagatgaagccttatccacattaaagacctcccaaactcaaataaaaaacaaacttaacaccaccataaaaactgttcaaacggattggggaggagaatatcgcacctttgaactgtatcttcaaatcattggggtcaagtttcgacaccccgtgcccccatactcaccaacaaaatggcaaggccaaaaggaaacatcaacatattatcaaaacaggcttgaccctcctagcccattctagcatgccacaacgtttctggtgggaagcatttcaaacagccactttcctaattaaccatcttgtcacacctgtcttacactacaaatgtcccatacaaaaactcttcggtctcacacctaactataggttccttaaagcatttggatgtgcctactacccataccttcgaccatacaacaccaacaaactccaattttgttatgctaagtgggtattcatcagttacagtccgagtcacaaacgttacatgtgcctacacctctctggctgtgtttacatcgccaacaatgtctcttttgatgagactgaatacccttttgccaaaggcttcccttacccctctgcacacacagacacttcactccgcccaagtcaatatccccaatggctctcatacctctccactgtgacttcagaacatgcaaatggccagatgtttgatgatatagtccctatctcaccatcccagcaagaatcacaaccttcaactcccattgcctccccactacatgagacaccagtagccacctcttcctcaaaatcaccatcagtatcatcttactcaaccatcccaattcacatcaacctgcccttatcccccatatcgtttccatcagcctcatcacagcagacctctcctttcaccaaatcacccacaccacctccccaaccgtcacaccccatgatcaccagagccaaggctgggatacgcaagcgtcgtgtgtttcatgccttctcctcatcacccttggccttactcgctgaccctgcactagtcagcgctgaacaagccctttccctaccgaaatggaaggcagccatggataaagaattctacgccttgtgaaaaaataagacctagatccttgtcccacaactacctggtatgagggttgttgaaaacaaatggcttttttgtaaaaaaattaaccaaaatggcactgtccagcgtctcaaagcacaacttgtcgcgaaaggattccaacaaaaacccagagttgatttctttaagacattcagccccattgtcaaaagctccaccatctgtgtcattcttgccttggctacctccaaccattgggacatccaacaggttgacatcaacaaatgcttatcatatttaaaattattaatatgataaatggaataatattaatatcaaaaaagctgctaaaaaatggaatctatacgtagatccttcctataaatagaaaatacaattagctcaggtctaggacaagtagcttggaagggtgtatgttctcttaagaaagaggaaaacagagtgaggaaaatctttttaactttaaagaaactgatgcaaatgtttatataaatggagaatacacccggagagaattgctaatgaaaaacagttagttgctacatcagtactaacagacaaaacaaacttatcaacctaaactaattctaaccaatatcataagctgtattggacaactcagtaagcttaacatgactagtttccttaacaggcaccctcaaatttagtgtggtagaacataccacactaagtttgtctcttaagaaaggaaacttagagttgaaaatttgtttgataagagagtttgctaattgatgttctataggtacatgatgaagcaaaatctctttttgaatcactttgttcgtaaaaaagtagagattaattttaatatgtttggttctagcatgtagagcaagatttgcagcaagaaggatggtgctgagattgtcacacgagatgagaggaggagtacgtaggcaaagtcacttgaagttcagatagaagagatttgatccagttgattttagacactacagaggttagggggttgcttgacttcataattttaaaaaaatgttttcagtttttaaatacagaaaattagcttttaaaaaaattataggggtcaattttaccaaatttaaaaaaaacttttaaaaactgagttaaaaaactatcaaatagaaaacatcaaaatataagtttttaattttcaaaaataattttttagtctaacaatattatattttacatttttgctcacatacccgga

SEQ ID NO: 379576 - DNA, 871 bp, Cannabis indica
tttttttttttttgactttagaggttagaattacatttccaggtgggtcccacgctttatttgggattatattaaacaattcaaacaccttctctttaactgtactccccatatgtgtttcacctttgaggagattttatctagagtagaagcaaagtatatggtgatacacaagctttcaaagaattaagttgtttctattcaaaagttattgaaggagcacaagcataaacaacatatcatagcatgtgacaagtgacaagtttgtagtagatatgtgaagttgtatggaattggaaatgagttactaataattgtgtaaagatacataacataatgtttttatacataatgtagaaaaaaaaattatttattctattgctatggaatatcaatttttctatttaattttaatttgaaaaataatatgtcagatccattacataagtatatcaatgagatagtgttggatactatagcttataatagcaacaacactcatctcctatccacatatacattccgacgtgtgaggtcctactcaatttggcatcctcatacaaacttccaaaactgctttcaatttttctaaatcaatattacttcttttgtttcttaatcgataatgatatatatacatttagcaaacaacaaaacataatgatttatatacttgtttacatgacattcatcttccttgcaagtcttgtattctttgatctgtttatcgaaacgtggcacaatcaacttctgacagctaccctattttaattgaactctctttaaatttctaagaataattacataaaacacaatttttataaaaaaaaaattatttttacgattttttataaaaataacacaaaaataa

SEQ ID NO: 379577 - DNA, 1831 bp, Cannabis indica
ttttttttgggtaatatagatttagtctttcactaatcaggtagattatctgtgttttaatgtgtgcatccgcatcccttgatttaagttatgcagacttatttccataaattgctatgtactgtgtacatatgtagatcactatttcctaattatctttttgctatgaagtaagaaatttgatcctacctctctacattggtgagttaaaatgtggttttaccatcaatgtaggtaatcttgaatctccatcttccgagtttggtagtgtctttttcatctctcctataacgacaagctggatgggaaaaattaactataatgggcacaatctttcaagattgttatacgtggttgagataaacttggccacatcacaagtagagatgtaaacaggcgggtggggattggagatggctctccccgccttgtgacacggtctggcccattacgggtaaccgtttaataaaaatgttgattttgtttttccttaaattataaaataaattaaaagtcaatactttttttaatacaaattaataataataaatgaagttatgccatgaaaagtattatttttgtatattattcattatattatttattttaaataatatctttatgaaaaattaattacaaatggaaacatggttgattcgggatggggatcatgtcccacgtccccgcccctttaggagtgggttctcaggcccctaccccacatgttaaattgccatccctaattagaagtaagctcgctgctcattcaccaactagtcccacctacctacaacactttttttttgataacgagaaatcccgtctcaccctacaatatttgggacctacaaactatggcaatttataagtaggtatcttttttattttttatatttttttccgagaaaaagaattatgttcatatgaattgatatgtagtatcagatggactcaaaccttagagcttgtgagagcgaactacatgccaaattatttgagctacctttctcgggtggtgtcccacctacaacacagatggttaataactttattgtacttctgggtacctacatagtatttgctatagttttatggtccccaaatattgtaaggtaaggtgggggatcctagttttttttaaaaaaacaactttattgtacttcttacttgtcttattagctccatgaagtcaaagattagtcgccatgcctagcaaacttgatcctaactccatagagtgtttgtttctaggatattacgcctcacaagaagggtgtatatgctattctgtttactatggatgtaattttctttgagaaccaaccttattatcaaataatccacatttaggggagaactcaaacacatataatttttggccaaccaatgtcacaacagaacctaccttcactcctgcatccaatgttccaactaagattttaatctactggcacgtttactaaactattattggaatcagaatataatcaatggaaaaaaataatcgggttaaaatataaaataaccagaaataatattttattttgttgtttactaaactgactggaaaggaaatcagaatcattttattttgtttacataatcaggatagataatcgaaatgacttaatttgattaaattgtgattgttagaacatgtaattattttttatttatatatttttgaagggcatatctgtcttttttattttaattaataaaaatataattaatataaagtaagttaaggaaagggaaaggtaaggaaagggaaaggtattccttatgaaaatagggggagaacctttccctttgttttctccttaatttg

SEQ ID NO: 379578 - DNA, 2799 bp, Cannabis indica
gtgaggagagagtttcttttgtggaaacctacaatgttcagttaggttttagtctttatattattgttcttatattgttcttagaataggttgaagaacttcattgaacaagagaagggtcttcgggagaagacgtgccctagctttactttgggaggaaataagcacttacacatcaaaagacaaaaggatttcgttgtctagtgttgttcataaattagatggcaaagtaaattacaaatgattacgacaaaactttagagagtctaaattgtttaagtcaattgtatttgtaattgtttgagactttattaattgatttcattctttgggcatgggcccgtggactaggagtattttaaaaaacactgataccacgtatgattctcttgtgtcaagttttaatattctgcactattatttctattctgttatttcaaatctgtgttctgtagtaataagtttccaatttgtcactgcggatatttaccgtcacatttttcaacattaaaataatttattgaaatatgcaaaaatacgagtttttaacattaatgagtgacaattaagtaaataaaaattgtaatatttattgtggtgtaaatttagctcatattatattttgtattaaagttagcataatttttaatatgctttaaatttgaccaacattatacactactattagagttcaatattaaaaagagtattgttattagtggtacggcaaacacctgctataaattttgccctacgattggttagtgattttctctaaaatttatttttttaaagttatatgagactcgatatttaattacaccaataacaatatgataccgaagaatgtactaagcaccaatagtactgtcttttagcatttccctattaaaaaatacatatactatatgtttttacgcttttggaagaggcttgttaattagtttatattatattatatttattttatttgattaagataataaattgtaataattaataaattagaatgagtgtaaagaaaataagaaggtttaatctaccataaaatctttcttatcaatttatatatttataacttgtaatattctacaagtaatgatatgatatattttttttgaaagcaacaagtaatgatattcatacgcataaattaaattacacaaacttaacacacacatatgtgatggacactttaacaagtgaaacctaccttaaattaataaaaattattaattgaatttatttatcacataagtgtgcgtcaaattcatataatttatgtgttcccatatcatctcatattctatttaatgaataacgatgacttttgttaacaacaatttttatttattggaatgacatcaagtttatgtttacggttttaaaaatatggagaacaaaatatttgtttataattcgatccaagagaattattggaacaatttattttaagaaactataaattttgggttttttattgtaaaaatatgtttttttcttcacaaaagttattttgtggaaataatttaagaaaaatttaaaacaaattagggaagccaagtaaaagtaaccataacaagagtggtaaccagttaccttatactttttttttcctttcatatttttttaacttttttataaaattttccaaaaattaacttttaaaaatcataattttacaaacttataatttaaaattatgaaaattcccctattctgatttcaataatatgatattttataattacattattcaaacgcaataatcttaagatgcgtcgcaggagctaaattgcgctagagcttgcgacgcagctgtatcgcaccttacaattgtgaaatctgtgtcatttttaatttttattttttttgccatggtttcttcttcttcgtctttaacgagtgccttttttttgtttgtttgtttttgtctacctaaacattttgatattgattacaaattaaaaaaggattttgggaaataagtaaaaaattgtactactaaaatgaaaaatgtgtttgttattaaaaaatgtttaaaagaatgcaaataagttttcgttttgtatgcgaaacaaagtttaattttctatttgtaaaaaaaaaaaagagtttaattttatatatatttatatacgtagaagttggtttaattttgtactaagaagtgtaattatattgtatatatttaaaaagagttgaagaaataacattagtaactagtaaataatatgaattataattttgaggttgatgtacaattttctaagaatatttgcaagttataaattttcaaagaagaattgtgcttttttttttttcttttttttgaataattagtaattttgcctcttaaatttttgataaaactgatttcacattttaaaatataccacttattaagaattttctctgaacttttacattaacataaatatagtcttctattaggttccgtctcattactccatttaaatgttgacgtacttttgttaattattaattttgtcccctaaattttgacaactatcaaagcgtacccctcaaaaataatgagaaagatttaacattttttttagtaaatcttaaaaaattaatttacatcttaaaaaaaattattctactgattaagaaaaataaaaaaaaaaagaaattaaaattttaaaactaattaaataatttaaaaaattatttatttattatgaaaaaatttatttagatgtaaaaaaaatattaaaattttaatttttgtaaaaactaaattttatgggaataagcttcaaactttttttttct

SEQ ID NO: 379579 - DNA, 3318 bp, Cannabis indica
ttttttaataataaaagagaaaattttgtattaataaaagttcacgaataaaaatgataaattttaacagtaaagataacagaaattaacataacatgaaggaataattatgtaacagttatattttagtaaaattttttaacaagtaatggcaaaattagatagtgtttaaaattcatgaggtaaaatgataattattgaaaagataatcaggcatttctgaggatggcgtagaagagagatgtaccaatggggagatgatgagggcagaagaacgacgacgtcgacgagaacgatgatggtgatgatggggcgttctgctcagggacaggggcagtggggtcaggaggagaccaaggaattcatcaaaatccgtaccgaactggagagggactctgctctaacgaagcgcagcaaggtcctatgggacgctgtcagctccaagatgttagaaagaggtttcattcgaacatctgatcagtgtaagtgcaagtggaagaaccttctcaatcgctataaggtattgattttttctactttccaatattcccttttttttcattcttttacgtttacctttcttatcatttgggattggcagcgaaaatatcactttcagcataacttgtaagccttgaccattggctctctcatcgaatattccaaatttccctttaaattaattttgtttgaagcttaaacctatagtttttgactttctgttattattaacagaaaatattatcatactagtaatttctgtctgtgttaattctctgatgactgaaaaatctcactaaatgacaattacagcaatcgatcataaggattgtttcatggttctcaatgtaaatatggtcgttcgagtcactatgaaactttgtttgttctattttcttcttagaagtacttaaattaaattggaagatgaactcagggacaggaaacatctgacccagaaaatggtcggcaatgtccattctttgaggaattacatgcactcttttctgaaagggagaagaacatgcagcgcttgcttctggaaactgaaatgggttctcccaggtctaggaaaaagatgaagggaccatcaaatgctggccaatcctctgatgaattttcagaaaatgaggagaatgacaaagagggtattgatgaagagacccctactactactacaagcactcgtcgtaaaagaaagggtgaaaaaattgctttggacaagtctttaaaggctaccaatgctgctgctgcagcgtctatgagcggtgagactgatatcagggaaatgcttaagcaattttttgagcaacaacagatgatagagaaacagtggatggacatgatggataggcgcgcatatgagcagcagttgtttgaacaggaatggcgacagtcaatggagaagcttgagagagaaagattaatggttgagcagtcttggagggaaagggaagaacagagaagaataagagaagagagccgagctgagaggagggatgcccttctaacatctctcttaaacaatctcctccatgaaaattgaaaacaatctctgaaggtggaggatggtttggagggtgtcatcacccgttcatctcttttcatatgtgtgttttctctatacaatatacagatgtaatgtaacatgacaaactgacaatggatttagttcatacaacttgttctatgatattctgtacactagtaattgtattgtgacaaagaactatatgcccgtttattgttttattcgaactataaatgtcaacaaattactcgacgattcttattgttttgggaaattcgagcttctatgctttctaatgtacctgtaataattatctgaaaaatatagcttgtatttggattaaaatgcttcttccaattttcagactttgaaatatgatccttgtgacttaaattattaggaaggttgagggcaaacaacacttctaaaaattagatacgatgacacgactcgaaacttgtatgaaagttagcgagtttggttttatcttaaatgagttcgggttaactcatctaacctatttaataagcgagtcgtgtttgaaattgtctctttaattgcttatttaaagttattttaatagtttaacatcataaaagtgtttaatatgtcataaatgtatcaaatgtcattaatatattaatgtgttgatatgtttaaacaaaatttatttataaacaggttgcacgggttgtgtcgtgtcaattcgtttataaacgggtcgtgtttgggtttcagtttgtcgtatttgggttgacatgatcttgtattaatatgagagaattaagatcacatgaataaaataatcaacaaataattaaaagttttgaaattctttaattggggttgtattataagtgtagtttactaagtatcatgttagtacaaataatctagattcaaattattgatgtagttagacatctcagtagtaaaggcattttatataatataattatatatgacatgtgtagatataaatcaaaatctttatacaaaaaccatttaataataaagattaataatcatatcataatagataattatttatagatcaatttaaatcttgagtgtttatgaattcatgttcatgttaattgaattttttgtaattcatttgttaaagtcttttcatagaatgaggctaatgacttttgttttagagatttaattatatggatggttaggaacataaattaacaaaaaggaatctaatccttcttaatagattttatattggttcctgttatacctatatttcaagcagtaatatgatgctaacacatgtaatacaactggaatacgaaccatctcaaattatgcatcaataaatgcattcagacgacttgccttgagaaatataattgataaaaatacttgaactcaccatagataatgacgagatacaagtaataactactaattgatgagactagcgagacggataaagaaagtccatctcgggataaacagaatacattacaaaattgtttggaaagggtagataatgagtttggaactcattgacccacatacacgtgagtataacttcagcatgattcatctcgcttccgtcacgttgtaataagtgtcttgcatatacctcactcaacattaataaaagaaagcaaggaatactacaacctacacttagacgttggcttgcgataaagtctctagaaaagtattgataaactgcgagaagtatgaagtgtagtcagcataattgtctatagataaaggcaaagagtggatatagcggttatttataattatctcaggtgcat

SEQ ID NO: 379580 - DNA, 1414 bp, Cannabis indica
tccttttaagtaagtctatcaatagagatgtagcaagctatgtggagtcgggtaatagtacaattctaatgcattggattctcgaggctaatgatcttaattatatacaaaactataattaaattaaacctactttattttcggatacccttgttattaaaatccactagcaaccctgccaattcattggctagtcctcataatgctaggacactaatcggattccacgtgtcattccacgtatgtcttattgcacaaaatccttatagcaagtggacaagtatctatttttcttctatcccataggaatgaaagttttgggaatctggggctgcattaggacaaaactttagtccgaaatgatttattaaaccttcataacccaaacaaataatgaattgataaaataatgagggtaatttttgtgagaaaatgaaagcaaagagtagttttgttagaaaaaaatacaaccagcggaaacgacacgttacggagctatggagcccactatataaaaattccaaatggtaaattcaacgtcactaaccattaaactaaacatttcccgccggattttaaaattctcatccaacgtctcaaatccgttaatcatttacatgctgacaaatttggaccgccttattgtttgtcctcttctccatgcacatttctgttaggtgatcaagccctttctttctatggctcaggctcagcttaattttcttttaggaagagctccaatcttcaaggaagctgctaagtttcaagctccacgttggcgtagtaagtaaatcatttagtgccaaaaaagattaaaccaacctaactaaatctactaaaataagctatatagtatatggagcttttagcattcaaatatacataagagcgatttgtactttttttactaatcaataattaagacggagcttttaatgtgtcttatgtatataaataatattattatatgcaaagctgagttcaagttgatcatgattcatgaggcaggcaacttgaaagtacatatatcacaatacgtacaaagtattgaaaatttaaaaagaaaagtgttaatatataagaaaacaacaaacaataataatatagagatggatcgatgggtatataccgatgctactcatcacttcttggaaagcaacctctttccttacatataaagtatacatataccaccaaaacaacagcttattacgtcatttaataatgtctatatatatatatgatcagtaatactatacatctaaaaccaaataaaaataaataaaacctaattgcacattataatagtaatggctggaagtgaagcaaccaaaactagtactagtgctacaactaccactgccaccacaaatttggctcaacctcgccgaccagccgtccggagattcgtcgg

SEQ ID NO: 379581 - DNA, 4031 bp, Cannabis indica
ctttttgaaagttgtttttctagcaacaataacactaattttagcaagtttattactgtcattttcattttgaatcattgctcactcattttcatgttattttcttttactttaagttgtacttagtttgttttacaacatatttttgtttgcgatccctttggacacgatcttacttaccattttattacttgtttgactgtgtacacttgcgtacataattttcacaataagtttttggcgccgttgccggggagcttgaagccatcgacagaagatgaagggagcttgaagccagagaacacgagagaaggagtgagatgttgatatatttgtcatcatgtgtcgtcatgtgtgcgaggtgaggttgagatgctgggttgttgggtttgagagggtttgacggctggagagataagatattagggtttgacatgatggagttatagatatatatattcaattgtttgtaagtaatttattgtcgattttcaacttatgcaaattttgcatcagtgcacaattgacgtaaaatttgaccctatatttgagtatttttcttaaaaaattcatctttagcgatagcttttgttttagtgtctaagtagcaaccgacacaaattagttattattggcgtcgatcaacgagtttgacctgatgcatttgccgacacgaaaacccctttatgtagtagtgtattaatagaagagtgtgagtaaattgctaaatcgattatgggactataaaaattgataaaagatagtgaaaaaataaataaataattaaaaagaatcataaaatcatgaaataaacgttataaaatcttgtaaaaaaatttataaaatggaatagtagaaaaattactctcttccataggacttatatgtcatttattaaggtgtccactatggtaaaattttaaaggaacttgccacatgaattatctatttttttaaccgttaacatgaataataaagaaattatgaatgagtatatgtgatctcataaattacagaattttaaaatgttgtaatactttataaaatttgagttattataaacaattattttaatgaactaattttgattcttattcttattattaattattaaaaaaattaattacctacaatggtaccttgttttattttctaaaaaataaaataatgattatttctttatatactttatctatggatagtaattttaaaaaatcactattgaattttttttcataaataaatatatatttatataatttagtcctcgctttttgttgacatgatttttgtgcgcttaacatagctagtttattacttatataaataaggtgttccacaattaaaactttaaataaacccctataacatacggtataggatcgggtttgcgaatatatgaaacttgaactcacgccattatataatgtgtcatatacttcaaccactaacctatgaacattgagttatttacaatacatttaattttacttaaataaaaacctaataaagtattttattttatattttcggtcataaaaaaatatgggtcctacacacaggcctagcccacctatatctaaaggtggctctaattcagtatcgttttaatgaacataaattagtgatcatattttcttttctgaagtttttatgggcacctaacgtgccccataagcttcatcatcattaatcatcgtcaccactttactctacatcattatgatcatatcattaatccttttattctccttctcttttcgtacgaaaagaaccactactgctaccatgattcattattcccaaatttaatcttttttcttaactttgagagcttagacttgttgcgtttggagctgatcttttaatttaaatgagaagcgtatttcatagtatagaacgagatttaaggtgagaattcaaccctttgctttataatgattatagcaagtagaccttgagtttttgaaattctataataggtagactatattatatttaggtaagtacctctgtagtattattcatgacttatatgggtgattaggaattttgttgttttagagttagattgaattatagcttgtttaaaggtttaaattaactaagtagattaaggaaaatttaaatttcaaattacatacctattaatgttttaggaaaaaacacttatagttttctcgataatgtgacctaggggtattaggcgccgaattatattccactcaggtcggctagcacactcacttagatatacatgtacgaaaagtatatatgtaccacatagcatgttatgatatgattattattgttattactcgattatgatcgaggtaaagggacgatgattacggttaatcgaattaaagccataacgtcaattgaaaccgttgttaggtttcttacttgtcgattatcttattagacaataacagagatatatgaatgtcaggttaaaatatcggtgttgccttactatgcagtgagatatattaaactaggttagggcgtcgatattgccttattaggaaatgagatttatggatgttagtttagggcatcagagttgtcctattagggaacaacaaaattgtttactttatgaagtaaaagttatggcttgttgtattatacaagtactttagtattactgtttaattaggttattattattatttagatctctgatagttatattttattgtttacttttcctactgagtctttatgactcacatgtgctttatggtgcaggtaatgacaaagggaaactgggtcagccatgaggggactgtcttcttcgaccaatgtacaaattgacttatccgacttgtatagtcgagttgtgaggagttattttgggttgtacctgatgtttattcttacttacttttgtatttagccctttttgtaaaacttttgtaacagcgaatctctaaaatatgttttttgtgacgctatcatcttcattgctataacttaatattagtgaaatttttattattatcacaaatcttattaaatggttaatctattatttcgaaactacgtttcaaaagaatacatgtggcatccctagggttacggcgttataacttgttattagagaagccatggttttgaagatcttgaagattggtaggatatgtacatttgctagtgaagacaagtcgactcgtcatatagtaagtgtgatgtatttacttattatttgattatttatcaatttattataaagcatcgtttaaaagtaatattgtaacaatcctgatgtgattatatgagtgagatatacttattagtattggtatctagttgagttctaaattattagaagttgtggattgcaggtgcattagatcatgcaaccaaggcgatcaggtcgattgaaccgcaagctagggctcgaggtaggtggtgaggaagggaatccttcactaccgcaaaactaggaacaagtgtttgccactgtgcaagatatgattaggcaacaaggggtgaaaatttgagacatgaaagagcaacatgcttgtcctgcaccaattctggcacttttgacaccttaggtagtttagaaaaatattggagaccatatggaatcgattaatgagagtttaggaaataaaacccgcctgtgtttgagggtggcccaaatccactgaaggcagagtatgattatgtctatccttgactttatgcaggttgaggattatgaccgagtttgatgtgttgtatacatattacaagatgaggttcagatatgttgggatactgtatatcaaggtcatgatctgaacaccatgatttaggatacattttggatgatattttatgagaagtattacaatgatccatccatgtcctcaaagcggaagagtttatacggttggtgttggaaattattttaccaggatctagatttgctaacaagtatgttggattaacaacctaatatgaattctaaaacaatgaaaataaacacatataaagctagaaaaccttacagtgggtgtagcggaataatatgactc

SEQ ID NO: 379582 - DNA, 1342 bp, Cannabis indica
gtaaaaactgttgtagtggcttaaaaggactcatgtcaaggtccattggtctacaagcccccacaagttctttgctaagcctataatattgcgtatctgatttattgtctgctatgaaagggactgtggaagcacttgataatgcaaattgcaaataattcaatacaggtgtcatcttatagagaaagaactaacattaagtggaacacagaaaaacaaatggctttatattttagcatctatagctataccagtacaatactcaaatactaaacaaagttagcataaactgcataaagggtcactcagttaagcatagaaaacgtacttagtggcagacctattgatgactgcttggacttgagacataattatcaagaggtgaaccccaatgtccaccactactctaacatggttctttagctgcttctcgcttcatcctcctcagcattgatcccaactgaccagtattccctaatggcatcatgcctggaaaacgtttttcacatggaaactaatatatagaaagaaaaagaaaaaatgcagaaagttcattcggcatccaattataagtatcagatactctcaagttgagctaaaagttaacagcagtttcagcttagctgaaagcaatttgctgcagcagtaaaagtttatatatagtgtgtcacaaccagttaggaagaactcgccccaaaagactaacatatgagaagagggtatccgagaagttataatccatcaacaaattcaataattacgcgatgatccaccagaaggtgctgactctatagccatttgttataactacttaaacagaacttacacccaaaagactagtctgtgagagcagggtacccgggtggttgtaaaccttacaacaaccaaacaattccgtacttggtcgatatggaaccctaacacaaggctcttcttcaactaaatagatggcacttatatgggctgtgcttaagggcattgtcccataacatacggtgctaagaggtaccatatttcctaggtgccaaggaatttcatgattgtttccctaaaggctaattaagatttttgttctctgaactgtgacacgtaccaaatcatgctccctgaacttttaaagtcgttgtaaataccccctgaactattgtgattgttggatttaaacacttttgtctaatttcattcaattttactatttcagtgattgtttatgtactaaaccatgctccctagactttgacatctaccaaatcatccccctcaaactttgacatgtactaaatcatgctccctgaactttcattcatattagactttttttactaaaattggaaaaaagtcc

SEQ ID NO: 379583 - DNA, 1005 bp, Cannabis indica
tggtaaaatatttctaacagtatgatatacatgcaagacaatatcctagcctccactctctattccatatgccacactctctctcttgcttctctctagaaatttcaccatgatgtttgagaaaatcgtccacactaacttacgtgattcaaatatctttgtggaagatcatgaagaataaagaagaagatagtgatctgaattccttgtagtacctagtttcaaaaaggacaaaaggttagagaattcaaagggtggagtcattaattaatttcactatgtgattgtaagtatttcttatgtaatctctattttacggtaaatcaattaaaagcatgattctaggttgttttacatattattatattataatttatgaaataaacatgaaaataaatcgatcttattgtatgtttgaggaaacaagcttacatgcaaccgtgaaacttcctatggccagtggtcacatacaataggaaggagtagaattgggcatgtcacttacaaaaaccaatggaaaatattttgtagaatttttaacctaaatatgcaagcattgatcaatgaaaggtctgtgctcgcataagtgatcaagttaagtgtctttgcaagcctaaagtcattaagcttggaccaaagtccaagatgatgtcaaagcaccattaaatggcataagataatgctatacacgaaaagtagctattctcatgtcactgttcacatatgacattgccatcctaagcttaggacttcattatacatgttcctcgaagacaaaagcttccaaaagcctttcaagcacaatcaactttgtgaatcaagagatattttgatttcatgctttatttttgttatccttattagctttgaagagcttaaattggtttttcattaattggaaaagtaatacaatgtgtttacaatggcaaaatgactgcttatatattgcaggggaaagtcggtggatataactaaccaaccaaatataactaacactaataaccg

SEQ ID NO: 379584 - DNA, 1556 bp, Cannabis indica
aattaatgtttctgttagttggtattagcgtaaactcattgttgggatatcagagaccattcatctccactctaaacttttacagttttatttttgagcaccttcttaaaaagtttcttactaatagaaatagtatttatctttatatactgattatgtttctcatttttaactaatgtagaactttgtatttatgaggtgaaatctttagcttctgataagtactaataagttgataaaatctagcattaaagctagaatttgtattccttagtgttttgtttgtaatggttctgtttgattaataattgcttgttttctataagaagttttactaactttgttattgtaatgcttgtttaatctattgttatgatttcaaaaaaaaaaaaaaaaactaaatagtagttatttattactttaaattaatcccagtgggttcttatgtcctttcttttttatggctaggatagagctcaccaagtaattaatttataattaaagtcatggtcaacttcattggcaataaattgttgcaggattccaaattggaatctttcactcaaaattgaactaataaattgggaaaccaaaggagataataagcattttatgtgttgctactttaaataatggacaattttctgttttgaaagatagagtatttattaatccattataatattggattattttataatgcatctcctagtagaagtttaatgacacatttttatttgatttggtatttggagagagtttttagtttcttttcatattcattaatattgtaattatttaagatattttgtaaaattttgataaattcagaaaaatttaacacctcaaaaataaggttcaaacagtatatttcatgtgatttttttattttatacgtgtgtgaaataaactgcttgaaccaaattttcagtgtcttaaatttttttgaatttctcaaaaaaattcaagatatcttaaataactataatataaacaactgtgaaaataaaatactaattgttttagatagtaaaacaaataaagaatgcattgataaactccttttaaggtgtgctagatatttcctataatattttgtcatttaaaaacaaatactatcttttttttttagaatatactatgttaacatgttcactaaaaaataaataaaataaactatcttgtgaaatgtacttacaatggatataattataaagtattgcatacatatttgctaatcacgttcaactattataaacttctttttttttttggatcagtttcccttgtaattaacaaatacaagaagaagaaaaattcaaaaaaagaaataaaaaatacaagaaaaatattttgctatttccttatcatttcctctggctttaagtcttaaagcaatatacttttcacctaaaatcataacacaattttgtttagatgttcaaatgtaatacccggtaaaaaatatacatatattttaaattttatttgttatacaatttgtgtgagaataaatattcatttataaattttgtagaaatagttatatcataatt

SEQ ID NO: 379585 - DNA, 4091 bp, Cannabis indica
aaagacaaattactacttgaaaagaaaaagaaaaagttaatgaaatttacgatgacagtaaaggcaaacttccgagggctgtactgtttctaataattttgccattttcggagtctacaattgtggaataagaaccatacttgtctctgtaaataaaagtctgattggtataagcattaccggaaataacagagtgatccttcacctccatccatcccccggacacctgactattctggagtcgcttcagatagccgccatgaaaacgcttctctttcaaggcatgagacacattcgtcaatagcaaataggtgttctcacgcctacccggttgtgtttcagtgaagagtttcaaagggtatcttctcttgacgctttccatggctactatttttctattgcccacgtctctaatcacaacttttctgcttcccttgattttttgcttaacagatttggaggctccattgttccggaatctgattttggacttgaacttgtagttgtgagtggatgtagtggtgtaatttccaccactccacttaacccaccccgtgtgttgggtcttcctctcagctttcaccttggaagacccatcaagtttcttgaactccgaatttctctcgatttcaaaaactgggttttcatcaaaacttgatttggcttcaactgattccgatttggggtctaaccaaaggtgtaaattggcatcaacaagccaatatgagatagcatcggagaccccaattccgagtttatgaactttcttgtccagaagttttcccaaaaatggcgtcaattcaaaatcatacgaagggagattgaatgctccaatcgccacaaccggttcccagaacaatggattgatcccaccggtgaagatcactggtaaaggaatttctgacccgattatctctccatcgatggtcacaaaaacctctcggaaacctccatttccccgagctgtatctaagttgttcatagtgatataagaattcggaggattcgagtaccaaaattcgtcgtttccatgaaacgacacatacaattccactacagctcggcgagtgtttttagggaattgaatttccctcgatttcaactccaactcgctctcaactctgaaccaaaatcccctttctccggaatcggctatcggaataatcatatccgccggctcctcatctgaaatcccaaagtttgcatctaattcaaaagaatccaagcctaatttcgagtcttcactatcaagctctagattctcaatcgaaataggaagcctgaccttgggctcgttgattgctgagacattgtaatagagaaagtcgacctcgacgtggtaaacgccggtgtattctttgttgactacgttttcgagcatcatagtaaggtctagttcttgacgagagagaagagtagagtacctggtaacatccttccgaaccttccagaagattccacactcagtcggctcggctgtgctggttctgaggatctcgacgccgccgagccaaagtgcggcgattcggtcgtactgttctcctttgcatttggcacgaaactcgagaacgacgaaggaccatggtggagggcaatcggacggcggagagtaaggggtggagaatggagggccgttgatggtattagcgaaggagtggcgtaagactgttacggtcaacgatggggtcagatcatcggacggtagaggttgggccaactcaaagtactcttgtgatgatttgcgttcgagattagaggacgagtacgagtgagacttggtgaaacggtcaggcgaggatgggactgacgagattggattgagcaacaccaaaattagtaggtgaaatagagagactcttctgttcatttttccttttctttaaaaagcaaaagaaaaaagatttaaggatgagaatgagataattgaggagatgtggataaaagaaattgtacttactacttgtatagtgtaataaattaccaaagaaaaagaaagatctaatgtacttgaagcaggaaatttcagatattttggaaggtatgtgatggtttttcttttaatgttcattaataattttacaatttctatgaatctacagtagaaataagagaaatatatagtgtatatctataatatgttacatacataagtaactagagtctagactagactagattagttcatttgctttatttttttctttctttctctaagttgaaaagcaagtgtaatggtgatttatgacttcatgtattggaatggaggaggaatcatctcttttccttggcaacctgcaaaagagtgttgtttgatagtggttacaaggagctgaagcacatcagtgtaaaccaacttctcataagttcaacttttaattttgtaactaagaaaaccagagttggtaaattggtagtggcatatcatcattaaaatctcaaactagtcaaagaatctgtgtgtatatttatattgatatgatctgttcaagagagaaacaggcacttgataattaccctcaaagtttctaagttcaagctcacgcctttcttgaaccattgcacagcagcagcatatgaggtgagttaagaagtcatcacaagaaccaccctaaacgacagaaaatgagtaaaaaacaaaatcaagatactagaaaataaaattgtaaaaaagtgatctttgatcataacaggtacctctatgttaaaacgttgcctcaaattccttctaatacagaaagtgtaacagcaacaaccgccaaatatagagtatctcactagattgtttattgctttttcacgagatggtttccagtagtaaaaaaaatgtcatatagccatttttattaaagccatactatatgtttgaccttgccacaatattaaaatataagtgaaaaacacagctctcatatttttcctttggaaactacatttgctatccatgaaaatgctccgcagggataaagaaaagtcttcaaacctgtacaaccatcatcatataaatatacacatacatgtcaattaagaccccaaaagattagattataaaactaacagaagtatacaaatcattaattctaattttcttgaagaaattaactcactaagacaaggctcactgcagcaaccgaaaagatcagcctgccattctgacttactaacttcttcatagctggtttttgaattggttatgtacctgggaagataaaaagaggtcaattttctccagctacacactagttatataactaatttgaattgaggaaggtgttatataccctgatgatgcaacatcataattagtagtggtaacaattttgtcaacattttttccaggaagaactacattcaccacattctcagtgacatcgataaggtgttcaatgactcggcactggtcgagatggtttagtgttcttgatcgaatcaactcaacattgagcttctccctctcatgttgaagtgcctgatcaaaacccaaatctggatacttacaagacagagatttctctaatatgtctgcatctttctttgttctctctggtttaagaatcacattatgagcttcaatgtcctcttgctcaagtgtgtattcctttttattatccttctctaatgcttctaacccttctttcagattctggggttcatgagtgttttgtcatcactaacactaattaattaaagggactaaccaataaaacatattatctactgtttttcattaataagaatagtagagtattattcacgctttaaatttttccaaccagtttaatacaacttcgaataaactaatttttaaaagctgctagatagttagcagaccatattagtaggtagtaatggtaattgattattgataagaagaggtttccttttctctttttctttcttttcctggtattagatatatataatatattgattgaaaggttttattctctggtcttgtggtcaattctttctctcattttaacatttttgtgagaagtacatttatatttactcaacgtgctttcattacggactgagattttgtgttaatttagacatgaatgtgagatctctctctatttttcttttctttt

SEQ ID NO: 379586 - DNA, 7068 bp, Cannabis indica
tttttttttttctttgttgcaaatgagttgaaaccttaattattgaaggatttttttgctgcattttcaaagatttcggattggatattaaaataagttattgtgaagtggctccgcatggttgcttagcccttgataccgcaaaaactgtcacaagtttatcgttgtagggagtgaatttagggtgggatcaactctctcaactacgtgttgtcgtgttaggagattaaaaattaattttcttcttgcttaaatttttctagatattctgatggttgtatttttattatttgtatccctactaaaatcaataattatgcctcataatatgactaagtaagattttactcacaattaatttaattgtttgtctattttttatttgtcaacaaacttattattttataatgaccctgaggtctaatttatctattaataacaatgtttttatttttttaaatactatatacgaccttaaaatattattaaaaatattgattttttttgttttgtatgtttacgtcatctccaacttatccttctctttatattctatctttcacactatcaatacttatttttatatttattttatctccaacccaatcttctaaatatcatactaaaaatatttttttatatatatatattttaaaaaataagtaggacctttattaaataacagttcatatctctcaaacaagtaaaataaaataaaatactaatatatattttttatctattctaaaagaaaaaattaggttttcgttcctaaatttatagctatcgaaggttgctttttttctctgactaggcccaccggccttctgtgggcttaggtgcagcttgatcggagttgtattttcctactgccattcaatttttactactgcgattagtcttgtctttatgacatacttttgagtattttagtcttgtctatgtgacataattttgagtgttttagtcttgtctatgtgacatgattttattttgttttgtttcgttgttggttcttctttgttcttcaatgactcttcattaagtcactattattagtggttgaaaataacaagttttttacgaatgaatgggttattagtagtgcagttacgtaccttacacaatagttgagtactcaggctacgaggttaaactagctacaacaatttctactactgtgtcttttgagtggtggatgaaacaaaatataagtatccttaatgttaattgtaatgctccaactttttcatctaattttattttgttaaacaatttaggaattagacgactgattatttaattcgttttttaatttaaatcctagtcgtatatgtcgtgattagattattccagactattatttaataaaatttcatgatttattacaaaaaaataataataataagtatgagtgtgatactttttttgatcctattgtggtattatggtattgagtacttttattttacaaaagagaattgctaaaaagtaccattagtgtctagtactctccttaatgttatattgctattggtataactaagtagaatgtcccatatagcttaaaaagataatttttagagattatcgctaactaatcgtagagtgtcacttatagaaggtactaggtaccactaatacccaataacaattctctttgaaaaatatattaaacatatcaatcatgtcatattaacatgttcattaaatatgttaataagtttgttatattgacagactttccaactagatgtatggtcttctatttataggttcttgacacatttaataattatattagatataaatttatcttagtcatatcaaaagtgtatcaacactactgttagagtgtctcgcattgataatatattgagttgaaactaaatactatacataagatgtatgatctacttctctcatcgccgattaattttaaagataaaaccccatacacaatatcaaattctaacaaacacaaatgtttatttgagttactaatccattgttgtgtacatattatctataacctccaaatacacaacacaacaatgagcataagagttgagatctaaaatgagtaaagaaatcaagccaaattccatagaagacaaatatgataaaacaccattaatattcaaagaaaacaacctcaaactaaaacctaaaataataaaacaaacaaaactatgccaaaacattgaaaaacacacacaaataacaacaaatgacttgatgaaaatccaaaagagcatcaactcaaacaactccaccaccctctgccatcgaaatattcgttttgattggtccacgtcatcatagtgatagttgggtttcatcctcttcaatggtggaacaacacataggcatagcatatcaattcaaagagagttatggaaaatatttttctagttttatataatgttttttgctcttgaatatatttataattcaactaaattttataaaatctcatcaaaatttaacactagatttttataaaaaaatatatcctctcaactttttttgcactatataatttaaccaaacaaaggataaatatttcatttttatcttatgtgaagttaattatattaattatctttattttgttcaaatcagttcttttaaaactgttagtaatttcttaaaattattttataattaagtagtcaggcaaatcatggagtgacacgtgtacactgtcaaactgttctgttatagtaagtgctgaactaaacaaacaaacattcacattgggtacttctcaagccaaaaatagatgatatttctcttaaaaatataataagaataagcaaactattgaaaaaggagatttgtagaagaaaatttaaaagagcaataacaagaagaagaagaaaaatacaaatatatccagagatgaaaaaataacatttttatttaagatattttcaagctcctttctaggacttcttataagaaactagtgcatatacatatatttattgtgagggagtgaggctaattttgttagccaaatcaactttgaataaatggaacaaaataatcacctgaagattctgaaattcataacaagtaaatttgagtaaggttaacggtaaattctttctaccactcttatgcattgcaataaataatcttcaaacattatatccaaaaggatcaatatagcaaattcaggaacaattttcacaagttatgtccaaaaacacataacaaatatatatatagggggagaaaacccaagttagcaatgcttaaagttttaagcaccaagatatatccaacatggtataggtattatagtagtagagtatgatatttggcttaacagaaaagtcagatccaatgggcgatagtttaagagcaatcactatttgaatattacaaagaataggaagaccaagggctagtagtatagttataagagtttgccttaatcttcgagagaaggggatagatctagttttcctcctatggcggtgcctggggaggctttacctggtaatagtattgtggggaattggtggcgcctgtgttaggagaagtaaaacagagattatgggctcccgggtttagtggttttgatgaaagaatggcagcggagggaggggcggccgaaaatgagaatcctgatgatgctgcagtagagaacagtggcactgggtttgcagtaacctggccatgcatttgccacgcgggacgtccttgggaagaacctagtgcaattctcttgtctgtagccctttcctgtatatttggatttaaatttaaattataagtatagtaatggttgttcgcatataatatgaatagcatcacccaagaaaaaaggttttaaagagtgaatgtaattaccagaagaattattggcaatatcaacaacagaacaagcagtctgatgttatgaaaacttttgtactatagtaatggcttgttctcagatccgtgatgttggtgctaaagagttattatgaactaattaaattactaatattatgaacacttttagacactaatttttgaagctataccatttccaaatgaatggtccattaatattatagataaggagcaaagaaattagttgcctaatttataacttgactgagtaatttcatgactcgttcggttctagtcataactttgtactgttataataacattatttggctaaatatggatagagaaattgttcagacaaaagggtaattgaaattttacctcattaggaaagaaactagggtatacaccgcttaacattagcggttgttgttctgatgtcattacgagccctttgaaagatggatcgcctagtgttgcattgctatggttctccatctacaaaaccagaaggcatagtacataaacaaaatggcttatacaatgttacattggtcataattttttttttggtcattcctatgtgatggaaaaaaaaaggtggataaatgaaaatagaatgctaaattttgtcaattgtatcagttagtacgtggaaaacaaatgaatgcaagacaaagtgcgaaaaaattcatcatttgctacaagattttgttagttaccccgagaggctttctgttgtgtacatcataatggccagggtggaactggatacgcccctcgctttccttctgacaagtgccaaatgaagaggtggacatccccagattgagatcaagattgtgattatcacctgcatataagagaatcgttaacaattgcaacattttggtatattatacaatgatcacaaaaggtcctataaaattatctattagaaagtaccttcatgattggcattaggaatcatttccccttcgtaggtacttggctcaaagttggtgactgcttcccttccattacatttgatagctgctttatcatatgccctggtttccagaaaatcaaaaggaagacgtgttggatggaagcctaatgaggttgagaaggtaataaattcagtttcaggtagagtgtaattcatgatcattaggaccttgcagcttctacttcgctgtcgaatagcccaagatatatatacctgcatgcaagcatcgtaacctccatgatgtaaacgcggtccccaatttctgtttctttttctttgttttcattcattcattcattcttcatcttcttttttctattgaaatatatttgatagtttgttttacacagaacaacaaaaattgaaaaccaaaaaggaaataatttgcaacaattgtagttcacaccaatgaaggcataataaacttccattatcagaagtataaattgaatgataatattttttaaaatagttcctcactttttcctaggaattgtcccattcgcgcttcccatcggccacatttgtgcagcgtcactcctctatattttgagcttcccctagagaacccagtgctctgtctgcgtagaatgtgtacaaactcttccttggtcaagttcttcatctgagaaatgaccaaataggcaaacaatttaagtcttatagcactatagcacccacaaaattaaacaaaagggtattcagtatttctttcagtgaaaatagtatcacattaatacctgctttaaatcctcgtcataatcgctgagattgaaattaatatcagcatctactcccctgaacttgatagcagctcgatcataagctctaaaatccaaaaacccaagtcaaccaaatgcatatgataagcactgagacaacaaataacccaaatgcatatacaagaagaaatttacctagccgcagcatgggcagtgtcaaatccacctaaagcaaggtccaaaaacaaaattcgtcaaagttttccaaaaatagaagatcataacagaaaattttctaaatgggtagacttaaaaaagtcagtctctaataaaataattaaatccatacccagatacacttgttttccacaatccctggtttacaaaagacaaagaagaagaaaaacaaaaggagaaatagtcagtcaaaggtgtaaacagaatcataatatatatctatatatatatatatatatataattaacagatattatttatttccctgttgaaaccctgaattgcttaaatacaataaatgcattaattatcaattagaactaagcaaatgaatgatcgaaatccatacacatacttgatttaacaaagacccaatttcatcgaaacaataaacaacacttattgaatacaattcaagaagaaattgactcaccagatatgcgattcccatcttccagtcctcctatagaaggtcacccctctatactgtgagctccgagacctgggccccctcctgctcttctttaccggctgtggctgtgggtttagaggcggcgccgcttcaagcactctcacctcaccagacccactctgatcaaaccccagctcgatccagttcctcctcgaagaagaagaagaagaagaagccgacgaaagctgcccctgccaatccttaaaatctccatttcctccaccacccatcgggaaaagctctttcgtcaccacgacgtcgttttcagccccaactttcaggatatcgaagctgaacgtgtacacatcggaaacaccggcgcgtgcggagcacgactcgtcatcacctacgttgctagacgcgtctgcattgacgattgaagaattagaggtcccagactcgtccattggagtccccgaaccttgcggaaccttatcgagaaccatcgacgagtcatcgttacgagccgaatcggccgagtgcacattcagattaagatccaacatagctattattattttcttcaaaattcagctccaacacaaagaatcctccaattctcagctcccaacccaacactatctattatatcaacttcgctcgctctttacagcttccgaaagttcgatcaataactatcactaacaaaattaatcgaacagacaaaattaagcggatcagaatcaatcaatacaaacccattccacacataatcaatagtcaaacacaaaaaatctagagagagagaataaaaatatctagataattcaaaaaaaaaaaaaaaaaacaaaacaactaac

SEQ ID NO: 379587 - DNA, 1795 bp, Cannabis indica
ttttgccatctttaagactggttattaaaaagcatgagtttgcctttttgatacccatagttttagttagcagctaattactttaccagttttctgttgacatgatgtatttatgtcgatcttaattcttatttaccatcttatgccgcattcagcattattttttcgtgaagagacattgtgtatttgctaccttcttgtcatatgtgagctcatttgagatgctgctagttgtaaatggacatgcagtcatcgaaagtttagatcctcttgatatatctaatattggaaatatatgcactaactttagctttcaggtattagattattggtcttttagtacttaaagattgtttagacaccatattccatgtgaacacccgcaacctttgtacttgatccaagcctatgaaacatttggtttatcttgattatttattggatcagaaatatttttggattttattgatttttcttctatgattatttaagatccatctggaggatgaatttaatggacagaactagggaattttttctcgaagtctttcatagaatatttcttgagtatcacaatattgtgaatcgggatcttgaatatcatgacatgtttatgataaagcttacaatgtcatttgtatccagagtcattttagaagtatggactgaatctttgcttttggcattagatagaccatgcctttcaggacagtttacttcataatttgtgtacacaagacttcattccatgtaaaccttcataatttgtgcacttgatcctagactatgttgcttcccatccagactacagtttatttcggagaaatgcgattaccaaaatgacttttacaagttttaattgaaatgatttttcaggacagtcaaaatgtatgtcatctcttgttctagtagtacaaataataattgtaactttatatgcattgccataaatgtattgacattcttatttgccactttgagaaatactcctaaacattcatttggggttaaaagtactcgtataatttggcatttcccattgcaaacaaaagttctgcccaatctttttttcttgtttctttattccttccttgttttgttttctctcgagtttatgtctgttgttttcgaacattttttacagctgtgttgttgttgttctcttctctattgctcatccgttctttctttaacctacctttgattttaacttcttttaaaagatattcactctagctgtttactggattggcctatgataaggactgttattatttatttattttcttcctcatgcaagccattttttctttgtttgaaaggaaacccatcctcctttgctgcattaggattaggatcagaacgaatgaatgcagatacacacatccctttgattagaaaagcactgtttcttgagttgcattgttgcaattactgcatatatctatatacctctgtctaatgggctaggcgagacagcttctggactctggagtctctctgtagcaatttaattctgctatagcaattaaagtccatcaactcattctgcattatattagttggctgtttttatttcatgtgtcccacaattttgttacttgtagcatgaagaccaacatgggttttcttgaaggtacttttttgtgtgtcctacaattagttctttctctttataattattattatgaatattgcaatgagccggtagagcatatgacaaaactgtaaaatcgtaattagtgtaatttaatatcgagtttgacgtcacaccatatggtgttataccttaggt

SEQ ID NO: 379588 - DNA, 3491 bp, Cannabis indica
ttctaacaagtgtatactaatttcaataaaaaatatttaatatattttttttatgtttttctgaaataaaaaatgggaaattagttgatgatgtgcaatggaaaaagttcatgtattttaagtgtctggttggaaattttttaggttggagagataatttcaaggtttgagaagaaggggtttaaattgactggactaaagctcttccagtgccccaaagaattagctgaggtctgtcaattctcttttactcaatctttttatgaagaagctcaatatgtactccttgagaattctaattcaatgattttatattttctggttcacttatgatggaatgaacaaatggccaaatttttaataagaggaaagaatatgtatgggtcacttaaaatggagaattggaacatgtttataatatgattcattttttgatatacaacactctttctggagaatctatggagttgaattggtttgatttgatcccttattttaattagtaacttttactgatacaggagcattataaggatctcagtgctaagccattcttccctacattgattgactatattacatcaggtccagttgtgtgtatggtatgactttacctttttcacatctctatattcttgtgtgtgttctacccttgttgaaaaaccaattggatttaaggtattatgtactttatacccgtttgtaaacaaactgataatgttactatgattgccaggcatgggagggtgttggcgttgtggcttcagctcgtaagttaatagggtctacgaaccctcttcaagcagaacccggaactataagaggggatcttgctgttcaaactggaaggtgatgcattaatttaatttaaagtaaacttaattgcatttggttgttaaagaatttagcaatgaattataaagttacaatgaggtctgatatgaatgcactggcaggaatgtggttcatgggagcgacagtcctgaaaatggcaagcgtgaaataggtaaggcctttactgccttactgttgtactactatgtatcgtttaaaatattttgccttaaatttttacacagatgaataaaaagctacattttttctttgtgtcggttcttaaaaaatgaatgtatgtttgtactgtatattatttgttatgcaattattttcctttctctaaaaagtaaaaaagcttgtcatggtgagtgatgagtaaaagtaatctgagcttattaactcaaattggtggaataaaaaggcaacattgttacaacttttttttgctctttgtctcacaattgtttgcactttgcagctctatggtttcacgagggtgaagtaattcagtggacatcaactctctcgccatggctaagggagtgattcttcatcaaagctcaaactgaggatttgtaattttggaagagttattttgtccacctcagataataattgatggtgttgatttctttcaatttgagtataaaattgtaatagaaaaaaaaagatagaaatgaagcacacaatactaatttgcaataattgatggtgttgataataattgcattttatctttaattttttataaaattagtgaaagttaaaaataatttgcaataaaggaggtatatttatataaacctatttatgatgtagatgtcaaaccagtaaaactttataacaaactgagatttattttttgttcatccaaaaccatgtgggataattattttaaaaaatctcttgagggacagctcaaaggcacaaacttaatcttgtgaagtaatggctcttatcccattgatgaaaagttgggtgtatgttgggcattctagagaggaagtacttgtcctttattagaactcctagatcttatctaacctaatagtttttggtggtgattaggcttctgttgtgctttgatagcctgatcaccttctactaaattagccttaacaaattattgattaatataagattatctttaaaagagtaatcaagaaaatcttagttatccataacataacatcaacatgcattggattcaaagccaactaaccctattgaacacaaatggactatgctaactgtcttgagcattttataaatcaatgaaagatttttgcttataatactgattgaaattttacgagacataataggaaattgacagtaaagtaactcatatgagtaacaactctttttttttcttcttttaaattacaagtaccaaatatcagcaccatttataaacttagatgccatgaacccaattcagagctaaaaaatggctaaacaggtaatgaagggacaaattcaatttctgactgctgcactgtggtatcaagagattgagaagtgctaaaacttggagaaatacttgcaccataaccattctccactgccaatgaatcctcaggtgatatactaacagcttttttagcatttttaaatttagaaaaaaggtaaaaattgaggcaatactttcttctttgtgtttagagttcttcactgaatcagactgtgaaagataatctgtatccattgtaactacctcctcaagctcgttgagtgagcttgtgaactctgaaccactagcagaaggagacttcagatctattttcattggctccaaactgtttgagcatgaaactaaaccaccatctacatcactttcattcttgggaagtgaactcaaattgcgctgagaacctagtttaagcttgacaagtgtggcctctacacaaaacaaaaattgaaatttagaatgggatctcttgagtaatgattttgaaattttgttcatcctattgcattttcttaaaccatttttcatattacactaactgctgcaaagggtcaatttaataacacaaaccttcaacaaaaatcttttgttaacaagataattacagaaaggtattgggttgttcaaagattggatttggatggacacaacaagataaatctcataaaatggtctcaatgttcatcaaagagcaaacaagtttagtcaaagaacagcacaattgaaaagatttacagaaaaaattaaaagttgaaagaaagtgaaaatatgacatccagaagaagaagaagagtgggttaatggtaccatagacggagagagaatcttccttgataatcttagaatgaggtctgtccaagtcgaagctttccaaggaagaagaagagaaggacactggtcttactcgcccaaacattttggtttggctttctccgtactccaattctctttctctttttgacaaaaatggattaggagcgcggcaaattctaaaacacctgagcgggaatgaaatgaaatgaaatgaaatgaaagtgtgctacgaacttgggctgggcctgttattgtgggtgtcctatttgtacaattttgaaaaatatatagcctattttattattttacaaaataaaaggtccaattagtaatttttacaaaacacagaaccctctgttttgttaaatga

SEQ ID NO: 379589 - DNA, 2925 bp, Cannabis indica
atatttcgttttttttttttttttatggaatgtcagctacagaacttgttaccagatccattcaagtgatgatggaatcaggttgtgaagaggtatgtcagccctgactttacatgacatggttgatgatctttacagttttacttcacttttgctcttaccatcctttttctgcctacattcttcttaaacaaaccgaaattgattcggtgctgttgtgattttctcaatttcatctctattgtgccctctctaaattaatcctcctttctattgtccatagagagatttagtcatttaagtttttcttgcttatgaaagttgtacctattcaattggactcaccttaagtttgttgtaaattttaatggtttccccttacagtgtgatcttgggatggagcccttttaatatttgtgcttagactttaaatatacaaaattttgttatctagttattgatgaaggccattatagagagaaacaatctgaataattcatagtcatagataatctgccaaataattaacctcataaggcttgattatatgttggtaagtaatatgtcctaaattgtttaggaaactaattatttgaggaatttacaagacactaaacctctagttcctaaaaattgagtcaaacctaataataatcatcataattaaatccttattatctctatctttaagttatgtatcatgactgtttatatcagtgattatttggatttgggagtaagttgattcctggatatcaagttcttagtgatgaaatccaatcaaaacaattgtactgatagttttgttctgctttaatgctttgttaaatagatacttccttgcctgaggatatctatgccattctaattccgttttccttctatacccaatagagtttatatatgtgtggtaaatttataatcaccaattggtttgaatcatccgttttatttttattcttggggttcatgtttgttatgttttctttccggaaaaaggtgacattagaagcagaagtcacgaataaaggagcactggcattatacggtggccttggtttcgtaagggcaaagcggctcttccgctattacttgaacggagttgatgctttccgtctgaagttgttgttccctagtcctctgttacatccctccctttcaatgatggcagaaagagatgacagccattggcacaataatgatcacattccgatcgaagaatgttctgaagttcattgaaacaagtcactgtcacaactcggtactggtactggtgctgcatacaagagaccaactgatgaggtaaattataatatgttgttgtaattaacaacgtttcttgttgagctgaacagttttttgaaaagctttaacataagtgctaccatttttttgtatctctgaagagcttttagtataacaactttcagaaatcactttcttcccatgaataaccctttatcagttatcagcatctgagcatcataaaaggggcatgagacttgttttgatgaattgtattctttttctcgtctcaccatctaagccatgagacacaaaccagagtggaaaagataatgaaaaaaagagtgttgtaagccatcgatggatcgaatttactaactcttggtggactctttagatgttcagattcttagactttagtatagatcaaaccagtagcaatgaacatgctctattgttaaatttatgtgaagttattgacattattgatggaccaagtggctgtatattgggtatatgacacccaaacggcaaaaattgaagaactttaaaatatttagaaaaatcaaactaaaaacacactatattaactacattagatgttctaaattatttcattttgaagctagtttccttgagctaaagaacctctagagctcttctatttctatgcttttaaagatgaaaatgttgatgaaagctacaaagaaatttcagaaaagctttctcttcaagtgagataaatgttgtttagaggcaataggtaatgtaaagtagttacatatgtaaaattatagctaagagtaaaataaaaggtcaaaaaatacaatcaatagatgagctaaaatagtttaaaagtttactttatgaatagtgtttagttaaatgtagctaaaaaaaattattggttttagtgtttagctataatttattattatttttataatatattttgtttatttgtcagtgtaaaattaaataaatattatgtaatatataatattttattattttgtatcttataaatatatttaaatggtataaagaaaaatataaagaaattaatatatgatgtaatgtaaatttcatagcagcttttttaaaatagagaagctttaaaaaatttaaagaaccatactaaaaatatgctataatagatggtctaaattctttcattttaaagtttttttaaaataaattattgattaagctagctataaaataaaaataattaattaaaagatgagaaaaaaaacataaaatatgttagcttaccaatattcattaagctagttatatgtagagaattttttaaaaaagtttgagaagcatctgaccagggccaagaaaatttataatagatttggaaaaataggcatttgtatcacacaaaactattttttttttctataagggttcatatatataaatgttttgggtcttgagttcggatgggttctaagcacgggcctagtctaccttagcccaaggctggacctgcagataagtcataaatctctaaaagtttatgtttgatgcagataagtcttcaacttttaaaattggcggtaatagtctcccaaggtctcgtttctcgtaattttgttagtcatctttctaattggagtaatttgcggcaaaacccccttaactatcaatttacttgcaaaaaaccatcca

SEQ ID NO: 379590 - DNA, 6293 bp, Cannabis indica
aattagactcaaataagttactactaaaagagatgcagcacataagcaaagaatattatgatgcagtatgtaaattctgaagtgagtgctctttgaaattgaagtttcactctaaatattaggatacttttatcttttgcttggaaagatcttataagtgacaatcacaatgataggcctccaatacgcttcacataatagttagcgacagaagaattagaaatgggcgctaaggtattttgtttcgagtcctttgtccttggttggttatgtgtttggcatgaggtagtcattttggtttgccagggtgtagtggtagttttgcatttgttcaatggtaatgtatattcgctctttaatgaggtaggcaattagtaccagtgattttgaatgagcttcaactcaaagggagaagtctccaagttctctcaaacaacttggaaagcttgtactgatgctttaatatatgatacagcctactgcaatttctaatcagaagtactgttacagttacattgaatattgcagtcaattgtttctaatttatcatttattaagttgagtataacacacatcattgcaaaattaactggttgagctcgtgatggagaatacatacctgcattggacaatatgatggcaactgaacggagtttctagtttctagctcaggataaactaggaagctgcacagaaacatagctaagcatcaaacggaaactaattttaatacaaagaaagcaagagacataaaccctggagatgaatgaataattcacactacgcaacatgcagatagtttgtcagtatatatttcaaattcaaccatcagctgcatgatgaaatattttatattatctttgtcaaactaataaataaggtgtttaaccatctttcaaggccatacacaagcagaaattgttgtttctaaacaagtcactttttaaattctaaaagactagacatttgattattctaactaattacacatgccaactttgaaatttatacgcactgtacctgacacatccttcattcccagaatgtgtattggtaaattatacaagaatacaaaaagtgtatgcaactgctaagtgaaagtgactatgacattgtgaaaacaggcattacaagtctgcaacataaaccaaagaatcaaagctcttgaaagaatgtgctatcaagtatatcaattgtgatactaataacatagccccatatgtaattatgtatttcccaacatttttctgtgtcgacaaacccatgatttaatgcacaaattttaaaatgaaagaatgccattttgcttattttaagttctaaggttgtcaatttggcaaactcgtccttaagcctgaaccaaagacatacctatgctggcatttctggcatgaataccacctctccccttcatacatcttgatcgccccggaacgaataacggtccctttaagagtaagaagaatccctctatgcttcactctcacgcacccaattcttggaaatgcatctgttcacaaccaaaaaaaaactcagcaatggtatatgtatacatatataaatatatctataggctacaacaaaaaagaaagaaaagaaaaccgcccatttgaaataaattcctccgaatgattaaaataacattaacagaacattaccagatttagataactcgaaaagagaaccgttgatgtcaatccgaacatgaatgaactctttcttaactcctttttcagaacctttaaattcctccattatgattttctacaaacgcaaaatcgtcattatagttacatttccattgatacagtcaaaacaatatttacgtagagctagtgataaaacttcgcataggtacatgagcccaaacagccgcctggtcgaagaaacgcaagtactctgtgggttgagagaagacgagtccagccaaagaataatcatcctccaataactcagcaaacctgaacacacacacacagaaaattcatcaaaatttcaccgaaaaaaaaaatcactaacaaaaaatcattaagcttaaatttgggggttttacttactcaacgtaaagaggatagtgaagcttagaatcagttgagagagcaatagagcgaagttgatcagaatggcgccgtaaaaggaactgcgccaacgatttcacgtcggccgaagaatcactcatcgccggcgaattcaaacgaaagcgacgacgacgatgatgatgaaatatggagttttggcgggaactgcaaaaaatatatacataccccaccgagtttctttccttcctggttttatgaaatgacgattctgtccctaatgggaaaagctctgttcatccataatctagactttttaggtatttcactaccccttaccaccacgttttccctcccctacgcttcatatatgtatatatttccttcattcatacaccaaatgaagtaacagtttcttcttcaaaaatatttcgagggctctactctaatcgtaggtaaattttcttactccattcattacattaattcttcaatgcatttattattattattattatttccattaacatgaatttgagtagtttatttattttttttaatggaggaaagaaaatgatattataatgtttttgtgaacagaaaaaatgtgtaagatcccaatttttgttttgtatgatgggaaatgggatgaaaccacaaagaagtttgttgataacaagtgcacaggaatagtaattgagaagaatattaactacactgagttgcttgagaaattgtatagtgttttagagttgaatcccactcaaagcaaaatagttttgaagattgatacatcaatcccagtaccatgttcttctccatacatggatctttcgaatgataatgatattcagttcttcttgtccttgaacgaaaaggataacaatcgttgtcccttgtatgtcagcattgttggtccagaatattctaaaaaaaacccaccaccatctgtttcttcgggcggaagcaacaatcgcttttcgaggattcctttaaaggaaaagcaaaacattgaacaagaagtagaatctaagagcaaggttgtgttgggagataggtgtggtggtaatggttcaattaatggtaacacgtcttttgttaaagatggaaatgtagggaatggagccaaaagatttgaagatattaaggtgggtgacttgttttgggacaaagatacattgaagaagaagatatatcttattggtatggtagggaattttaagattagaattgtgaggtctactgctaagatactagaagttgggtgtttggatgagcaatgtatgtggagagtttatgcaggaaggttaagcattactgagttttttgaggtgagaacttatgataatgtgcatacttgtgatttggatgctgtaagaggaaaatatacaggattatctggtaagagaaacaaaaagccaaggattcttctttttgatgatgaagatatcgtgaggaggtgtggcaaatgtgggaaacctggtcataatcgccgaaattgtaagcttctatttgttattcttaactttgattcacattttacattgttgttatcatttattagaaactccttaccctttaccacacactttcatctaacatagaacccaccaccaaaagctagcctgagattagggtgctcgagtagatatttagtacatactaatatcacacttagttgatgtgggatcccaacataagtgaggtttgtgatgtgattttgagtgtgttgtaaacacactgaatttttctctttctactgaaaaatccgaagcagcctgtggactcaagcacaaattgagtgcttatgttaatattgtgtgttgttttacagaactgttcacttaattaggttgagcatgaataattatttctggtttattcctaaatatttgagaaacattaaaatgtatatttttcacaaattgctcttactgcttttatacccataccctttactctcatagactcatctaaccaattgaattgcccttaagtccttattgatatatttgttattaatatttttaatgttgacaactatgatagttactgatgacaggtaggtcaagtagtcatatttgttttctcatcaaatattgcacaattttgcacaaataccagtgtacaaagaaaaggaaaaatggacacatttcttccttgtaaatgtttatcattatacaatcagtttatctacatatctattgactgttggaatacttattagtgggtcttaatgtgtaaacataatgctatctattgaataagcaatatgttttcttgtaaaagaagagagaatagttatagtgttcattagtacaatcttaattatgtttttgaatgaccaaacctcgtttttagaaagatatctatatattaattaattcaactttattctttgtttttaacatggttaggaattctagacgtagaaattgtctttaaaattttctacttgtgaacagattgtcctgcttgatttttatagcttagaatttaacgatgttcaaggccttataaaaatctgggaaccatgtttgtttggacacttctaatgacaggttatcatgattttgataattctagtggggaagagacagagtagttctgaaactccattagtgaaaatattaaggtaaaatgttcctaccataatttgacacaagtgtttgatatgtgtacttctacgaagcttgtaaactttctcagtataaaattctgtaagtgggaaattttcatttaaagtaactgggtgccaattttatagtttcaactagacaatttttgcttattccttcatatttcaggtgttggacaaagattagcctcaagtaaaagctgactcggaaaatcttgggctgtgacttaaagctttcatcataatgttggttataaatatgcattatattgacaatttatgttgtgttttaggaagttaagaccttttcttttttgcatatattgttcttgtgaatttcttgttttacatatttttctgttaatacaaagacaaggaatttgaattgatcatatgagtcattattaatgtcatatactgctatacgagacattgtttatgataaaagaagaaagaaatatggaagataaacatacttctttagtatggaagaaataagtttgaatcaactaaaaataaaatatatcagatttgtgacggtctggatgttcatattggtgtccagaaatctcactgtctcgttcttgtgcgtcgacaaaatgggaagaggaatccattgttggaggatatgttgtcatggacagaaatccagttcagtaatatacatgtattagagcctaagttgttgatttatttatgaaatatagttggaagttgtggataaaagacaatgaaattatcatattactgggttagttcctacagattttttgagtgaatttactggaagtggaaatcacctatttgaaggatgaattctttgttttaggacatgatctgcataattttgctacccacattaaaagtagaaagtgcattatgaaattgccaacaaattgaaagaggttaaaattgatagtgtactctaaggagatggatacacacaatgagtcagatacaaaaatggggaagtaatatgagagttatggtggaattagatctgggtgtatttagggctcgtttgataagttgtattatgtcgtttgatacaattagtcttgaaaaagatagaggctgaactgtcatgagtaaggcagctcacggaaataatattaaatttgaatttaggaacataaagaacatctttaagagttagaatatcattaattttgacagtaccacaatgattaacgacaagaacatcattgtttggcaatatcaaattagtagagctcacaaggcatatgtattgaaataactttgcattattacaaatgtgtcttgtagcacccgaatcaagtatccaagattgtttacaagctgaaattgtgttgcaagttagaaccatacctgagttacctgtcgaggaactcggatcagcaggtgtaatactcgattgttggtttgccaataggttgagaagttgctgatattgggcagcacttaattggggaagaagggtgttgttgtcttcagtattggtgttgttttccttgctggtttgcacctgattagcagcttcttccttttgtttattcttgttaaagcctggtggatatccatgtattttgtagcacctctcaatggtatgaccgagtatgttacaatgggtgcaaaaa

SEQ ID NO: 379591 - DNA, 3347 bp, Cannabis indica
tgaatatatataattaaattaatattaaaaaatatatctcactaattttattaaataataaaataactacataaatttagatattttatataatataactaataaatttattataaagtatgattaattaattgaattaacttctattatccatgtttctgagaaatgtgacaagtggtaggtaaaagaaaagattaacctcataatctcgttaattaaaaacctccattacaatcctatcactataaagtctaacggactgggaacaagtaaagactaatggataagtaaaagtccaccttgccttatcctagcttattggacgcagaagacatattgtctctcccaaacccagagttgtccaaatatggaagcctccctagctgatacccatatgggtactcaaatggcctattgcggatattgaccctttaagagtgttgcaaacgtctacctttagtgcaatccagatcacccaacgatggttatgctttttttgaaacaagaacagatcttgtcccttgtgtccaaacatggtagtgcgcacacctcacccacctttttgccagactgttatatcagatctctacttctaaaggtgaaacatttgagcgacatatgtccttcacttttaaggttaaacttttggctgacacgtgtccacaacgtacaaatagtccccaattatagagtccatgcacagacataattatttctaagggacccaatagtcacctctcattttgcatgtaatttaccccattagtgggatttgagcaaacatcctaggcaggtcatggacatgtctatagccacccttagcctataaatacccttctatttctatatgaaggggggatgacaaccggaatatagctgaagctctgccaatattactctaagtcttcttctttttcaagagaaactaagagcacatagtagggtttcctacaaaatattgtaaacacattaaatatgccgttagaggctaatagactgactcttagactaaggttaattaaaacttgaaccacgtaaaaaatctccatcactttattttatgcactttattatttctttagctcgcaaatatttagtttccaaaaattttagtaaacattttggtgctttcgttgagagttgaagaaaggcataaacctgtaatgttattgctacgatgatttttacatgaaagatggttcccaagaaaactcctcaagatggcatcgatgctatcatggaggaagtaaaccccctttcgccagagcacgcacagtcgagtgatgcgatgtgtggggagatgtccaacaatcgaaaggttggcctaaacaacaagcatgaaaacattgataaggaaagggatgctgaggatgatgatggagaatatattaaggataggtactacaaagatggttatcactatgagcaaaacccatgagtattttaagtgtccaataagttgctcgaaaccaaacaaaagctagcccttcaagaaaatttttctcaaagaatatagaaaattatggctcgccttcgagatatgttcagagatctaaatgagggatattatgatgaggacccctcgatcgaatgtatcagaggaaacaataaggaaaatcctgctcaagttgaaacctctgctcctgtacaagacaaagggaaggcaaaggtcggtgacccttaaaaattattgttaccgtacctcctcgaaaaaacatgaatctaaccaacaggccttctcaagcacagaaggccatcgacgccttcgggctcagatgcccttctacccaaaaaggccctcttgtgccataagggactagtgtaaaactactaaagcccaagtgaaggaaaaactactctagtgattcagtaaaccaagatggtgggatcaggggatagtactctgatgacaattggtccatagtgaatctcaaaaggcatcttgacaccaagtataaaaaggtgaaaagtgagaaggtgaggccatgtggtaatgaccttagaaaccacttaaatgacaaagtccgtggatgagatcccccggacagtgacacctaaagattggaagaacaaattattgtactgaaaaaattattttggaaacaaagtgggccccgccgattctaaggatgaggacctgtagccatgtgtcagaaagctctgctcccaaagaacgccaatatgccccaagtgagttgtacgatgggtgaacttatccaaagactcatacggcaaaagataacaaaatgaggcaagcggcaagagttagtgaagatgccaaataattatgcttctccttgaccctcgccaagtctactgaagattgttagaagagattggctcccaaatcgattcactcctggaaggaattgcagtctgccttccagaaatagttcattgttgcccgtgactatgacatggaaatgggctccatcactaatgtcaagcaacaagtaagagaaagtttgaagaacttcatcatgcgaatgatggaggcaacaacaaagatgaaagtaactgatgacatgaaatttgtggccttgaaatttggacttacagttggctctctgatgtggggataaatgcaaagaaaagcggccaggacattgtccgagttcatggtaagagcctaaggcttaattaatctagaagaagcctactgcaagcattcagagttccttcgataccaactcctactgcctatgcttttggattcacctcaccaattccaattcccatagaacaattaactctgatagtctattgaccatctgcatccctgcaggcatctacacaaacccatttttcttgctatgaagtggcacagaccgaatgtagtatcgctccttaacaaataatagcagaaaatctagaatagaacatgagccaatcccagaacaagagaggagaaaaaggacgaggatgaagtgagatttcaaagaaagcctaaaagtattatgaaacaaagtatataaagtactccaatctaatggatactcgagagaatgtgtatagagaaacctataacgtggtccactacaaaaaggcccaacggatgccttaatggatgatgttgaaaagagacccaagtaagaggcatgagtatcacggaaaggtaggacactccaccaatgaatgtggctacctaaaggataagactgaaatgctgctaagagcaggacacttgacacaattagtttggattcctattatctattctggataggggatcgctcacagacagtagatcattcgaggatagtaggataccataaatcctccatcagaagtaggtgaccctgaaactcttagattataacttgcaactgtaggaaattattttacca

SEQ ID NO: 379592 - DNA, 2686 bp, Cannabis indica
atccatcagtttttactattcaaaaagggtccattaatacatttaattaaaatatatatacatagaaaatgaattttatccatttactataaaagagccgaatcatcattaggtgatgtaatataaaatttatttgatatatatagcctaacccttaaatttactgaatctaatagtgatcaaagtatggagacaaattccaattagtttttttatattatttattaatttaaaatgtgtgtgggatgtgaatgcttgatatttaaggtagcccttagcctttttctatatatttgcaacctgccatacactatacaagtagttagcaataatataatcaaccaaattacatgaacaaagagaaaagaaactaataccactataatgtagtgttattcatttatagttataaggagataaaaataacaattgtcattgtttattttagttttgaggtgaagcatatcgggcgtaagatagcaatgtacaattaaaagaacaagcattgaaaaaaaaaaacaaatttatttttacctgcaacaaagaaaaaagctaaagctagagagaccaaaacagttttcattgtgagcgaataatatataaatagctttatattactttgtttgatatatatgtataagtgatggattgagttttgattcatgaattgagaggaagcataaggtgttatttataggcttaacgaacccattttcttgggttgggtgttttagatttcttagtaaatttcaattgcgggtctaacttgctatgatcatttaagaaaattacaaacggttgtaaaattacaaatatattgtgatatacgtggccggtactcgattaatcggctagttaaatcgtcaactatgttctgtagtttactcagaaaaaatacatacaaattagatgaatttagaacattcaagccatcaacgttatctaatattatattatatatatacgcggtgaatttggagggtcccttcataagaattttttatttgttttaaaacttgcctctgtctgattataaggtagaatttcccactaagatcagatagatttggcaatgtcccactgagtctattaatacgaatttttcataattactcaaaataaataatctacaatatttaatattcatatttctcctacatttacaccatcttgtttttcataaaaataagagaaaaaaataattgcatacaataataaatttaaattcttaagcaagtaaaaataataaaataactcagtaaatatataatatataatcatatacttagagtttttatagatataaattctgctatagttcaatagcacaaaaatattacaagaatatattgagccggcatattaaatatttatacaacccaacaaaaaattattacaaaatatcttcttaagagtttttataaaatattcaatccaatctaatttacaccatccaatcaaatttaatttccaaagtactagattggaaaatctaaaatttatatttgtgccgattaaatattgattgatatatgtaaaagtaatcgataaattcagtccacacatatttatatatatttacaaaaaattatatataatattaatattttaatgtaaaaaatataattgatgcaaatttattttaaaatttaataaatcaaatgtatattccattcttatttgtaagaaaaatgtaatctaaaacaaaatattatcgcgaggtgtgtacagaaacccaaaaataagtaggtttgcatattaaaaataattaatgttgtgattaattgcgtctcgaataatatttatatgattcaaaatttaagtcttgctttgtatcataggagtaagtcaaatttactgattataacatagtaagcaaactagacaaaagacctacactataagcgcctcaggaaacagtattgcacataaaaaatggcttctttggagactcgcgttaaaaaagataagttaaaagagagtaagaagaaaactaagttaattacaagatcgaatgctttcaccacaagaagcacaagagatataatttgatagagtttgcttataaggattatacaaaaattatccaaaatctcatttgagataaaacatgataactctttaaaatagagttatttttcatcattaatcttttggatttgggctagtttagagtcctttaagttttttttattatgttttgtttgttttattcattttgcttagatttagtattaatttgttatctttgggtttttgatagaaaattattataagaaaaataaaactaaaactttaagcttaaatttgatcatattctcataagatttttaaaaaagtcaaaacataaaagttttagatcttattctcgacttttcaacgcatctaaaatcagctcatttagagatagtacgtgaaagttatgtgtattttattgagagagattggagtagaaaatacttggacaacaaccaatctccaagcgcaggcctttccacgcatgtgcgagtctgtatgggctgggccttgtaattgctaattttaaagttaattagggttattagactgaggtttttagccaaataatcacaaggagggaaatcaatattagaacatacaaaaacactaatatgaaagattgatcaagattgaagacctaaaactagttcattttcttctcttctct

SEQ ID NO: 379593 - DNA, 3222 bp, Cannabis indica
caaagggctctctggtgaagataatgcgaagatgggttttaagaagaagaaaaaggtgacgaagctctcatctttctgatcagaatggagaagcatagagccttagaaatcaagcttgttctacttcttcaccgaatttcttccatgaaagatgttgaacaggtgcaagctttcatcgccaaagcaggtctagtgaattaccctccattggttgccaagctcatctccctgacttccgtgtcgtcatggggctgtgtctctcatgctcaatcccttttcgaagaaacgactatggatgatacgttgctgtgtaatactatgattagagcttactccagaagtgttttcccaataagagctttatgcatttataatcgtatgcaagagttaaatcttgggtcggacaatttcaccttcaattttgctctcagggcttgcgcgagagcaatgaaacggtttcaagaagattgtaggtttgagttagctaagggagctgaaattcactgtcggattttgaaattggggtttgatcgctatttaaatattttgaattcgttggtttttgcttactcgcaatgtggtcgtgttggtgttgcacggcaggtgtttgatgaaatgtctgacagaagtgttgcttcttggaacatcatgatatcggcttatgatcaactcgatgatttcgaatcggcggatcacctgtttgctttaatgcctcaaaagaatgttgtttcttggaacactttgttatcaaggactgttaggttggggaagattgaggctgcaaaggagttgtttcaagagatgcctgaaagggatgctgtttcttggaactccatcatagctgcttatgttcaggccaaaaactacgatggggcgttaaatctcttccgtgaaatgcaagattctaaagtggaagctacagaagtaacacttatatcaattttgggtgcttgtgccaaaacaggggcattggatatcggtacagaaattcatgtatcattggtaaaaaagtgctacaaggttgaaggataccttggtaatgctctggttgatatgtacgctaaatgcgggaagttgaattcagctcgggaagtattcgatgagctaaaaatgaaacctgtaagttgctggaatgctatgattgttggtttagctgtacatggtggttctgaggaagctttggaactctttgctgaaatggaaaatagacttgatgaagttaggcctaatcgagttacattcatcggtgttttgattgcttgccggcacaagggtttggtggaagaaggacgccagtattttgaccgtatgatccaacagtataatatcaagcctgatatcaagcattacggttgtatgattgatcttttaagccgatggggatttctgtatgaagcttatgaaatgatcaaaaccagatctggcgaaacaagctcggtaatatggagaactttgcttggtgcttgtactgtacacagaaacatggacatggctgagaaatgcttccagcagcttgccgagttggagcttcttaaggatgcagattatgttttgctatcgaacatttatgctgaagccgaaagatgggatgatgttgagcgactgagaaatgaaatggttactgccggggttgtgaagatacttggctacagccatataggagaaggaaattttaaataaacagaaaatggggttttagtaactcgataagttccttggcctttacctatttcaaacccacttatagcaatctgtaaactgactactatactgccgacacaaaacactaccgtaatcgtacgtgaagcgttgaaggagaaaactatttcagccttttttcgaacatacaaaaccattgtagaatctgtgtattggtgagcaaagaagctgcggagatggaaagtggctggaataagtggattgagatggaagagtatgataagcttgacaagttttcgggaattgactaaagaaagatgagggtggatggacttgattcaatgtatgggttctgtttggttacgatcaagctggtctccaatttatgatggaagtatatattacattagtggaaaatcaaatttaaagatgttaattctctagacaattcaattagagattcaaggggatatgttttgtttacgtaaagtgtgaatgaaataaggtataccttttaagagctgtttttcaacctacacaatttttatgtaaagtgaacgaaataaggtatactgtttgttttgcatgcatttgaataatcttgggggagataagtcatcttccagttaaaaaagattgaaactttaagaaaataattaaacatgaagtgattacaattcaaactcaacgtattgtattgataacaaaatgatgtgagaaattttttaagcaataactaaatgaagtaatagtacacttacaaaatgacttaattatacatcaattgaggacctctttgaagaacaaaagtacattactaaatatcattcctagggttgtcctagctatataaatctattttatacttatgctctccttggcacaaattagaatatcctaaaccagttatctctaaattgttgcagccacttgataggcgggaataatgccagcctgccacgtttggctgcagcgatttgagaacttttatgttccttgttaagctctgtactaccaacttcctgatcaagctccaagggaggtttgacttttatctttacgggttttccgagaagagacttatcttctattcttgcaatttcgagagctttggcacatacaggaaatcccttgtcatcccaagactccaaaattacaccggaacccaagcaggtctttccttggtagaaggcagcaaactgtccagctgccaagccttgatcatcttcagataattgtacaactgcaacatcttcatcacaaccttcacctgattccatggtcaagctacaattgtaaaatccagggccatgcctgacctgaaacatttgtacaaacaagtatatttttatcacttgcattgtatgtgtatgagagagattagtcttcaattaaatcttgccatgttgaaactagttgaataaaggacaatgagatgcaccagaaattggtttctctaccttgcactgcagacgacaggtttgatctgtgccaagcctgctcagccatcttaaggagccaactcgaaaaatgcgcctcttttatcaaatgaaaagtagtttc

SEQ ID NO: 379594 - DNA, 4082 bp, Cannabis indica
gttattagacactctcagtatcaaatatcaatctgattgatgcatttctaattttcctgttttagctaatcttcaaagccttttgtattgagagatgaagttgatatctcatttaaactatagatcttaaattaatgtgagttaatgaaaatatgatcaaaacatactaatacaagatataacattttgtgagatttttccaatatgagcctaatatagcatgcatgttcaataatttataaagaaagaaaacagaatcacaatttctcattccttcttcaagcattagactttaaccataaaagaagaaatgcatataaactaaatagtcaagtaaaaagatatcaattataatgtcgaaacaaagcagagatgtattttcaataatgtactttctgagaataatactctctgctaatgtcaagtcacccccaactcaagaaagagacacaacccataatagtttataacaagggagcaccgaaattacatataattttttgtggtgcaaatggagagaagaagaaccctttttgatctgcatttgtagaaacatcaatatcaacaagtcaagattaagttgtaataatcacaattcacataaccatacaacaagaaaacaaagtgagatagaagaggcaagtgggtttttcgatgatctcaaacctcgcatggaaaaacagctctgctctcaacaatcatttgtcttcttctttcgattctttgtcttcagatttcttctggtcacccttttaagaagacaagtataaatagttaatcccacgattcattgtgtacaatagcaggacatatttcataggctattttaaaattttagcccccgaactattacaactaccaaattgtgcccctaaacttttttgctcttaaaatttcccccgaactattcaattttttttttgggtaaggtccgaactattagaacaaatttttaatattaattatataatttataattaattttattttccttttaattataccacattaacaaaacttatagaagtcccttatttaaacattttgaataattcagggggaacttttaatatgcaaaaaagtttggagggcacaatttagttcggggtaaaattccaaaatagcctatttaatattggttaataatgattataaacaaactcacctctgactggctttgcatggaagccagcaaatctttaactgaaggatcgtttggatcaactcccggaagctgcaaaagtattcaaattataaatattacggaaaagaaaaaagagcaaaaaaatatacaaataagtaggttgggaagaataattacagaggcaagaatggaagacacaaatgactgatcagccagcaacttgctcatatctgcctggttagatgaatcttttgcaccttcttgcactgacaattgaagtgctgcacaacaggtatgtgaaactcagcaataaataaccatcatctcaatattggcgagaatataaaaacatgctaagcagatctttagatcgattcaatcaattgttcagagcaaaatgagaacaattgaattggtaggtagctcaatcaagcactaagaaaagaaaccgaaacttaatccattaaaaagaatagatagagagctaaatgtgcatctatgcattgaaaagaatggcaggaaacaaaaggacctacctagggccaattctgggtcctctgcagctgcctctgacatatctgtgtctcgcacatcaccagatgcagggtcatccattgacattgcaagggcctgctgcagtagagcgttctcatcgtcctgttgcaaattaaaaggtgaattatcatacaaaatcaaaaccattataaaactaagtaattccccaaaacagacagtatattgtcaaataactatggaaaacaagcaatatgtgaccaaccgtcaaatcagttgctgccttagtgtcagctccagaagttgcaacggtggcgcgctctgtcatagttgcatcctgtgagctggatggttgttccccctctttcccatccttagttgcctcctctgcagcccttttagcagctgcttcctgcctggctctctcttcttccattgaaactctaagagcaagcgccagctctggatctaagttgggatctacaccaaaatcaaaaccaccacctccagctgcagcggcagcagttgctgctgcaaaacttgcaccttccccatcaccggtgaagataggtgtactgtgatattaaaaacaaaaaagaaaataaaattatatgcttgtattctattaaaaaacttaagtaaaccaaaaagcaatgaaaacaattacctaataagcacatcagacaaaacatttggaccaggtggaacatgaacaatgtggctagtgtcattgttgttcaccgaaccaagaagtgcctctaccttctcattctttccatcatcttcttcaccaaaattaacaatatcaagtgctacactgttctttttcaactttcttccaatcatctctaaagtctttttttcatgttttatgggactgcaaacaaaaaaaatgattatgagaatttatgagattggaaaatacagggaagagatccaaaactcatgcaccgtagtaccttccagcaaagacaataattctttgttgctgcttcttgttctgcctatgcttgagagccaactgagccacctggataccagcagccagattcatctcaccgcctatttctaaacctaaagttatgaaggacaaaattggcatattaaatatagtacacagctatgtaaaaatgacagacaggaaaggaaaatcatttccagaacaattgctgagcattttagcttatcatacaaactaaatctatgtataaataaaagtgatggtgcaaagatttaagtacaacacatgtgttatctcatactaataagagattatgcaactcgaaaagtattacaaaggaatgaacgagactaaaatgacaattcatggcatatataaggtacatatacagcaatggtagtaccaatattaatataaacggactcaaactcaacaagcagaaatcatgagtgatttagcagccaaatgcaacaggtttctagatgttagaattgtcattacttggtaacatagcaattttacactagattattatttgctggtgaaaaatctatgcaggcataactttatgaacatacatcatttccttaattcaaaactgaaggcaaaagttcacataggcagaaattttcttcactttgtatcataattataagagaggttaaacataaccatttccttatacaacttgtaccaatcaatgcagtatatatgtacataaagaaaatatagaaacatcctattcgtatcactgtctgtaagtaatccattgaagccattgatttaatcatgaaactaaccatgcatgcatgctaggatcttgccaagatcactagttggagtcaccaaaacacgaagccctttcccagccattgtgagaactcccactgtgttctctgggttagactgcacaaaaaaaaacccaatacatacatttgttcagaaatatctaatctaaacacaaagcaaaagcaaagctaactgttctgtaaagacttcattttgttattcccattgaacaatcgaaaacgaacaaagatttcaaattttcttaatagttgcttactaaccaaacagataaataataaaaaagatttccgacctgggtttttgctccacaaataaggttcacagcgtcagcctgagcttgaatcctagaaggagaataatcaccgttccgcatccattccgaattgtcaatacagatcattgtcgcctacgaacaatcaatcaatcaaacaatcaaacaattgaaaatgaaaaaccctagtttcaaaaaatgaagcttcgaaatcgcaacaatcaaacaaaaaggaatttgaaaatacgtagtgtagtgataataaagtagatgatgatgaaattagggattctacctcgagcaccatggttgaagaagattggaattacagagaagaaagaatccctaactgtagagagagaaggaaagagagagagagagag

SEQ ID NO: 379595 - DNA, 2899 bp, Cannabis indica
gtttctatattttttcagctaagtgagaagaaataaagtaaaatgaaagaaaatgataaaagagaattaagctgaatattgatgaaagatactaaaaaaaattatttttaaagaaatatgcttaaataagcttgaacgtatttattttgttttaatttttttaatcttatttcaaaattaaaaatgaaaacaaatttttcaaaatatgtttttaggaaatattttcaattttctaatcaaaaaataaaatattattcaaataatgattataacagacaatcttaataagtaatattttggcatgcaacaatcactatcaaataaggtggacataaattacaattgaattatattaattaatattagtatttataataaaaaaaaatgatatgatatacagatatctttctcgttaatacacatatttttctgtggaaattaaggaaaataaaataataagacattatagtgtactcagtaaagatttctcttgtgtccctcgaaattaaagctcataatagaaaaaggtgatgagactaatacaaatttacatatataagatgcatgtttagacactaaaaagttttaaatggccatgaataaaaaagtaattaatttaggtaataatactgccaataataatatttatcaggattaaaatttcttgagtgtgaaagaaaaatcatatttgaatttctaatctatctgatagtaacagccattaattattatagaaaaaagctttgcaaaaaatagaaaagtctagttggcctttacgaaattcataagttattataaattgtataataattagtattttctttttagccaagaataaagcaagtgtaacataataattagaaaggtattttatttttagtcatctaaatcttatcttttctctcaaattgcattaaggtcaactcaactggattagaaaattccttcctgtttgacattatctgataataattgccaagtaaaatttcaaggggttagggcattattttggtccattttttttatatcaccatctatatattatagttaaacaacaaattttattagttttcaaaaatattaaaatagtttagggtgcccaaaaattacacatatattaaaataaattaaaatctgcatgtgtatgattaatgtttcaacattgtaaattatttgaaatttttcaaaaattaaaaaatacacactatatttataatgtatattgtcatatacaaaaattaaattataaattctttatatatcgaaattgaaaataattatactgatagtgatgtctcttattatttgtattatttatagaattctttatatatagccaatagaatatcatcaaattggatatgggttcttgatcatttaactcgtgtaagaaaaataaaaagcactaaagttttaaacgaaaatgttgatatatactccttccctattaaggtggagaaagaatttatctcttttatttaatgtaatgtattatttattgataatttagtttgatttatggaatttgttcaagataaatactatttttctataattttatagatctaacaaaatcttgcttctttttatttgtatgggtgttttactagtcttccataacattctaaggttatagatattttattgctttattagatgtgcacaaattatgtttttatttatttatattatttttaatatacatagaaaagttattatatgttctttttctcttaatagaaattattaagttatgagttttgataattttagttctaggaatgagaaaacaaagagagaccaaagaaggtgaacttcattaaatatagcccagggccgaccctgagttgaaatggaccgtaggcaaaaataattttttgagcccttactataaagataaatggtattttttataaattatttaaaaaaatatacattttaaaaagtattttagttttatttgggcccttaaaatgagtgggccctaggcgggagcctagcctgtctatgcctagggccggccctgatatagactaaagttacaacagaaataatagctaatttttaatagtccccctcaagatggaatggagtgcagatatttatcaaacctgtattgtcttttagaaaatgaaattgagtaagaaataaagtctttgtaaaaaatgtcagtaatttgctctttagttgatatgtgagttatttttattagcccatgttgaacctttttccgcactaagtgacaatgtattttaatatgctttgtcctttcatgaaaaataggttttggagttatatgttgagctaccttgttgtcacaatgtagcattacatgttctttatgttcaatctgtaactctttacgaattgacaggagctaaaaaatttataaggtagtgttagccattgctctgtattgttgatgatctcgaaactttgtgttgtttcttgcttttctatgaaattaatgagcttccaaggaaatacaaaatccaattgttgatctccttgtattcacacaagcaacccagtcagaattaggcttttgacttgacttcggaacttaagcagagaagaacaatctatgttgaggagttcatttcacatattgtagtactctttgagcagctaccatgttagtcatttgaggtgtccctaagaactcactcaagttgttaaccacaaaggacaggtttgacttggtgatcgtgaggtactacaacatcctaatcatttatctatacaaggttgcatcagcaagagcatcatctttgatgttttggctgagtttcaagttggcttccataggtgtgttcatatgcttgcaacctaagtagcatagatcttctaggacttgaagtgcataaggtctttgagagatgaccttgatctgatctag

SEQ ID NO: 379596 - DNA, 4358 bp, Cannabis indica
cacacatgtataattttgtatatactagtacactatatcctttttctccacaaacaaaggaatctagtaatttaaaaattcatgttttgactaccacaaataatggttatgatttatgttgcaccattccacgtctcttccttttgcaaaaaaaaaaaataagaataaatttattttacgtctttggtctattaatttaagcacgtgtttcgtttaacttaatctccaattctcagacaagaaaaaaagaaaagaaaaagaaaaaaaatgaaagattttttgacccacttcccagcaaagcgcgtcgcaaacagtagagtcataacatcattgctgagctgtcaattatagatctcgtctgattttatcaaaaataacaaatgaaattaaatgaactatttaagtatatattaaacgtaattaaaaaaataaaaaataaaataaaaaagatctcccctgaaatttggtttcattattctctctcttatcttttgtctataaaagccagagacaaccataaaccaattcatcattactatcgttctccatttccatcgactcaacaaaaccaaaatatcactagctacatctccgccgtccgatcaaatcttcctctctatctattctgtatcacaatgaaaaccagtccaatcgcttacgacctttacgaatacatcacttcaacggagtcggatccgccccgggaattgccggagcccgatgtttatgttctcacatctgacggactacgaatcccggcgcattctagcattctggtacgaaaaatcagattttattttccacaattttttatttatttcttgtgaagaaaagttagtgattttttctttttttcttttcaatgaaattataaaaggcttcggcgtcggctgtatttgagagtataattgaacagccacgtaagaacagaagctccgaaagagtcattcggatcctcggcgttcctcaagacgccgtcgtttcgtttgttcgctttctctactcgtcgaggtaattactattttaccctcctcggcgccgtatataaatgattttaattaataagtaatttatttatttatttatttaacgaaaggaaaattctttacggttgtgttgatttttatacaaaacaaaagaacgttccatgaaacacaaggggttggttggtgttgttggtagtttgagatttttatgttgtgaaatgacgtttataccctttctggtcgtatttcaggtgcgaggaggaacagcttgagctgtatggaattcacttgctggcactgtcgcacgtttacctggttccacagctgaaacagaaatgcgtaaagaacttgggtcaacggttgacttccgagaatgtggtggatgtcctccaacttgcaaagctctgcgacgcaccggatctttacctcaagtgccttaaactcgtttcaactcatttcaaggctgttgaagccaccgaaggctggaaattccttcaagaccacgatcctcatctagaactcgatatcttgcagttcattgacgaggacgaaatggtaatttcacaacaatgaactgttttatctaattataagttataaattaattgtgatcttatccaaattaattaatttgttatgttgtttattagtgactaaatatgaataaatttttattttgaaacagaggaagaagaagtcaagaaagcatagggaagcacaaagcttgtttttacagctaagcgaagctatggattgtttacagcacatatgtacggaagggtgcacaagtgttgggccgcatgatatggtgcccggaaagaagaaaggcccatgtagcaaattctccacgtgtcaaggtatccagcagttgatcaatcactttgccacgtgtaagaagagggttaatggtggttgcttgcgttgcaaacgtatgtggcagcttctcaggcttcactcttcaatttgtgaacaatctgatttatgcaaagttcctctatgcaggtacttaaaattttattattatttaaatgcctataatgatagttagaaatttagtatagaatcgataaaattggaaaagaaaaatggattgtcggcttaatatcttaatatgttgtttaattggagattataatatgataggacaatatggtaattcttggtatacaatgaatatagttagtgacacctgtatgtgtggtggctgttgtggccacgactcaataaatgaaccattgatttatttattttggaagaatgaatataaataaaaataaaacccttttgttggttttgtcgtttttcatacaaatgtttcagaatatttgatttaatatctcactaacttgatggggcacgtttggttttgggggatttcgaggttatttgttttcatctagtgtagtgtctatgtaattggttttgatagctggtgttgtttgtttcttttgtaatgaatgacctggaaagaaagttctaattttcttggttaatattggtagatcttttaagattttactttttaccctttaaataattgattttaagttatggtaatggaaaaaagcttatcactttgttgatatatgttccatggtgttttaggtgggcctgttggtatgtcataatcacttaggctgtaaatttaaataattttgggctcgttcattcttttcttgatgaggttcatgtccttatcccatgggatccaccaaaactcagatcatactatgtatctaaggttgttaaatgtgatcttaagataaaaattcaaaaggctcaccttaatacgtagcacacctggcagatatcttcataaaatatctaatagtttaaactgattggaagtaagaaaccaataatgataaaggcactgtataaataaatatcttgattttaggcctttgattcaacacaattaccaatcaaatcacctgtcgttttatgggattttatcttttagcctgtaatgattttttgattaacaacacttgtgcaacattaattgattgagatctgtcgtttttccaattgggcaggcaattcaagttgaaaatactccaagagaagaagaaagatgatttaagatggaagctattggtaaaaaaggtggtgtcagctaaaaccatatcttctttgtccttgactaaaaggaggaaagaagaggaccagagagagaaattgggcttgaggggctacaggttgtaattaatcagagtagtcagtgtagtcatagtagaagaagtacttgagaagtgtttttcttttcttttttccaagtgtgaaaagagtgaattttaaatttcacttttgtaaatcgaagtttttcttttaggtaaatctaaatagtaatagtgtggttctataatatgaatcatttgtaatattcaaagagaaaaagtgagaatatcccatcatgaggcaaagaagctaggttgcctcagttgtgttttggtaaagagaaacacttacatgggattaaattactttgtaattttgagtcattacttttgtatgaatgtacatgcgagttgttcttaaataaatacatattttaatattaatattaatttcgtgactccattattaatgcctccaaaatatggtgtttttcatcatcatatgtctcctcacatcacatggcctttacaatatgagagattgtagaggatgattctccactagagaaacctgacaaaagggttttaacacaagaaacttgcttctaaaatggcgaccgaccctaataactacatagaaaaaataaagaaaagaaaaggaaaaaaacaaagtcatatatttgcagcaaactaaatgccacatgtaggaaccgactgttttatgagttagaaagtgtgaatgaatgtaaagaagcatgctgatatataaagctaatcctcacataggccctacttcaccacacacatgatattataactattaaatgccattgtcaaaattatgatcatttcagagctgactgtttcggtgtttcctgtggcttatgtatataatatttttattacaaggtactaagcatattgtaatattgtccttgaaaaccaaagatatagttgaaatggtaaaataaaataaaataggaagacatattatattaattagggatatttgcggcaaaagtccccaaatagttcacgttgatgcagattaatccccaagctccaataatagcggcaatagtacctaagctggactctcgtgtttgtccgttcataccacagccgttagtatgactaacggtacacgtgtacgcataggatttaatagctgtatttttatttatttcttttcaaaattgaaaaaataaaatatttttccaaattaaaaatttaaataatttaatttttttaa

SEQ ID NO: 379597 - DNA, 7984 bp, Cannabis indica
tccaagaatggtctctccaaatttactaccaagttcccaagaatggtctctctctctcgctctctcctttacacgtcactcacctcgcctttattcttgtttttttttttgagactaggatgcccgcctaatcctacaatatttggggaccagcaaactatagcaattgctatgtaactaatgtaagtactcaaagagggactcgaacctcagaccttgtgggaacaaaacacatgcctgaccatttgagctacctctcttgagtcacctcccccttattctttctcctcaaatgggtgtatttcaccaatggtctatcaaaaagatacataaatctacagaggtagaggacaaagccacaaacataaaaactaaaaaaactacatcacatgctaggggcacaaattaatggtatatgaacaaaagcaattcatggacttaacaaaggaataaaaagttacagcataacagaatctgcaattaagaaacttacctaatggcacgtataatggtaagctgacataatcaggacatgaacctgaagaaactctgtcattttgagttgattcagtcggacagtctcgaggctgcaccaaaaacgaggaaaagtatttaggataggaagatgttgagaatcatggggttctatcttaaaatcaattggtgataagtagagtagtccatgttcttatacacggttcaatatttggctcaatattttacatttattcaatgttagaaggaaataatttcttccaaaaaaaaaatacatcatttgactgtttacaaaactagattaagggttttgttttgttgcatatcccaatctaaaacatcccaatttcggagttgaaaatgcttaagccagaatgaattgaaaatcttggcagggaaggtaaaataaatattcaaatcaacataatcactgagttaattaagggtacaatcttcaccttaaaatctttgtaaaagcatagacgaagttcgtctatcgctccatggttgcaaaccaaccatggggttgcatggaaagaattctgaattgcagaaatgacacccccaagtggatatttttcagtattagaagccacatatccttcttcattaaggattctctgggaaaaatgttgggcaaaatattattaagaatgagtaacatgcattgagtgaatattatacaaggaatgttaagtgtaaacaactaataaggatgataaaacaatagattatgtaaccgataaacggttttaaaattccatatatttctacaaaataacttgaattcattcaacaatgtgcatactctatagacttatttataaacaacccccatcactcacacgcactgaaaaagaacaaaaacttgcctataagcttcctttccaaatcaatcaaatttcgtaatgtgagtaacctatgaagcaactaaatctcgtaatgtagagcagtcaaccttaacaatatactagacagcttctattcatgaatcatctacttaagagtgaaggattttgagttaataagttttctttaaaaaataaaataagaaagatttgatgacttgaagacttactgtgacattgtatttgaaatagagattaagggtcgtcaaaaagtaattgtattcatcccaaacaactggagaggaacaagtcccatgcttctctgcaagtaacaatacataaggaagaaaatagtgatattattgaaagaatcaataaaagaactcacactcaatatgattcatgagaagactatgttgaataacacactccatatggaagagaatgtactaatgtataacaaaaacaaagcactaataaaaccagaaattagttgttactatcttaatgatattacaaagtgtatttagacctctttataaacacttcttttatgttatcatcacttcctcaatggtattccacaaactttgatagactttcattcatatgtcttaaaacaactttttgaaacacacaagccttaactgaaacatgtaaaacgctatgataagaaccgaaaactccaaactcaagaacacgataaaacaatagccaaacactagaggtgtatattgatattatatgtacgagtaaatcaattccaattggtgggagcccttaagcccctttgatgcaaagagtgatttattcaatacattgcatacaaggataaactcacataatgattaagctagattgcatacatgaaagaggtcaaggattcaaatcccaccaagtgcactctttttgtctttttaagtttactttcgcccacctatcttacaaaaaaaattacacccccttcgctctaaatcctgagtccgccactaattgcatacccccaataatcttttactcagctatatatatactaatttcttactcaaaactactttcccaaacaaagactcatttacccttttatttactctattctagcacaccatatttatcctagggcctaacacactattattttccccccgaactagagcagtgacaatattaaaaaaaaatatacaaaagaatgtaaagcttaagcaagctaaagtactcttgacagcaggcaaaatttatgcacatatgtaaccctttaacattaagataaggaaaataaaatgaagagaattaccccactggcaatgtaatgcatccaatttggccatcatagaaacagaagatgaataaactgttagctatgtatgatagtgattaagaaattaggcatgaaataactttaaaactaatgactacctcatgagcccagaatgatccgttactgccatcacaggtgatatatggaaaacaaccataagttggccaatacttctctaaagcaccaagtaatgttgaaacctacaaaaatgaataaagaggatttagtatggtaacatgaatagaggtagtacttgggtgacaaaagaatttgttaactgttgaactgaagtaaaagccacagtactatgtacatatagcagagaagagaccctttggaagggcataacagataagatgttctttttggggtaactaactatcaaattcagtcattgaggaaatacatatgtatgtaaatatatatacatgtatacatatgtatatttgtgatcctttgtgtacactattttctcatacatcataatcatagccctaaatatcaatataagaacacaaacctctttctcatcaaaactcttcttggtgcagcaggcaggccatgttccatcattgtagtttggccacaacccatctgccatgcaagcacaaatagcagattaatcaccctacaaccttattggaaagtaacttctaaagagcacatttggaaagctacagtgtaattaaatttttgtgtaatttaaagtaattgaggggtttcaattacactctctaattctcatggcctccataagaattaagtgtaattacactgtaattactaacaaaattccattttaagtataaactattaaaaactattattttccggtgtaattactatctgttttgcaaaacaagatattagaaattcatatataattaattccaaacacacctagttaattgaaacttaattgcttcaaggtcagattactatcatcataatagatacattgctgggtggggcatctagtagtgcaagattaccggagaacattgtcttatagattattaaaaatattgagtcatatattatataagaaaaaaagctactccactcatccactcatcaccaattaccaattgattttgatatggaacccatatttcttattagagtcatatctttccttacacacctatctagatagttagttagaatcacaatcataaattaaaaaaaaaacacttgtttgttgaaaagaaagtatttttttcatgagcacatatacatacatatataatatatatatatggacactaatgtaagaatgcataaacatatacttacggattgtaaactcagttggagcatttgagctgggaaaaaacagaagttaaaaacacaatgtgagtggatccccaaataactagtgtatcatgaaattcacaactaaaagaatctaaaataaaaatcatttctttaagatatttgggcagtaatatcttgtaaaatacgattaaagtcaataactttgagggtcttaaagagaaagatagatagatagattgagaaagaaccctcggcagcaagcgttggtggggcagcaatggcgggactggcgacaggaggtggcaggccataggtgggagaggacgaagtacccaaagtctgtggacttttcttctgcttgtacggatgaatatgataatgggattataagggatagggttatggttagggaagccattgatacgataattaaaaagcttaatttgggggaaagagaagccattgattcactcactcacaagttaatggtttttccatataagaggatttattaaaagacattaacatgatcaaacattaatatataataataataataataataataataataataataataataatatagattagaattgtgtaatttttttaattatttagtcatattaataaaaaaaaaatgataatattaagtatttggtcgaattttataccgtgaatttgtttattctttttaatatataattaaataaattaatatctagttagataactttttaaacgataatttgttaagatatttgataatttgttaagatatttgattgaaatttatttttaaaaaaaatctaacttatttttacttttttggtaaataaatgtaattttaatcttattataattaaaaaaaaacattactataatatataccaactcgttgtattcaaaaaaattcattaaactctaaagtaaaggcatgcaaaatatggcatcccgatcccgacaagtgaagctacttaaccttgctaaagtcaaaagtcatcatgttaacaacaatcattatggtgagattgaagagattgaagttgaagtagagaaaaattttcgtaagtttaaaaattttgatatactcgaaactccgcctttagatcattactttcttgatcaccagccaacttctactttagtttgttttggtctccacaaaaataagtcaccaaagaaaacaatgagagaagagtgggagattttgtcatctcaacttccaaattcgatcttttacattagagtttatgagtcaagatgtgatcttatgagagttgttgtgattaacgaagaagcagcaactaattcttatcaccatggtttatttttctttgacttattctttcctaaaaattacccttctaatcctcccaaaattgtttatcattcctatggaaaatcacttaatgaaattagaagagtggtttgtgataattatatttttaagaattggggttcattgattaaatcaaacaccgaatccccaattctcaatgttcttgtttcgattgaaatttttatttcaaattcgattgaattggaaagaagtagcgaaacaatttttcagatgttgcggtctccattgataggatatgaagattttgtgttgggctattttcttttgaggagtcatcatattcttctcaattataaaactacatttactaatccagatgaggagaattacaaaacattcttcaacttaattaaggcatttgaagaaattggagcatattgtaaacatcactataaatacttagagtcttatgataattaatttaggaatatggattttatttcataatcctacctttgttttagaatttttttttttttggtgggtattttttagtttccaatttgctatagaaaaattactattgttatagttatgttttgtattatttctcaaaccattattaattttgagaacttaattatttttttattttattaaagtttcctaccaatggagcccttgtgatgatctcataatttgttataccgttaatttttcttaaaaaaaaatgcttcacaatttaattaaaataatacttttaaattctctacttaatgactgtgtataacctaggtgcatcaatagatttaaaatataaaatatatatgtcgagataaaaataaaatatatattttaatctcttttttttttttgttagtattggatagcactataatcttaaccaattgcaacgcgccacatcaataccgtattagacaccatattatgcctaataacaatactcaaaagaataacataaaaagatttttctttttttagtgtagaaaacattaaaaacaaaatgttcaatatatacaaactccatggcagaaagctaagctattttttacttctctgttttctgttttgataaactaatgtttgcatattttcaatgatagaggagaacaatggagctgtaatctacacacacctatgtatcaacatttcatatggtgtctgatttatgcaacattttattatacagataaattaagaaaatatccattatgtgagactggttcacaatatttacatgctctcatgttcttcaatagcttcttttgcaggaatccatggaagttttgtttcggcaccatcaaaccctgaatcaaaaggaaaaaacatatggtcgaaattatttgattagagtcgattgtttcctgctataactgattctcaacttcaacacttgaaaccaaatgaaaaacaattcctaaaaagcgaaagtatacaaccgaacaatgtagtctaaaaccgagaggaacttaccccttgaagcgtgcgctggtaagctgacatatttagggcatgagtttcttgaagaaaccgtgttctcactgttaacttgagtcacgcagtcacggggctgaagaaaaaatagaattaacagaagttataaaatttctttatcatgtgaaattaaagaacatcacatgacaaggaaccgaaatggactaatcatccaattacaattgctagtctaaaagtagaatgagaaatatcaagcttcttagcttgttttaataataacaaaaagaaaaagtttaagcttatgctaatagaactagagaagtacttcaatatgatattaggagccgcaaatgaaaggaaaaatgcagtgatatggtgaggaaaaccgacaccataattgtcaggtcaaactcaacgccctacaaacgtggttctgatatggatccttgagcagcctacacattaatctatgatagaatcgaaagtgaattcgttgttggagttttacctcaaaggtcttgtaaaagcataaccgaagttcctctatagctccattttttgcaaactatcaatggggttgtgtgaaaagcattttgaatggctgaaatgatgcctccaacgggatacttttcactatccgaagctacatatcctgcttcggagaggactctctgtgcacagttaaaaaaaaaaatagattatgagagatatacactgattgaataacataaactaagctacaatgtcttctatacaaatgaaggggtcttaggtccatgtaaagatttagttcctcaaaaaacttaccgagacattgtatttgaagtagatatttaggaccgttgaaaagtaattgtattcatcaccagtgacaggagcagaacaagttccatgcttctctgcaagtaagaatgaaaatttgaaaaatagctatggtagtgaaagaagagaaacacattaacatgagttgcaagaagatgataactacactcaatttgcacctttattcaaccctatgactttatggatgtcatgctatggcatggcctcataagttatagtcaacaaaatacacctagataggaacatgcaaaaacggaatagccttcaaactgagtaaaatacactaatgatagggtatgggagcaagttaaattttggacagctacttgggtctttagaactaaacactttgaggacctatcctttttagatttgtgtagagaatggaaaactattgtataggggttgtagatggttgta

SEQ ID NO: 379598 - DNA, 2371 bp, Cannabis indica
ttttttttttttgtgtaatatataaaaaaaataacataattattaagttttaaaaaaaaatacagtcatcagaagtaagaagacgatcattctctctctactctctctactctctctctctctctgatctcaagcttcattctctctcttcgtttaagcttctatgaggtaaattcatcatacacctttcgtccttccttctcattccatctttgatttcaaaacaatctattcactaatttcaatttttgattcctagggtttcgggaatttagcttgaaatcatcatcattcttaatcatcccgacgcttgacttacttattctttcttgcttcgactggtactgttttgtcaatttctgattgtttttattttccttgtcaattcatgtaattgaattttgatgctttagatccgatttcgcaaaatttagttggacattgttaaaattttacggagccggactttagagattcgattgcgatctatgttgataagtttaattttgggtgttatttattttgttaattctttttatgaattggatcttatatgctgagaagatgaatttagatatatagttgatagcagaatataaatgggttaaaggatactgataatatagcttattttctcgtgggttagattggaaatcccataaaatggatattagtatattcaattgcataaaaagatacatgaactgaagaagtgaagtcttttgatgagtaggcatcctgttatttgatacagatatttgcggtttatgtaaatgctgaggatttttttttcctgcagatagaaatcatcaccttaaaatggctggaagagctcaaattcctactaaaagttctgcactaattgccatgattgctgatgaggtatggatgatgtagttttcctgaatgactgaattagttccaaccttattggattttcttatattgacttatcctgaatgactgaatcaatttatcttgtaacttatgtttcaaagaaatctgaatggtagagaagtcctaactcctaaagcttattgatttagttatgttggaagtaagatgtatgtttgtgtcataatatggaagatagaaggatttggctgggtgatgagtcttactgcttacattctattttactcaagatggggctctcttataattagacctttttaagtatttgtacttttggtgctttgaactgtttaagtgtacccatttgatgtcttattctgtgatattgtaggataccattactggatttttgctagctggagtgggcaatgttgatttgcgaagaaagacaaactatcttattgtcgattcaagtatgtattacagatttgtcaatacttgttttgttgaaattttacttcgaaatatatgtatatcttcccattgttggtaactatattgtggactttaccagtcatctttacttttgttcgaacttttttgtacctaagtagaaggacaaaaatgtggatttgatatatctactgtaatcttttaactgctttacaaaagaaagggattgtaagtttttatgaaaatattttattgtaatccccactacaacatggaggaaggttgattaaatccattttccatgttagtcatttggttctggttcttaatctgttaaaataaatagttggaatgataagttactgtaatagctcttcaggaatggctactttaacaacctgaaatcatgtctttactgttttgttgtttcaacatatagcatgactttgatgttaaagtctttcattgggatatttttccctatcattgtataatgctttctccctcttttcccaccacggcaaaacatatggatatgtaggtttttaccaagttggtgaacatgacaagtcagcttttataatgagttaaactaggacaactgccaatgaaggcgttgatttgtggaatgataccgaatatataagtaaagatgtcccatgtcctgggccctaaaatcataaacctaaagtttaacagtagtgtgtagaactaggataaaattaatccttaatttcattactaataatctttgttttttctcagaaaccacagtgaaagcaattgaagatgcattcaaagagttcaccacaaaggaggacgtcgccattgtcttaattagccaatatgtaagttagctgatcaacaatctcaatggtcctaatgtaataccaatattgaaaccattatatcatgttttgcagtggttatataaatttgaaattctgtcatcccctaaaaacattattctgagtggttaattttttacttttcaaaacaggttgcaaacatgataaggttcctagtggacagctacaacacacccatcccagccatactggag

SEQ ID NO: 379599 - DNA, 4542 bp, Cannabis indica
actctatattacgtttaagatgccctcagtgcattcttcataatgagccctacttcacatggtgttcattggatcttcttccgggaatgaagaatcagtagaggattgaccaagggtctgaagcatatatgttacatcagttattgtatccatatagtattttgcactgcttggcttttgtccaaccgtgcaaggaaaaactaaagctttaggggaaagaatattgcctagcttttcactaccaaatatttcaaacatgtcttcatcggatctatcatcaccaatacacaacacaaagtcagctcgcctccctttttcagccattgatgagaatatcctttctgcagtaatccccttactagctccctggaaacaagaacagaaacataatactgtatattagttctactaattccacttagatgagggtacacatttaaattgttaaactcattcgtgaaaatgtaaatttgcatgagcaactaaggcaatgaatcaaaggtatattattcaaaagaaatgtcagtaacttatagctgtctatgaaaaaaatcgcacaaatttatttggactcctaaaactatgctcaaaatgctttgcaaagaaatcaaaatggcttgtcataaaccaagcatctaacaaagcagttcatgagtgataatcttttgtagtaaattaaattctcgttaagaccaaatcagatgacagtacacatagattgatgaagatagatataatcaaaatcaggctgaatatttttattctacttttttcactttatatcacccaacagaaacatgtttcctagcaagtactttattttgaagttttgaagttgagattaagagacatgtacctgaggtttaatctctacaatgtactttccactatttacagcaacaggttcatttgttaaaacactctcgaggtgacttaacatctcctttgcctggaaagatccaaacgttgggtctgcatcttgatattgccaaacgagagaactttccttaacttcaattgaagaaccatcagtagcatcagtatacaatctcaaaacaggttcaaccagatccatccaaccaaattcaaagttttggtaactaatgtcccactcgtcattttgaggccacctaaaatttgagaaattgatgtaaataagattttatagtgaaggccaaatgttatcatagagtcatgaatgattcttctagaccctcacctacaaagagagtagaaaattattgagagagagtaagagaagctcacctgataaagtatccatgttctgctgcaattccaaggttctggcatgaagaaaccactcgtttaagtgtttcttccctctgccactaacaatgaaaactgtattcttttggtcagcacaaagtcttttcagagttgagataacatcctcacttggggggttgttgacggagttttggggcattatagtaccatcatagtccagcagaatgacccgattttctgcattgttataagctgacagaatatcttcagctgctagttttctgaaattagcatcaactgacataactcgaaaatcaaacccaaaaccaataccccaatatgttttcttatagtggtcagcacaagttttgaacatgtcttgcaagaaactacgagaccaataagccacatcatgggtactaacatatcgataatgtttcccatgcctcaactctttctctgagtcactcatagaaatagcttgaagcattgcatcagaagttgcctgaacacaccatgggtttgtgcgaattgccccagagagtgatagtgaacaaccaataaattctgacatcactatcatgctcttctttggacttgatgaagaatctggtaagccttgtctacatacaacatattcataaggaatgaggttcattccatcccttattgctgtcacaacaaggcaatcagcaatgctgcaataagcaactcttttacttgcagagatttctgtgtctattaatactattggatcatagcctggttgcccaaattcttcattgatcctccggcagttctcttttgtttctttcaatattttctccacatttagtcctttacctctggcagggtttagaatttggataagcacagcctttccacggtacttcgaatgttccctgagcatctgttccattgcaagaagcttgaaatttatacctttgaaaatgtcaatatcatccacaccaatcaacaccagtttcccttcaaattgctgtttaagctctctcaaactacaatccttatctgccatttccagcaacaactcaatccgacccatatgaatcccaacaggcataatcctaataccaataatccttccatgatactccaattctaagtatcctctctttaattgataattcaaacccaacaatcggctgcaacaagagagaaaatgtcgagcataatcataagtgtggaatcctataatatctgagttgagcaaagctttgagtatgttctctctaacagggagagttctgtagatctcagacgaggggaatgggctgtgcaggaaaaatcccatcctcaattcaatatatcgcctcctcaacaagtatggtagcaccatcaaatggtagtcatgaatccaaacataatcatttattgggtttagaatctcaaccactttattaaaaaacaccttatttgctgcaatataagattcccacaaaggcttctcaaacggagctccttcatacactgaaaggggcaacatgtagtgaaaaagtggccacaacttcttcttgcaaaatccatcatagaatctttccgaaagatcaggttccaaaaaagtaggaacacaattaaaattctgcaaaagagtccttgacacatcgtcctcctccgaaagatcaacatcaacatttagagacccaacataaagaacccgcgtacctttaggaaacccatcctttaaatgcaaaagcaaagaatcctcattcaaactgaaacaccacccttcgttatcctcccttctcttagcttttaaaggaagatgatttgcaacaataattactctatcagatgatgcttgatcatcatcgtcattatcttcatcattctctgacgatgaaagcctttttctcttatttttcctaagagcagcaaaattcccagaagacaaatcatgaagatttgaaaatgaatttgtcatactgatctcctcctcttgaaatcagtaatcccacaaaagactttcctcacaacaaattagacgggtttcaggcaatctgcaaatgagtcactcagttcttgattaaaataacagtaaacatattcgaactgtgaaaataacacacaacaactaaaaggaagggtttgaatcgacccataacatacaacaacaacaacaacaacctacatatattttaacacaacgcactgataatgacaaactgataacatttaagatcaacatcaaaacgtcattacgaaactgataacaataactatttaaaccataaaaagatgatgaaaacacattcaaacaaaaacccagttcttgaaaaagccctaaccttgtaaaatgaagggtctgtaagtgtacaaaattgataattgagaagagctcttgcatccatcgtctgagctggtcactcttggagccaagatttatacagcattactctacactcttcttgatacttatcattagatatttataaactgtcgaaaacatctaggcttattccgaacacaaataattgtacgtttgtatatatatggaatcaaaagaagaaaatatggtcatggtcatggatacatgaatattcaacacaataaaatatcaaaaaaaggaatatatatagttagtaaaatataataaaatgcaatcaaatatatcaattcagcatgcaagaaaacgtgaagcaaatccaagaaattattgacaattggcagcctgtgacaaatagtaaaaagacagaccaatgaacgttgagaataagttcagagcagctcagtgggagagagcggtgacagacttaacaaagtggaactgcaggtgattttaacaaatccttattacatgaaagggatgaaattggatagtgttggtgagctgactagtagtaggggtaagccagctggactcacgcggcgaataaacacgcgcttagcacgtgactaatcaacaagaaggctttggtctgtatgtacggaagaagcgttactgttacttctgtcgcaaccagttttttattgacagcctggcggattcatcaggagatgacacgtgtcaaaaaggttatttagttggttgactttacagagaagacagctttgacgtggctggaatgagaaaaaacagtgaggcggggacgaacttatcaccagataaagagcatatgctctgactttttaaagaaaaatgtttcaagactaactaggacatttttatatgttaatgttggtattaatttaaaggctaattactaatatttttcctgaattttgacatgtattaaatcgtgtcccctgaatatttttgactgttaaaaattctcc

SEQ ID NO: 379600 - DNA, 745 bp, Cannabis indica
gaatctgagtggttgaagctctgttactggattcagcaacacagtttctgtcggttagatggtggtacaatttaagtacaacagttcaaaagatagagtaaaatgaagagtaccattttgataaaatgattcgatgagcatatatagtgtaaaccaacattaattatcaaaatgactatttttttcaaagaaattataaagaacgaattaaaaggtatatttcgccaaaacaacataaagtaagaagaagagttacaggctaacgagaaaaaaaaaatgctgcaaataacattaattgcaataaacaacacatcatagttgaaaaaaaggaaagaaactataatcaacttgaaaacgagtataaattagctatatgacttcaattgagaaaaattacgtatttgtaattggacaacccacataagttacgaaaaatgacaataatcaagcttatttagaataaatacacggttcaaaagcttagtaaatgaatgattctaccaccattttactttagtgaaattaaataaataaataaagaaagcaaagtaaaatgaaaggtggagtcatttgtggataatcattcgtgtgtataaatcattcaatttaatgagaatggaacaatattatccaattagatcacatatgatgttagatagtgtgtggaaatatttatattgttatatgtaaatatatatatatatatatggaaacttacaaaaatattagaatttagattaatttt

SEQ ID NO: 379601 - DNA, 1448 bp, Cannabis indica
aactttataaagttgaagaaaaactcattttctttaggggcgacacctttatgtcccctctaatactccccatttttagaggtgacgatttgttgcccttaaaatggttgccccttaaaatcaaaattgttatagagtttttaaaacacataaatagagtgtgtaatataacttgaacatgtctataaaaaaaataaagaattgtttggtttcataaattaaaaattattttctctttataaaaatagaaatcaaattttgaaaactaacaaggagcatttgaatttttttaaaaaaaaacttaattaaaacaaaataaaaataaaaataagaaaagatgaaatatttttttttttatttttaaaagcgattttagtttttttgtctaacatatatatatatattattttctcttacatatttgggtctgggtctggggttggggtctagggtccagcattcaggtcttaggttcgggtctaaggtataaggttcaaattcaagttcaagggtagggtcttggtctcggggtgagatcctagttccggggtcagggttgggttcgggtcttgggtctcgagtctcggtgtttgggtttcgagtttgtctcggggtctaggccgaggctaggtttaaaatcagagtctaggtcttggggtctagtgtccaagtctgaggtccaagtcgggtcaggattcgggcccgagtttgggtccaggtccaagcctgggtttgggtcttggtttgggtctctgtggtccggggccaggtcttgggatccaaggttaaggtctggttctaagtcttgggatccaaagttgatgtttgaatccaagtccaagtatcgagtttggggtcacgggttcaatgtcgggagttcggggtctgaatctaggatctgaggtgtatgataggtccaggttcgggccaggtctcgggttcgggtcgagggtaggactgagttcatgtcatggtatagtgtagaatattaaaaaaaaaattagtatatacaaaaatcttaaattaggtttagaaaactttagccaaaatactattaaatttttataatgataaaaaattattttttattcatatattttaaaacataattctgaaaacttaaaatatagagaaataacttctaaatctccaatagatgataatatatatgtatgagtgcactcttaatgggtaaaataagaaaaattttgagtttttatgcttaatttttctatttaattaaaaaaatctctcataatatcatatgagctgagattgttccatcggtaagaaaaaaattcaaaataagttttttagcaagaaaaataagaaaagaaaaagttgagtttgagttaaatatttttgtataaacatatttttgatatagtgtaaaaagagatattttttgatattttttttaattaggtaattaaattaagtatagaaat

SEQ ID NO: 379602 - DNA, 1294 bp, Cannabis indica
cagagatgcatacctttgcatagtacttagtatggtgccatcaaatgaggagtccatgggcttgtggtttacaatcacttgtaaattatccttttctactgggctgtaaaatctaatgatctttaaacttagtataatgggtgtggcgcagcctaatgattatctccgataataattatgtatgacatcttatttgttgagaattgtatgtattatgagctcaatctattgtatcatgaagatttttcagcataagcaaaagtgaggtttatgatgttcttaggcagttaggctctatgaccctgagactttcaaggataattttcaggaaaaagttttaggtgtctttgaaaatacatattttcttgttctccacttattacttttctaattaactaccgtgttataaagattgacaatgacgatccatcatgaatttttataaggtgtttgctttgttcatctatctattaatttatttaagaaaaaatagtgagaagaagcctacttttataggtggagtaatttttttttaattgagtacgtattctcatatctaatggtccatcatactgtattaaattgtcaatttttagataagctgattcaagccgagtggagaaggtgatttttccaccacatacatggaaaagcattagagctggggaaaaattgaactaacgtagcaggttttacaaaatgttgtcgtttgtttacatgaaaatgggtttagttgcagtaaccttctttcagcatgctcagcttgttttcttactttcctggctttgtttgtttaggtaggtaacactcacaagtcttagtgtttggactggcatcttataggcttgaactgtataattttcatctgtcatcacattgttatgtttacaaaaatttgagaactgggaagcctttattctttaagcagcttgtgatattcttattatttgatgcttgagttttgttatatgtgggtggaataataggacaagatttagaacataccgaaggttattgattattcatgtccattgacattagttatttactttattacatttagctttttgtcaaatgctccttcatcatagagcgcagaaagcaaaaagagaagttccggtggtccgagtagggtggaactttgctaggtttacagaatattcaatgccagtgtcagtcaatgcatccataacttgctgaggcaccccaaaaaaatagtggcatttgtaatggttcctcccatcaactaggtgatattgaattgaatagatatgacggtaagtttattatatct

SEQ ID NO: 379603 - DNA, 6047 bp, Cannabis indica
ttttaaaaaaaaattgtatttagcgtaaaatttcaataatagttaacaatgctataaagcttaaatggtacaaagtggataatttatcatattaaaattcataaatagatggactaattggcatggcatcgttttattatttatataaagctaattaggaatttttctctcgaatttttacatgtactaaattatacctcttgaatttttaaggcttttaaaaattctcctgaatttgttagatttaaggacttttgtctaattttagtaaaaaaaaattctaacatatagataaaaattcaagtgacatgatttagtacatataacatgatttggtagatatcaaagtttgtggagcatgatttagtatataaacaatgaaacagtaaaattaaataaaattagacaaaaagtaagttcaagtgcatgatttgataaggaaaaaaaatccaaattaacctttatataaacataaaacaagaaaacgacataatatttccgtgtattgtaacgacgtgtacttggcaaaacgacaaagttaacctataaagtgaaggaattaatcattaaatcgagtctttggtcttttataatagcaagttccaaagtacaaattattgatccctaacttgaatctccatagtccataccatctaaaaagaatctaaacaccacactgtggcagccagtggtaccatcaccatcactgatcacaacgaacgacaatgtttactgtttagctcttgaaaaaactcgagctaatgtccaataataagaaaaaaaaaataccctaaactaaaagaaaaaggaaaaagaatccacaccctgaaagaaatatagtctgcaaatatttacagaaagatttaagaattttaggcaaaccttaacttgctcgaacaaattgttcgtgttgaactgccgaactcatgactggtcttgtttcccggtatttatgaagaattttgatgagtgaacgagctttctttcccgcaaaaggggttccatccaccgtattgtagtaaagtaggtccattagtgaatggtccttagctaagaccgaaacaacttcatctccgcaattgttgcacagagaaagtaaggtcgaaatgcagtgctctttggcggcacgtgaagaggaggactgaagggtgttcttgaatagaggcaaagcagaggcttgaagaatcgaattggctccttctacgttatcagctaaggttgatagaactgacagtgagtctgttactagatcaggtttgtccgagtgagttaaaatgtcaataagtattggaattgttccattttcaataacctttttctggtttttcgggaagaagataagcccgaaaatggcgacgatggcgttcttcttgccacaagctgttcctccctttataagctcaagcagagctgggattgcctctggtatttctcctattagttttcggtactcttttaccgtagagatgtaaaatattattgcggcagctgtttgttttgcttcaaagctcaaaccatgcttaagaacagcgagaatttcatgtaaacccccacactcaacgatcaatacacggccattagggtgcttagacagcttcaacaaccccgaaattacattctcttgggaacaagcttcacttgaagatgacaaaagattcaacagaggaggaattgcgccagcatcgatcaaacaagacctattgttgattttagagttagccagcaaccgaatctcgtaagcagccttgtgtttctgcctctcattgccgaaaacaagcctccggactagaaattcagagaggaatttcatggcttccacggctattcgacaagaggggacagttgtgcccttcaggtctcggttgttccttcccaatttagtaagtgcaatgccattacctgcgcagaactgttgtataagtcttttcaaagcagaattaggcaccaattctgtgttcttaagtctctcccctgtttttggacaggttagatttcctgctttgagccacttttgaatggaggcgcgatcataggtctggccagttgagatagtaaccgggtctgtcattagctctagcgaaatcgggcatcgaaagtcatctggattcaaaaaacttggcccctctaaattcatccttgtatctaattgatcctcttcggcgttggagtttcgatgatgacgatgatgattaaattcttcaaaaattactcctctgctgtaactcatcaatccaaccaaaccgctcaaatacgtaacgtctctctctttgcaatcaggaaactcgtatccaatttcttcttccaagaatctaatctccttattacaatcagaccagtttctgatttcaagatagtccaatacaagcttaatcgatctcaattcaggttcaattcctttttcgaactgagacattatcccgaacacttcctccgctactcgttcgtcgtcattggctagctcaaactttgctctcctcgcttgcttagcaaccaaatccaccaactctttcacttcacccccaacgtcgatcgaatccagaggaagaacgtccagagccgtcgctacagcctgaaaaagaattctgaactgagatgcgacaaacttgcacttggttagaatccatagcctggaaccttcacgggagcaatcttctaacaggaactgaatcttctggaaggtatggtgaatttcggagaggcagaggagcgatgagtctgagagaatcgagcctcggtccaaaacctcctcaaaaaagacgaggagtactccaacctgacgaatagcttctctggcgtttcttctctgtgatgcgaagagcttggagtggaaatcgcatatagcttgggatagagaaagaagtgagcttagcagagtcccctgtgaaattgcttcgcagggatgaaccgccgggaaattcaagctccggcgatcattctgatgagacctttgaatcattgaattgagaagaaaaaaaattctaatgtttcgatactttgaagaatcgtaactgaatgaatctgtatgttaagtagttacgggttcaggtggcacaagataatatcaccaacggtggggcctacctatgactatgaataggtacacgtggcagccactggtacggttgtcgtaggtgaattttgaccgcgtgaagactcagaagatgaatggaaacagggtttcagcgcgacacgtggctggagacacgtgtggtgtttgtgttggcttttatcaggtttcttggatcaagtccatctgtttacagttagtttggattctgtaaaaaatatcgggttactgttccaagtcatacggatactgtgtgtttgttatttaagcttttttattttcgggttttagaacaatgtgaatgtggtcgtcgttttttttgttttgttttttgcttttaaatattttgaatttgagtttgagataggagaggaaggaaggaagtgacgagttttgtgggacctagtaaccaactgggacacgtggccgagttaacggatgactcgttacctgggtaatgggttctgttatccgagtcagactattcaatcctacgtaatcaatggctgacttttattttattctgtattattattttttttggatgatttttttttttttctttttttttttgtaaattgccgaaaaataattgataagcaaatgaaagaacttgattatgaaggtagaagataaatgagtagtaatggtcttttttttttctttctttctaaagaatattgctttttaataaaattgatcaaaagaaatctaattacaaaatattttggtttctaatagttgtttggtcaaatatatactcgtcttctgaagaagttgaaaataaattaaacatatacggatttgtaaataattttaaatttgtgattttttttgtttagttgtctttcttcaaaaaaaaaaaaaatttaaataaattcaacaagctgtttggaatatatcatatattttacttgtttcgctttaattaatataggaaaatgattttttatcttatttttttttaaaaaaaataataataaaatagataaataggtttgtatgaccactcaacattacatatagatagataaaagatatagatggatatatgcatgactattacgttgtgtccaatatatatattaaggaacttaaagtgtcttctaaaaaatcaaaaactgactatggagtcattatatatattggtattgattaatttatacgaatatttttataaatatatattcttaaccatttattaaaatatttttctgataaatttaattaatatacttatttttttaaccaaaaaattaaactttattaaaacaaatcaactactaagagagcttttaaaccagcagggacaacaccccgtgggaaacacagcaaggaatagaaccagaaaagcgagctaaaaagttaggcgcctggttcccggaccctttaacaaaactaattgaaatacgaaacaaaatagaggattgcataagagcaacacaatccgaaattaaatgtcccaccggagacaacaaacgcttcttctgttgcacggctcgcaccaacagcagcgagtccacctccataaccacaccaacaggcacacctccctcaacccacctacccttcactcaagtgagcgcctccttcaacgccataacttcagccaaaaacgggtcggactgaccataagtactaagtgtaacatataaaccttacaaattaatcacccttttattaaaattacttgcaagaattatacctaataaaataattcacaatatattcaaaaaaaaaataaaataaaataattcacaatgaaagattaattactcagccgatcagtcttattgctaaaaagtcaaaatagattatgcagcatatatatttagagtacatatatatatacacaaacattttgtactatatagacattaattaaaattcaaaggagaagtatgatcatgatcatgatataatgattatataaatttatatataactgaacgcagtgattcgagacttgccgacacaaaattgaaaaatacttaactacgacgaggcaaaagtagtgagaatcatgagtatttgttctagaattttctatttattttctacgtacctgatcttaataaaagtcattttcaatccaattaatacttgcctggatcttaattcatgtaatcataaattaattactctaattaattgtggccacgaacatatgctaacaacgcaaaagatttttcttcgacgccatacaaaaccatgatagtgatattgatcatatatcaagtaagttagggcttaataataataataataataataataataataataataataataataataatgatgatgatacgtggaccattcgttgccagacatgtttttgaaacgcgtttcaattaaaaagaaataaagaacctttcatgcatatttaattattttaaacttgtaattaattaggctttctgatccaccaaaaaatcattttgttattattattattataaatataaatttgctttttagtaaactaaaagtggcgtatccactactagctggtcttaggaaattccaagaacatttttgatattaacccgaaaaatttacaaagtaatatcttttagattttatagcatatggtcaatgtttgtataatttattatgctgttgtaataaaatagtgaataatttatatacagctttcaacacctgtcacatatatatatttgagtatttattatattagttatatttgtaaaaccatgtcagcatgcaaatcagtgaatcacccttttgttgtagaaaacgacaccagtttgcttttacaagtaaaatggataattacttctcattattttaattatgtgattaaattaatgtaaatgtaagtatatagagttataagcattagtataaattgttataattaatgattaacgtccacgcgttaccaacataaactatatacatatataataattaagtatctttatatattaaaagtgtctatctaacggcattt

SEQ ID NO: 379604 - DNA, 4847 bp, Cannabis indica
ttacaaaaaaaaaaaggaaaaaatcagcttagtgtactattttaaaaaatttagaattcaatctatcatttaataaaataaaaggtctaattcgtaacttttacagtgttagtgtgccactaaggctagcttagtggtcagggagggatgggaaaaaaagaaaggtcctgggttcgaacgcagaatctttaagttattaagctattatttgattgtaaaataccattaagctatactaaaaaaaacagtgttagtgttgaaggtaatatttacccaataattaacaaaccttcaaccaatccaactatcaatgcatataaatgtattatatatatacatcacagtgacaatgctaatgacaatagttttacaatgaatctaataattttcatactgagaaaattcactaggattcatgtgttaaagaaatttaaaacttaaaagagtctaattcaatgtcagtgatttttttttcttttatgtttatgtttatgatctaagtcaaataaattgattgtaaatctctatgcacaaagtaaaaaacatgggcaaatgtaatgttgacagaattgtcattatataagatgatgatcaaagtaatatatataattatatgaattatgaggagacttagacttggtattgaagagaacaaaaaacaatacccaatttagagagttagggaagaagtggtctatgagacataataagacataaattagtatatagaaaactaggcctagtaaagatcttaactaggttggttgttggactatgtacacaaatattcttcattttgcttaaaaatgaaaaaaaaaaattaatggtatggtgtcaaatgtcggttacctaataagctaatgtaaaaataaaactgtagtcgtagacatagcctagtaatttcacacctctcagaaatctagaagaaaaaatatagaaaatgaaaaccgaagaggctaaacaagaattgttcatcaaggcaacgaaaaaaagtcaggataaatcattgaacaatggaaattttattctatatcaactttggtcatttcaatattaggattacaagaactagactagtcacattctagctgaaaaaggaaggcgaatttcgctcagtcaacaaaccgatgatcttacctgaatagaggattacatgttgagctatgagtgatacattaacaaatgaatgaataagctcaatcaaaccgaatttagcattataaggatcggttggcttgttggtaccgttaaatcacttcagaggcttcataccctgcaaaaattacagaaaagttttctgttactgctttagatttttaaatagtaattttcagttcttaaaacatgtttttaggcaattcacagagttgtaatcttttaggtagagggcttagaggaaaggctagtttcactaaatagggaaaatcacactgcaaataacagactgtagatagatggtgacatgaatacataagcattctaaccttggatgtccttaattcattcactgccaatcgaagagagtcatcggatagtatcaaccgagatagcgcccctgtgcttaaactgcaatgacaataatgtttcattgttatctatctaggcctttaaccatattttcatcggtataatatgttaaatacaagtacagaattgcataccccaaatactttgcagcatcagctaccgaaccattaactgcaaaaattagatccaacagcgcttgcattccctgtaagcgaaaagaaaaacgaaacaagaaagaattgtatgagtccttcataagacatactagacataaaaggaagaaacagaaaagagatataatcaatgaatcccatacaagaacaaatttgggatttttgggtccaatttgggaaccacaatctgatcctctaatggtggattttgctggaagaatttgaagcagctctcgaggaggtgaatatgcttcaagatccacagtattcctcactagcttaacaaaacaatagtgttgaataagaaaaatgacaaaagattatttataagtattcaaaattttaagatactaatgatattagtagaattataattttcttccaattcggtctagattctggaaatgtgtaatattaattacttctaaatcttctttagccaaattctaaaacaaaatctggttacatatttaagatactaatactgcaactgaatgaaaattagagttttacaaacattaattacttacgacgcaaaaaaaccaataggtacttatactgcaaatattccaaccgaaaatggcatacctttgagagccaaaagagtacgaagacgtgtcacagcagatgctcgattcatgtgttgcgatcgatcctcaacagcctggtaagaaattaacaaagattaaaatttgaaactggaaacctcttgttagagagtctagtatatcttactatacacctcaccttattctactttctccagcatatccgattaaaaaacaaaactttaacgagtattctattgaattgaaaatgcaacaactccatatatatcttactatacacagcccacttccatcaacattatatcatatcagattcaacaactccatatatatatatcttactatacacctcactctattctaacttaacttctacaccaaatagatgaataatcaatggagattgaaataaaaatatacctgagcaatgataccagtaggaaggtgcttaagcctaacagctgattctctcttgttcctatgctgacctccaggcccagaagacttgaaagtgctcatctcacactgacccaaaagctcttgatcactcaattcaaggaatctctttcctgttttagtatcaccaccattgtcacttgattccgtactagaaatggttccataattcgagcaccgtagaatagggaaggagaaggattctcgttttgagatattccctcttcttacatttaccagtaatggaggaaaagacaatgacgaagaagaagaagctatgaacaacgctgccaacctccttgcggtactaaatccgaataatccaaacaattttcgcattgatagaaactcagctgctgccatttttgataaaagcacgatctttatctttgttcgaggaaagagaaagtcgggggagttagggttttcagtgagtggaaaagaagattgaaattaaggaggaattaagtaagaaggattgtttgagtgatgaattcgccattggatttggttttcggcgggaaaagagaaaagctttcttcttctttcttcttcttcaattggtgctgtgtaaggcggccatggatggaagctttcttaagttcagagtttgataatggaaatgatgaaatcagtggatgatgataatcacttgaaaaacgacaacagatttggaaaatacgatattaaacgacattaattttataaaacgacatgaatatagaaatacgacaacaaatttggaaaaaatcgatcttaaacgacaccaattaaaaaacgacattattttttaaacgatatgaatatataaatacgacaaaaaatttggaaaaattcgatcttaaacgacaccaattcaaaacgacattcatatcaatgaaacgacaaaaaattagaggaagatgataataaacgacaccgattgtaaaaaacgacaacaatttgagaaaaaatgatataaaacgacaccaactgagaaataacaataaactgatgaaacgacaataaatttagggatggatgatcctaaacaacacagattgtaaaaaaacgacatacatatggaaaaacgacaaaaaatttggtaagcacgacataaaacgacaacaattgagaaacgacatttatttcataaaacgacaactaatttattgaagataatacaaacgacacctacttaaaaacgacataatttagtataaacgacaaaaaatattggagaaatgattttaaaccactaaaactgagaaacgacattaaatttataaaacgacagaaaatttatagagatcatatttaataacacttgattgtaaaaaacgacataaatatagagaagcgacaaaaaaatggggaacagtataaaacgacaccaattaggaaacaacaataatttgataaagcgacaaaaaaattctacactaattaagaaacaacattaatttgattaaacgacagaaaatttgagaaagatgtcattaattgcaaaaaaaacataaatatagaaatacgacaacaaatttgggaaagcactacattgaacgacattaattgataaacgacattaattttagaaaacaacaacaaatttagagaatattaaacgagacggattttaagaagtgggaaagaaaaaccaatacgatataaatttaaaatacgactttaaatctttaaaacgacagcaatcttaaaatacaacaataaacgacactaatagtacaaaacgacattgaaatgtaacaatctatttagctgaaaacgacatcaattgaagaaataaaaaggatgtaaattgcataatttaaacacttttgtttacaaacgtaattcatttgaaaatcttgttaaagaacattttcacccaaattcattagaaatgaaaaccttttccaactttgtaatattcaaaattattttgctctaagaatcaaaatacatttaggtggcgtttggttggaggtaatgaaatgaaatggaaatatttttattccattcctttgtttggttgcattttaaagtattggaataccattccaatggaatgctctttccatcattttggtggaatgactattccattttaaaaagaaaggaatgatcattccaatgtaacaagaaa

SEQ ID NO: 379605 - DNA, 2695 bp, Cannabis indica
ttatttatatatatatatatcaagttcatacgctcattgaatttcacttgagcatttgttttcacatattcctcaatctctcactcattccttctttcttcgaacaacctctaactaaaattgaagtcctctccaccttattgtattctttcattctaactaaatgccttctgtgacttaactctacctaaaatagtcttccccactaatttatacaaattatactttttttgacccttcacaactaccaagccatctttcttgatagttatttcacaatttttcgcagaatagtcataacaacaagtatccaaagctcccaaagagattaagctcatccttaatgatgtaacatgtctcacatcagtatactcacaaaaccatcaattatcttcacgttaatagtacatattctaacaaatttagagctacaatcatttcccatcaaaacaatactaccatcatatgccttgtaagtatcaaaacactctatatttggatacatgtggaacgaacaaccaaaatccaaaatccaagagtcaaaaaattttcaccaactatgacaaatagaatattagagttactatcaaagctttcactaacaacagtggtggaatatgatatgtctttgcattcttgattcctcattagttcaagatgcttggtcacctcttcacaatttcccctaacatgtcttttttttgtgacagtagtcgcatttcacttctctctaagaacgtgaatgagcgcgattgtcttttttgtcatcatgccttcttttcgatgtactcctaccacgacttgattctgatcttgtcacaagagcttgattagtatgagacatactacttggttgcttgatactatttatctccaaaagagcagctgacacctagtctttccaactaaaagtgtagtcactaatatctcatcatatgattagattgatcctcttcatcaattttgatatctacacttaataattgagttatgcacttactaaatctatttatatgatccctacaatcatctccttcaataattttaaactcatataattgcttcctcaaatataatctatttgtttggaattttcatatacaaagtttttctaactttttccattactcaaatggacatatttcattcaatacaatatactttaattcaagagccaaacttaagagcatagtgtttacccttttgcttgaaactccccccaatcttcatcagtcatactctcatgcttgaacctccccccaatttcattcaatacaatatactttaattaattcatgtcctatgccaacaatttttaatctttttgtagtgcctctccacgattgcacatggtagttgtctttgtagcatccctgaacttgattcgaagcaaccatcactgtcccttctctaggatgtctagtattctcacgaagaagagcaacccagtctcaacttcgtctcagcctactgatacgctctaggaaaataactagctgaacgacatcttggtccaatattctgaccatctcggcccttccttatgcctaaaacatcactaggagcagaatattcacgcaacaccttgacgtctcatagcaaggtcagccttcaaaccatctgagtaataatggcctcattttttgcgtgactgtgtgcctcatgcacactcttgttccttgaaaaactctgactgagtcatctatgcattgaggctctctagctaagacactcgcactatccataggttctcattatgttaaaagaaatcctaacaccgtcgctcacctagtaactcatgaccaaggtagcatgtgtggccagatgcaaataccaagatgacgtgccaatacctctagtcatgacccattcgatattgttcaaaaaatctccctcatggaccaaggagtctcatatgtccacagtccaatcctcaaggctacatgcctccatgcatgtcaggaggtcctcgagataagccactaaactagtagcatatgttagatctttgactttttctaccatggtgcatctatcccatgcacgcatgaaaattttcccataaatgactacttgtgtcatctcgtgttaagactcatggccaaggtgaaccataacatctctcagaggtttaggccacgttccatgcaagtgacatactagaaagccaaaggaaacatattggctaatctctaacggcatctttagacgtactaccaggtcggcctgatagtgtttgtgggcatttaactcatggagacatgtgagtcctcttgtggtccttatatgtctgccctactagttctagtgactagtattagctcacttagcaccaaggtgccatgagatggtagagagctcacaccaggttctcccccttaagaagcattatatgtatttagccttctatcgaaaatatatataatttttactctatagacatatgatcatcaacatatatcgattcttagagtttctcgaatttgattgtatcattgtatttctagacccaaataaatggcaaacaccaagtctcgtcttaatccaagcattatttaagatatttacaaaaataccacgattatacaaataatgcattataatgtcaccaacttgcacaccaacatgcactgtcacttcaccacaacttgaccaccttgtgagcatcacctaacttgttgttgggttttatgcc

SEQ ID NO: 379606 - DNA, 2544 bp, Cannabis indica
gtggaaaagcaatttaatttgcctataaaacaagttcaggctgatggaggggagaattcagaccttttgaaactttcttacgagaccaaggaatcaagtttcaactaccatgtccacatacacatgagcagcacgggcgtgttgagaggaaacacaggcatgtgactgaaactggtctgactcttcttgctcaatctggccttgatatgacatattggtggcatgcttttcaatgtgctgtgtactccatcaaccgaatgcccacatcggttcttggaaacataagtccatttgaatgtttgtttcataacaaacctgattacagcatccttaaagtgtttggttgtgagtgttatcctcacttgagaccatataatcatcacaaattggagttcagatctgagaaatgcaccttcttgggctactcttccaagcataaaggctacttgtgtgcaaattcagcaggaagaatattcatctctcgcaatgttatttttaatgagactcaatttcctgctcaacaatgttcttcctcatctcaggtacctcctactcaccctaatatatctcctacagctcaattttttaccaatacaaccaataatatcactcacttgtcttcctcttttgctgccaatgagtcctcaccctctgctgcatcaccatgtcataccagtattcctactggttctgctccagcagtacaacctgctgcatctccttctgtggattctggaacaatggtggctgccacaattaactttggtgatgattccactcattctctcccatctgcaactgctgctgtgagtgataatactaataatgctgcaacttttgcaaatggtgatgttcatactgctttgagtaacaatgctactgctgcccctccaaggagtcatcctatggttacaagatctcaaaatgggatttacaaacccaaagcttatcttgctaccaaacacaagttacccgaatctctcttaccaaaggaaccaaaatctctcaaagctgctctaaaggaccctatttggaatgcagcaatgaatactgaagtgcatgctcttaaggctaatgggacgtggactttagtaccttatgagtcacatatgcacttgattgacaacaaatgggttcaccgaattaaactcaaagcagatggctctgttgacaggtttaaatcaaggcttgttgccaaggggtatcttcaagctcctgggatagattatgctgagacgtttagcccggttgttaaaccggttactgtccgattggtccttactcttgctgtctcctttaactgggaagtgagacaattagatgtttctaatgccttcctaaatggcatcctacaagaaacagtctatatgactcagccgcatggattcgaagactcctctaaacctaatcatgtgtgcctattacacaaagctatctatggactaaaacaagctcctagagcttggaatgacaaacttaaatcaacattacttgcttgggggtttaaagcttcgaaatctgatacttctttatttgtctatggctcgggtgagactctccttatcttactcgtatatgtggatgatatacttgtaactggacctaacacttcattaatcaacaagctcttacttgatctcaacaaccactttcaaatgaaagaccttgggcagctgcattattttctaggtgttgaaatatgcagaaacaaagatggtatgttcctttctcaaagcaagtatattgctgatctcttggtcaaggttcaattagatggtgccaaagcttgtgccaatcctacaagttctgctcataagttgtctctatctgagggtactccttttgaagacaaaactttataccgtagcactcttggtgctcttcagtatctcacgcttacaagacccgatgttgcatacataataaacaagttatctcagtttttacatgctccaacttctgtccactgggaagcatgcaagaggctgcttcgatatctcaagggttcaatatctgaaggtttgcacctaaaaccagttgacaggatgtccatttcagcatactctgatgctgattgggcgagctgtatagatgatagacgctcaactggtggctatgctgtcttccttggtccaaacttgatctcctagtcacaaagaagcaacaagtcgttgctagatcttccacagaatctgaattccgtgctcttgaatactgcagcagaaatcaaatggatcaactctttatcctctgaactgcaactttgttttgctgatatccctgtcatatgggtcgacaaccaaggtgcagccgcacttgctgcaaatcctatttttcacgcacggtgcaaacacatcgagattgatcagcattttgtaagggatcagcttcttaacaatgaactatctgtcagatacgttccctctgtcgaccaagtggctgacattctcacaaaatctcttccaaaagataggtttcagtatctaaaggccaaactcaaagttgtaaataccccttttcgtttgaggggggatgataactaat

SEQ ID NO: 379607 - DNA, 1518 bp, Cannabis indica
ctctctctctctctcggttttattattcattttgagcaagttttctttgtctttgtgtttttgagagaaaaagttagagttcatacttaaatttctagggtttggcttctgtacaagctgagtttattttgttgagttttctgctaatgttttatgattatttaagctgtttttaagctggtttagctgttaatttggtgaaaggttaaaaagatcaaacttaggtctttaatggaaaaatcgaatctagggggttttcttgcaatttatgggtgttttatgtttgttgtggcttaattaagtattctgaaaggtttggtatgatttagggaaaatttgagtttgtggtaaggttcttagggttttctccagagaaccggttaactggttctatagattatcctttcttcactcttgtagaatcttgaaggagattaattctacatcctttacacttatccccaagagtaagtgttctaaatctgtaagtgacttttggccaattgcttgttataatgttatataaagtgacacgaaaaatgatttgctccaaattaaagaaagtgtttcctagcttaatagctatgaatcaaggtggttttgtctacgggagattcattgcgcataatatcataatctatacgaatcttgacactatggaaggaaaagtttcaagcctagttgtatgatcaagcttgatctcaagaaagcatatggcaccatggaatgggattttgtagaggagatgcttgaagcttttatatttcttagtgtttacaacaaaagtagttctgatgacatggatatcgatatttgactcgtgacaagaaataaaacattccctaggtgaaggaactcgagtcatggcagtcaattgggaaaaggtccctagccctgtgcctaggttgactttgaggctttggaatgggtatttggatccatccttcagtattctgaataatgaagtcaagaggaaaccaagactgaggtttggaagctaaaagtacatgaaacaacaccctaaaagtcaatccgaacgcgtcgggtttcacccagcgcccaagttgacattctaattaaggttttggaatctaggaccgtcttagttaaaatgggttaaaatttgtactgggacatgaattagacatgtcacgaacatatttgaggcatcagaatcagatttggagcactttcatttttgagcacccggagcaccaggtgccccaggcacttggcacccaggttgacacattgtcaacctaggtcacttccaagcatcaaactaaagaactatctcgagaatgttctttgtctttatcaaaaacgaggaaacaagtgtgtttgaggaagaaacaaacaattctaggagccagaataaggtcccagtgcccaagttgacattttgtcaatctggaccattttcaaggagtttttttgagaattcaatagggcatattctccgttgttgtcaaatattaagacacaagtgtttttgagaatcaaacggaaccatctaat

SEQ ID NO: 379608 - DNA, 1125 bp, Cannabis indica
ttgagcgttgtcaggtccgtctaaaaaaatcgacacggcataaggggcaagttctgtggttcttgagccaattatcaatgcaatctgcatggaatacgtgatcacacttgggaataaagatacgcatttttttcatggtctagtaatctactcatacaccaccccacaattatgcgtttcatcagtctcattaataccaataattattctcacatccgaataattaattgtcgggaagtgcttatcaagttctttctttccgattcctcgttttagggagttgtagatggtgcagattatcaaccccataaagatcatccctaatatgccgatctcgattaaaaagataatgccattatctgatcctcccttactttccggcggttgaacttcagtagtactgtaggataacactgccggcaacagaagtagatgtacaaaagtaataaagaccatctgcttttcccatttgtacaaccaccaagaatttgagtttgtagtcatcatcttcttctggtttgagtttctggggttcgagggtgattgagaggtttcgaggtgtaaacaaggaaattgggtcagttttttgttttcgatctcatgacctttgactgaggaggcagtatttataatgatgagcctgagagagagaactttgaagaattagttacaacattcaacagagattaactaatatattcctaaaccgttggagaaaactgtcgacttactataactaactccctaattactgacgtggcaactatatacaaagacataattcaagaaacaaaaaagaacgaaaagacttaataataataataataatgacgtgtgtagttagtgtgacgtggactccgtggggtcaatgttactcattcttgacttgagtagctagtttagttttagtccttaattactattccgtgagtgcctgtgtgagcagtaaatcgtaaaattgggacggttaattttgttgacagctagtaaacaaaagaccaaagtctttaagcttaattgttttgttattttccgttctttttttcatataaagtttttcaatttcgatgcaagctagaataatacactaagggctcgtttggaacgccgtattaggtcgtattg

SEQ ID NO: 379609 - DNA, 2929 bp, Cannabis indica
gtgaccaaataagcctatcttgtacgatgaaaacaagaaacaggatagacaagataacactagcttccatattatcaaacgatattgaactaaagaggagttccaacaaccaggatcaagcttgagatcactaaccacttgaagatgagagctaccagagaacaaataagaccaacacagtccttcgaaatccaagcatcctctctaacttttacagattcccttaaccaacaagccaacaacatcctttttcaaaaaatcacgaccccataaaatacttttccaaaagaacgaggctcgcttcatctcttcaacatccagcaaaagaaccattactataatagaagcccttcataatatgttaactttttataattatatttattaattttacaaaaaaaaataaataaaatattctaaaagctatattaagaaaacaataatcaaacactttttgttatttgaaaactacaaaaatcgttttgtgtttagcaattttttaaaaaacaaaaattaaaaaataaaacatagaatatataatcgccacacatgcctggaagtcatttttcatttctcatattcactaggtctcacttatgttaagaatgtcgagtgaatcttaaatatttcttaaatattacttcgcgagttcacacttatttttgaagttgtaagaacattttggaagacttatgagtcactcacaaatatagttaattgcaccaaaatcaaaatatcaataacattttcttgttttatctcattaatcagttaccggaatttgaattatattcttaacatattaatcaaataaaaaatcataaaacttcatgatttcaatagattttaatcataatgggagagcgctaatcgaatgtatcatatacgcaaaatttctttggtatatcaatactctaccaaattgtgtgctcaatagcttgcagagaaaactcgatagcacaatatttgcttctaagagttaattttcacttttaaaatttttgtagggttcattaacatttttatctacgtaacacatactatacgaaaatgggcttttattgtcacccaattacgatagtcaacgttgttgattgtcattattgaggatcgtatctctatatggcaatagttaattactgtcaaaaaaagagagcaagtggcaacaatagtaactatcaacaagtaaaaaattaacaacgataattattaaccatcgttgatgctctttagcgacagttattaactgtcaacaaaacgacatacataatcaacacaagctatggcaacaactattgtattgaccatgtttctaaatatattggtgaaacatgtttttggcgtaataacaaacttgtcgtttgccctatttttgtcgttaatcgaaatatggactacaactataaaaaataaaatagatatgtctaatcaaatgtaaactatatgattgtaaatatatataataatgtatatataaaccttttgaaccccaagccttagaaaaagatgtaaaaccaagtaacttttcattgaatataattgatcgatattcatgttaatgttctagctatagttcgtacttattaaacctagctagttaataagccaaagatgattatgacaactaaatttaatgttgccaaccaaaaaatcttgaaacttttggtataccccttttatatatccccttatttggatccaaactagccaaggaataaagttttaaaatacacataccttttttcaagcaaagagagaataaaaataaaagacatgcatagagaatctaaccccagctagttgtaattgatgtaactagctagaccagttgtgaaccaaaagaatatgaatacattaacttgaacttttgataaaaaaatatatatttatttatataaaaattatacgttgtaatcatttggcatattcttattttatcgtgaattaatttattcgagagagtgatacatatacaaaggttttgtattgtagtgtgagtggcatgatcatatactttgatttgataacgtaggtaccaaattaaggattggagagtgtgacttatatatatattatactatatcacttttttggtttggtgcatggttggagatagagggtctcaaaatttaagaaaagaaagaaagaaagaaaagtatataaatatatatattaattaaatgttaattgataattaatcacgacggcaccatctcatagtgttattagatatgaatgataccaaataacaattaatcctgtaattcttacacaatatttactagagaaataacaacagttactatttgtttcttattttacaaattacaaaaaatttaacgataatgacgactcgaccctaaatataggcagattagggcactgactattgaggagtgaccatgcatttaaagtaacaaagcaagctaattaagtaagtaaaagtaacccatgtgtttgtgttgatgagcctcacaacttgcaacaatattactgctgaaataaaggcaacataacgtaacataacataacaacaattaccacttggctgtaaataaacgtgacgtaatgaaccaatatttcaaaattacataataatactatatatatttgtgatgatgaagttgttaatttatacatgtattactctatataatttatgatgataagaatatttattttactaacgttattatataacatttatggacagtttattatatgttatgttagagaacaaagtcacgctttgcataacatataataattttaaattatatatttaatatgtatatatatttaattgtttgatgtagtttataaaaataaattaatagtatatatatatatctattctatataaagtgtgcctatataaccgaatttttggtttatgagaaattcatgggtgactttttatttatattaa

SEQ ID NO: 379610 - DNA, 2216 bp, Cannabis indica
ggtttttgaattctgaatgacatttagattaaatggtactattcgtattataattcttaatacaatttggttctatttttgcagggtcaaacaccaatgtttcctcggatatttggtcacgaggcaggagggtacgttacaaaaaatctctaaataaaatgccaaagaaattatcaattttcgtacatgttttatttttaatcataatgagtgacttacttaatatttgttatgcagaattgttgagagtgttggtgagggtgtcactgagcttaagccaggtgaccatgttctgcctgtgttcactggggagtgcggggattgccgccactgcaagtcgaccgagagcaacatgtgtgatctcctaaggatcaacactgacagaggtgttatgctcaatgatgggaagacaagattctccaagaatggtcagcccatttaccattttgttgggacctctaccttcagtgagtacactgttgttcattctggatgtgttgccaagatcaaccctgccgccccactcgacaaagtttgcgtccttagctgtggaatttgcacaggttcgaatcaacatatagaacgtatttgaggcagggcccggtcctgctgtctgaccgagtgggccctaggcgcaggcctagtctactttagttcaagatcggccttgattagacaaagcatgttttgatttgagttttgataaatttggtgttttttcgctttgtaggtcttggtgccactttgaatgttgctaagccaacaaagggttctagtgttgccattttcggattgggtgctgttggtcttgctgtaagttattcatatcttgttaaatgttaatttggttttgtttaagggtttgtgagagtgtcatgatactaaatttcctttttctttttaggctgccgaaggagcaaggattgctggcgctgcaaggatcatcggtgttgatttgaactcgaaccgattcgaaggaggtgtgaagttgttaaaggctgttttttttttaataagttgttaaaggctgttgagtctgcattattatgcataattttcaattgttgattttgttatctattcttattaattgcagccaaaaagtttggagtcaatgagtttgtgaatccgaaagatcataacaaaccagttcaagaggtcattgctgatatgaccgacggaggagtggaccggagtgtggaatgtaccggaagtgtccaggccatgatctctgcctttgaatgtgttcatgatgtaattacttgaccaaacttcaaattcttatactgcattattacattggttattgaaagatttaacaatttgtgttttttgttttcggttagggatggggtgttgctgttctagttggtgtgccaaacaaagatgatgcattcaagacacatccagtgaacttcttaaacgagaggactctaaagggtaccttctacggtaactacaaaccccgctccgatcttcccggtgttgtggaacagtacatgaacaaggtaaacttctttgctttggaatgaattttatatacataacttgaagtggggttgaactaaaattagccagaaattgcttaaactagacttttggggaccataattgtatatggaatttgtgtggcttaggtgagctttaaataactatgaagcaaaagagccttttttcttttaattccttccaaggaaacatatgctatttttggtacatatttttatgtttggttttgatatttgcaggagttggaaatagagaaattcataactcacacagtcccattctctgagatcaacaaggcatttgagtacatgctgaaaggggagtcaatcaggtgcatcatccgcatggaagagtagtgtgttgctcagatcagatgtgttccaatggatcagatgttgagttgtgttaataatcgaagccatcagggagttttatatgttcagctaaaataaataaataaatgtgtttatgcactttcgagtttatcttgtcacttgtgtcaaaaaaaaaggtactccttttacagtaataatattataaacttttatctttttgttctgttattaccttaaaatttaataaggtgtatgggtttttattttaaaattaattatagagaagtagtttattgatcttatatatgatatttaatttttatatattgtcgtagaattctctaacatccatctcaagattgtggttatttt

SEQ ID NO: 379611 - DNA, 5439 bp, Cannabis indica
tttcatgcaaggggtggataaacatcctcacttaacacatgtcacctcaatatgtgatatatagatttgtggtcttatatctgtttcttgttttcataatttttaagtattacaatttaattaatttgaaatttttcgtaatacttgtttaaatcagtataatataacttagttagaatattttttttaattaaataaaaacaagaagaaaaaataaattaccagtgaaatgagagcatgtgttataaaatgagcaggttatattatatattatataaaatcagaacttttataattatatagatatttaaatactattagattttttgtacgttataatattaaatgatagtagatttgggtatgaaaattaagcacgagtaagcaaaatattatttttcaactgaacgacaaatcacttgcacttagtaataatattataatttacacgtgtgtatgtctttttgaaaaactatgtcccacctcattaataattaattataaatattcaattactaatatataataaaaaaatacaaaaaagctaattgagtgaggagaagttctaccattgcttttatttttatgacttatttatcatatatagtcttatgtcgtattaaaaatatattacacattttattaccatcaataattgattttgaaagactttaatggtatcagagcaaaatactaactttagttgcagtgagtgtgttttattaaatattatttattatttttccaaatattaagttaattcataacgaaagttaatttcgataacatgataacaacgtatcatatgatttgttataagtcgaaagaattctcgttaaatctttaatacagaaaaatattgcagtcagtttgatatcgagtaacattgcttatagtagttttatgattttttttaatattataattagtgtgatatcaattaagtaatattttatgtatagtacataattttgaaccttattattttaaaatttgtgtaatcatgtaattctaaaaataaattaagtgatcttataatatcaaactttgacacataaaatatttttatataaaatgacatatatctctctctctatatatatatatatcaagggatgcgcggatgataatcactaacatgtatgtgctataaatttttggtcttatatatttatttattatttttatatctacgcataaaatattaaaatttttaatcacatttgtcaaaatgtatatgtaatataatttatatatgtatatatattatatcttagctagaaagtaattatatattttttttaatttaatggaaacaagaagagaaaacaaacgttaatagagcgtgaaacagcgcaaataaaatataaatttgttactacagtataataactataacgactataacgtttcattgttatgacttttttttggcttacgtgtacacaaataacaataaatattattatattctatattctatataaaatcataacataattaattagatatttgaataataacagatttgttgtacgttataatattaaatgataatggatttggtacggtttctttgtgcatataggtgtgaaaattaaatacgagtaagcaaaatattattttttatgagtactgaaatgtagaaggcgtgtatctaatattacgttttacatctatatatataattttttaaaactgtgtccaacctcattaataattaattttatatatattgattttatgttcatgaaaatcttccagtatttttattaatttttttatatataaataaaagtaaaacaaaattgtgtgtgaagtttttttttttttttttttacaaattcgatcactaaaaccaatgtaaaaatctcaattgatatctttcatttctatacattttggctatacaaattttttattaattaactatatgttgtgttgtattttccttatttatttattaattattatttgcttttaaaggattatgggttgatgcatagtgactgtgtataacttatttgacattataatattcatatttatattcacatatatatatataattatatatatacactataaaacataacaataataataaaataaaatccaaatatattctcaacatgcatttttttccttttggaaaattacatttgaaaaaagaaaacttcatgaaattaattaaaggctccattaacctataattaactctaatccgataaaaattaaatctcatgacacaaaaatgggtcttctagctagcgctattctttgaatcatgactaacacggatgagacgacagactcgataatcttaaagagagaaaaatgacataattaactaagactaaaccctaattaaacgattaatttgcatgagagaaaaaacaacaattaatggattttcatctatggagatttagtgacaggccagagcttgagagtgaaatcaattttcgccttcttttccttctccttctccttcatctcagccgtccgtttctttttaggaatcggatggtccaaaagacttgtaaatggcctagtttgatcaacagaatccaacaccaccacatcatcatcatcatcatcatcttcctccttcacattcttattaatattctctttattaacgtctttgtcatcttccttgtcctcctccttttcctctttcttcttgtcttccttctcctctctttgcctcttcggcccattaccactcagggtagaagtaggcaaatgagtagaagtaggaagagaacacactacctgagggggtgtgttcgggtgagtagccctaccaacagaactattaaaattattattatgaataaaattataatgttgttgataaaagttattattattattaggaagaggagggggaggaggaggagaaggagtagccagctggccaccaccacgaccattgttgacatggttgttcccactggccccgccagctggacccatcatcaaaacattgttattgttgttgtgatggtgctggtgctggtgttggtgttggtggtggttgatatggttattggtgttgatttgagtcaaagcagcggcggcaggatgatgttggacattcactggaatagtggcgggcatgttgactggaatagcggcggcagcatgggcaggaataacatcctgagcagcatggtggtggatgttgactggaatagtggtggccgccggaatttgaagaggcggcgacggctgatggtgatgatgttgatgatgataaggtgtttggataaaagttggctcttgtccatgaatataaggaaaaactgtagcttgggctggtccatctgattggataacataaacatgattattatgattattattatgattattcatcatcataagttgttgttgatgatgaatttgttgttgttgttgaagttgttgttgacgatgaatgaaattatttcttctttgtatagccaaatcttcttccaccaaatgagtctcaatatggtttattagggcttgtgagttcatgaacatttggttacacaaacggcaagctatttgctcatggcccatactagggcctcttccttgtccacgtggcggcagaggtggaggcggaggcggtggcagtggatgagcttgaaatgagttcatgtttctaccacccgccgccatagagagaaatgatacaaaactcgagctagggttttctttaggttttttaaagaaaatgaaagagagtgagatttttttcttttttgatgagtgtgtttaagaaatgaaaatgaaggtgtaatttataggtaaaattttggtgtttttgggttaggacatgtttggtaatatatttgtacaatatcaaagttttggaagtttgtttattgtgattattgtttttctctaatatacacacaacacatgttaatgcatgcatttgcatatatttgtttgagaaatttaataaattttgtcaaatttgtattattcaaccaaaaaaaagtgtttattatggaaagtggatttattgaaatttaatgagaatttagaaaaggatatgtggagagtattttttttttttggtagaaacaaatctaataataatatctaatggactggccttctgtaaatttaacgtataaaatatttacaatattaaaagagaaaaatatatattattataatctattattttttggaatttttttaaaaatagaaaaatacacctgtatatacacggagactacacatataaaaaaatatcagatttttccaaatagaattattttgtattttttttatttaatttattattatatggtaaattatttcttttaattatctcttctttttaatttagtatgtcatttgcaaatacatgtgtatatattcaaacattactttttaccatattatgtgttttttcagaaatatctatgtggatttctttttcagtaagagaaattaacttcatatattattagctgtcatatgattttttttctgatattgaaaattaataacatacttaacttgcctatatataagataagactttacaattcctttttttatatataaaaaaataaaaacaaaattttcccaaataatttatttattatttgataaatgtacatcattaacttttccaaaaagcaaaaaaaatcgtttaatttaaactttaattatatggtatgaaaatcaatagatgtgttggctagctggcactaattaaggagaattaacacttgaaattaattgacatgtcattattattaaggaaatatacatagcctaactatatagttttagttaatttaccgcttaattataatattaatcacaactatatttaggtgtttgtgtgattggatttttagcaaaatttgagcactgtgtagtcttcgattaatttacgtgatatatatttactttgataagtcatataaaagttgaattgcaacatcattaataaaatattgaattgtattaattattacgacttaaattttaatataatgtgaatcgtattatttaatacataataaatacccttgacacaacccccagccctggcttcaaaccccgaacccgagcccgagaccctagacccgaccctagactccgatctcagccctaaacccgaactcgaaccttggccttgccttggtcttagactcaccctagacccgaatcccaaccctggatccaattttggacccgaacccaaacctgaatcccgtccttggagacctgaaccctgaccttagatcccatccttggacccgaaccctagcctcgaatcccgtcaccaaacgcaaactccagcctcggcccccgaaccctaaaccttggaccttggactcggacctcggcctcaaatcaagaccctgaccctagacccacctcaaactcgaacacgacttaaataaaattaaaaaa

SEQ ID NO: 379612 - DNA, 3687 bp, Cannabis indica
tccctccccacaggaagaggaatcaaatacgtgatagtaacgattgattactttactaagtgggttaagttagagtcgatgaacactgtcacctcaaaaaatcctactttgttatcaagaacatcgtgtatcgttttgggcttccatacaagattatctccgataataggaaatagtttaacagtgaacactacactgacttctatgccaagtatggaatcgtaaaaagtttctcgactgtagcccagccataggccaatggacaggtagaagccgtaaataaaattctaaaaacaacgttgaagaagaaacttcaggcatgcaaagctcattatcaagaagagcttccgcgagttctttgggtctataggaccacgaagagaactctaacgggacacacgccatatgtgatggcttacaggtgtgaagtagtaatcccaatagaggcaacattcccctttcatcgatgagatacctacaacactttctagaaccattcctgttccaagaattgttgggcctaatcgaggaacttcgagaataatgacaggttcaactcaaaatgtacaaaggcaagatctcctagcactttaactccaaagtcaagaatcatttgatgttggagacctcttcttgagaagagtattcccagctgtgcaaaaactgggagtggaagtactcgggccaaactgggaaggcccatatgagatacttcaaaaagtgggtcaagtaacaattcaacttaagaggatggatggatcaagggcccctcatgcctggaatgtagaccacttgcgttggtactaccaataggctgaggtgaccaagctctaatgtatctcttgaattctgtgtaaatttttgaacaattctcttctttatgtaaacctacgggtacaataaaatgaaaatagaagaagtttacacttaaaaattatgcttttcgttcttaagtcacaagctatgttttaaacgtatagtgtgctatgattacttactttatttgtccatgtcaattttttagtttaacttgcgtttgaccaaaaaaagagatgtattttcagccaaatttcccaaggaaaagactcgttcgaattccttctcaaaattaaaaattagtgtaagccctgaaatgagatgcatttttagcaaaatttcccatgatgaaaaacccgcttgcattccttctcaaaaattttagtgtgttttttaaagtttaatctgttggatgttttgcaatggatgaatggggaagcctcgcctgaactcgtatatgtttttagcccaccctgagcaaagggtcctacctaaaatccatagcatgtgcagcttgtgtggccctagtggcaaaagagtctattcaataaagtctacgccaaggaaattcacctaagtgttatcacagttttagcctagtccttgaacaagggacaacgtctgaaatctgtaacacccccaatcaccttttccaaagcccaaccctagaaagagtaatgatcagggaacacttggaacgcgaaagcccaaccttccacgaagaaaaccatccctatcaaagcatccttcatgtagcgttctatttaattagttaagtactcaaggcacttagaaggcactaagctctgtgacaactcgacggtctgggagcgagttaacagcccttttacgttgccagggtatttagctaacttaaatttgcaactaccaaaagggtcttaatagcagtaatcctacctgaaaataggaaacaagtgtttggcccccaagcgcttcttaaatcagcaaagggactaacagttaagaaaatcctaaggtttgaggttttaaccattggaacccaaaacctctaaacgacttaaggagatagctcttaaaatggtctagcaattaagtaaaacagaataaaggctagcatgcaagagaaaataaatacataaaatcaaaagacctaagtctatttcagtgccccgcagactaggcatagtaaaatatctatgtgaaaagatagtcttctactctattacaaacagccccgcggaccaggcgtaaaaaaaacacttctgcaaaaattaaagatatgcctttaaaaggggaacaagttaaaaataaaagtaaggcatgatcactgttaaggagggatgtcaaactaaggttttaattttggatttactctttgaggttgtccttctgcgaatgttcaccttccccggaagaaacttccacgacctctccagattcattccctctagcttttttatcctcaacctctttagttttggtttcagccttgccatcttctgatgcctcatcttcggccatgtcttaagtattgaggtactcattaacatctctcttataaatcacgaccctattggaaaactcctctgcatcttcaccaagatagttgaagatgttgcgaacactctctgataagtgggtcaacataaggacatgggctaggtttaccgagtggactaaggctcgatgacgagacttttactcttacttgtgttcttccttcccgtccataagttccttgcgtacgaaggtaacctccttcagggcctaggcctggccttgttgaaattgagactatgtcttacaaatcctgtacagtcttggccttcgtctcaatgatcttgtccttctccttgataccagcagtaggtggtaacctggtttttagtaatccaaaaaagtgcctcagctaagccaaccttggcctccagccccttcatgagattatttttgtcttgaagttcttgaagcttaacggacatctggttcttgagagcctccttgggttctttggcctccttaacctcataggaaagagtagaattggaggattctcgctcagcacgttgggtcctaaatttttcctccatttgagtcttgaaatcctctttatagtcattgaacttctacaaatacttcttatcggccttggtgtttgcttcagcacagtactatttgacccctttgatgttcttgtcaatcttttccatggcttccttctttatattcttgatttgggcctccaaagtccgtcgagtggccaaggaaagatctagttggaccgccatagagcttacttctctacaagttcgcttcgcaagaatttccatcttaaataagaaaggaagactcagaaaaaggagtgatagtttatagcaagtaaaaaagataagtaaagtaagaggttaaaattccctaactgtatgttgcctcgcggagttagttagttatacgggattagtactactgcctattacccactttttggtggtcaattcactcacactaactgctattttctccagcaggtcaccactgaatggcgccaattccctacccaggtgaggcacaagttgtttgttgaggacaggaaggtccattacgagtgcaaagtatttttatttattttaccaggatcttagatcaactcacaagtatgttgtttaatccactcagatctctaacccttgtatcctttctgtcgcagagtgttatcaagatttgagcctgaaaattgtgaagaggaaaagagagaggtatagggtcggctatagagagagaagtggaaggctcagtttttctgaaaaggcaatctttgattttctgagaaaaaggttattttgaactgagccatcactttctatttataggcaactactaggtttaggt

SEQ ID NO: 379613 - DNA, 3482 bp, Cannabis indica
tcttcttctttctttttctatctgaaagtgccaccaaatgtaggggtccaaaaatcaacagcggtctcatgtgtcataggaaaagtactagaaactggtaccaaacatagtcctcggcttctaaggtcttgtttgagatcttcagtgtccttagatttctcagaattgttctgtatttattcaacaaaaacaaatttcccttaatttaaatgtacaccaacatgcatatatacattatatttatatatataaattataataattaaatggaatataaataagaataaataggatcttttctcctgaactaagacttttgtgaaggtttgtcttctcaatttttctctgttgaaaaaatcagctcaaactaagtagatcgtcgcaaatattccttttcagttacaattaataattaataattttaagctgcttcaaatttagtttattcacattaaacattctaaaaatgcatatacagactttcataatttatcattaaacaactatttatgtacttattttctgtctgaattcttgaactaagttagattaatatgttagtactatataaaaaaattatttaaataaatgagaaatttttgcaacaatttttatagttcagaaaaattttcgtaaccgagaaaaattcagagaacaaaactctacaagagtctagttgaggaaataaatcctatttattctataaataattatttaattattttacaattataagattattaatgtacctgctgttgctgtatggcagctccacttttcatgtatgggttgcttaaaacctattatattttatgagggaagaaacacattattagaatatttaaataaacatattaagtatttattagtttatttaaattaatctatatggaacttacactaacttgttcatggagaaatttgatatactctatcgcctcagagagcactgaagcagtatcagtctgaaatacaaacaatagaacataataagaaaatcgatctataaaaaatacttacatgtgcagtgcagaaagtaattatcatcttcagttttccttttattaatgatttaattcatgaaatcaagagagaacaatatcgtaatattttaaagcttaatttacctttccgaaaggtgaaaccaattgttggagtgcagtgattctgtcccccattttctctttcctcacctatatatatacatgtatagatgcacatatgtaatacaaaaaattaattaacacataacctaattaataatctcttctatgcatatatacttaattaataactaaaacaaggtgcaggttcacctttcactgaaaagattaatttatacgaaaatacaaaacatacagtttgtctaaatttagtattcgaattcaaattcaagtgcattatgtcattgctttttgaatcaatagtagtgtaccttaaaagctggcaatggcgattgagtttgatcgtttcgtgcccttttattcgatgcggcttcattcccacttttctttgccaccactccacccgactgatgatgatccctaacatcggatatattctgctcaaaaatatcatataaataataaatatatatttatatttatatatgctactacaaaccaattataacaaaaaaaaaaaacctttagtttcatttaaaattaaattaattactaagcaaatttaacacggcatcatgattaataataataacaacaacaacaaccttaggtttttcatcgaaagttgtggtcggaaactgtggttgggtggccaatgtggagaagaagttagacctaacgtccttaatggtggcgggggcagcctccggaggagcactccaaaacggcccgttgtttgagaactgtaaatggctgtaattggcggccgccgtgggtgagtgctgctgcttcggtgatgaagctcgaagaaactgaggaagtttgttatttgtactattgcttgaccaattactagagttcataggagccaatacttcattattggaagctgtagctgtagtcgctgtattactcaccatcaccccgtagttgggaggtgaattattactattaaaaggcatgttagaggaacttgttagattattatcagggccaaagagtccttgcagtagtatggccgaggggcttccgtacaaggcagccgaatccacctgataacttgaattatgattgttattgttattagccaaaccaccgccaccaccttggcacgtgacagtgctgccgtccccggaactatactgagggctgaactcatgatgatgaggatggtggtggtgatctagagagaaaccaggtgtagtaatagcacggttcatttgtttaaatgtcgtgtcgtttgatgttgaatcaccgggaaataacaatagttttggatcttgtctactccattgaagttgccctcctccactactactactagttatctcttgttgaaagttatttccactgccgccgttttcttctaataatattgaacgaaagctactaccttccgaagcagctttattttcccctctgctataaaagtaaataaataaataaataacagttatatatcgatataacaatcgaaatcgcacagaattactcacaataaggcagcttggttccaatccatagcttgggaggaaagacctaaacccatcatcatctgtaagttgtggtctcccgttcctccagcggaagctccggcgggggaagaagaatcttgggcttgttggagcttgagggtgtcatggaaaatcatggaagaagctgtaccagaatccaaagaagatcttgactttatatcaaccatgtccgttgatgaggttgttgaggaccaattaccaaagcttcctaagctattcatagctgaagaagacgtagctgttcttgatgaatcccaccagttcccactcgtctggaattcatctgccatggctagctctccttactgcaattactttatgtataaaggtttcacaaaactgcacttctttgtataataactatagaatatgtttgaattagggtctttcttcaaactctgctggacttgttagctatgtcgtttgtctttttttttctcttttttttggggggtgggctttcataaaatgatgaaagcggttcgctgcatctcggttgggtatttatatgtatatatatggctgaagtgaatgttaaactgtttgggggagtaggaaaggaaaagaaaagaaagaagtcaccagaatgatgtggttgacatttcagggggtgattagacaagggaatggtcaatttcaaactaaattttctttctttcttcatttcttttacaattttttattttacatggttgaaatgattatttcttattatttttaaattatttagatcagtagtactgttaattataaggagatatttaagaaaatattaaatatatataatatgtaatgtgctatttttttgcgccaaccatgtcat

SEQ ID NO: 379614 - DNA, 7228 bp, Cannabis indica
tttgtgagtttggattggtgctgcttttttggctttcgtagtttggattagtgggaggtaaatagtatgacctgttctggctcaagttgatctataaagtatcgattttttgaggatgcttttgtgaaggttataattgggttcaattgtgtttctatggccctcagttttaagtaatctcattcgggctatagggttttattttttggctttgcatcttgtacatgttctttgtttctttaattccaaatcttttgtattactgaagaatttctttttgatttggtaatttcagcttacgagcatcaatggaaggatatcttgatgcctataatcctactgtttctgtcatgcctgctggaattttcgtcaatcgagttgaggtctgaaacataacttgcattaccatgttcatgttactgcatttctgtttagcgggttgtattcttaacgtgtattgttttaggattgaaattctccttttcagaacttactactttgaaaatgtgtgtattttggattttcttatacagggaagggaaagtgcattgatttttatctgcatcatcaatacagatggggttttatgttttttaggttggaatgcatgattcctaagaaaggaggatgacaatactcaaaacccatttacctgctaatacttaccagttaggcaggcaattctcaatctaatagagtagggtgagagtacaatatttgatatctgatacgtatacagattgggtgagggtattctcgaaccccaagcttgttagtccacttttcaaccctaactctaaaccctaaaaaatatgtacataactgtaaaaattatacaaacacattcctcatataattttatttttatgttttcaacttgaatagggtagaattacccgtttgcaccctttatttgttaaggtaatatccatgttcgatctcctttataagacaataattaataatgcatggtatcagtagaacttagttatcacaaggtaggttcggggtatagacatatcagaagacactcacaagtgttctaattgcccttcaaagtaataagtttgattattaacaataacattccatgaaaagttttactgtgctaagcttagctttctcctcttttttcccataatgaaggagctggagtttgaatgtgttccgaagtccctcatggaagaagtgcttgcctttctgaacgtaagctttgtatttatttcaccatttcctgcaaatgttcgtctctcataatttgttataacaggatgtcagggaagaccttaggtcctcaatggcaaaggatttggtgactatcaagaatgagagtttaagaagtggtaaagatcaaaactgtgtggatgtatctgttaatgatagccagcagaatttgattatttcacagcataaggatgcattgttggatttccagaaaaagatcactctttctaaacatgagaaacaagacagtgatattaattccttattgggccacaaggaaagttacagacaacttgcaggtatgtataatcatacatccaacacttttcactaattttctctcaagtaatttgttttgtaggtacattttttgaaggatcacgaactaatttattattattttttggaacaaatttattcttcttatttaatatctggcttttggttaatttagtattttctatgacatgataaaatttgtatgataaaaacagagattgaaaaggaagaccagcttcttgatcatttgttgcagtctacaagtctggcaatggaaaaagttagaaccagtcgtcaacaatgtattttggtagcatcactgattgatcgcatacctaaccttgccggattagcacggacatgtgaggtgtgtgtgtaatggtgcttctatatatatgttcattcatgttgtgtaattctcttagctagtcctgtagaaaactcgtattcttaatatctgttattcaattgattataccaggtgttcaaggcattaggtttagctgtggcagatgcaagcattttaaatgataagcagttccaactcatcaggtttgactttaattggttacttctgttaacctttatttacaagctccaatgttttttttcctctttttcgttcgctctttgattctgctgtattttatactgtcataacttgtagtttaaaagtagaatttggtaaatgctattatctctgtggaacttgagttgcgaaacctttttaccaatcacttgctgtaacaaataatgggacagaaggggactacaattctttttaatgcaaaacctgcctgttgaggatcattatgcaggaaaaaacataggcagtgaaacaaaaatagaagcaaggtttatctcttttttttaacttcgtagctacattaggagtcattagatatactatggtgatacactaagagagtcggctaggtagtacaaaatgaggatttctgagaaatcttggctattcacacccttcaactcccctagaccagacatataggtctttcaacccaaaattttctcttttctgaaatctcctcagcaaatacatccgaaaaggtaaattcaacacaagagaagcatacgttatcttatgcagcttgtgattgtacttatatatgctgtattttaattagtgaagcaagtcaagtacatctttcagtataataaattacaagagacgtttttgtttttcagtgtgacagctgacaagtgggttcctatcattgaggtcccagtggatagcatgaaggttttccttgagaaaaagaagagagaaggctactctattttgggactggaacaaactgcaaatagcatacagcttgatcattacacatttcctaagaagatggttagttgcttacagaacctggttatttgtctctctaaattctaaaaagaggatgcgtattgagtggatttgaggaaagggaatagtataaattataaattattgcagaccgtatccctattgttattttcttctgttatcattgcctaaaatttattaagaaacctctcttcaccccaatctgaaagaaaaaggtaaagagactagtgcatggtaagctacctttgctagatagagagcattgcaagtagctgtttattgttttccattacaaggttttcttctccagttatgtagcgtgttgtgattgtcactgactcactaatgcttatgctcctcctattgctaggtacttgttcttgggcgtgaaaaggagggaattcctgtggatattatacatattctagatgcttgcattgagatcccacagttaggggtagtgagatctctcaatgtacatgtcagtggtgccattgctctttgggagtatactcgacagcagagatcttgattactataccattgaacacggtaaatttgtatgttcgactttactaacttgctgaactagaactgcccagaagcaatgcagtaatgtcttactgactaaaattatcaaattacatgacttcaattcattgacacattatacagttatcacatgattttttacgaagtgtagctatggtaaaatatgagaaaagaataatcttacagtagttatcagctattctgttctgtttacaagcttacaaaagtgtatagagttatactagttatacgccaactttaactgtcttcatgcttttgccaattttgtgagcattggtttctgtgtcaccgaggtttgcagcatgaattgcattatcttttggtacaccaagtaatttggtaagtgtactaaatgataagttgtttctccatttgtgatacaacattgtattgccactttggattttaaacttctgcatttgcatgtgcatgagctttatatgtccaaatgataaactggctctaacatttcctgtgaactaatccactcagacaattttgttaatgtcttgctgaaaagatgaaaaaaattcagcaagtagtcacataaagtggcagcttcgaaacctgtaagtattggatagagctcattcgttcttctttcttagtcttttgttggtcagaatccttctaattagctaatgagatacagactttcatctatgctttcttgatgtgagggacagtttagagagaaacccccgccgctttcgtccctgaaaacgtttcggttagattagattctcaaacattgacgagccattgatacaatagataagagaatgtcataaatatatcatgaaaacttgacttgttacctctaagcttttcataaattctttaatcttattacttgtcttctttttggcacttgctttcttagtttggaaactcagaagtttgaaaatgtttggaatcattagtttacaattgccaaagcaagttgaggctacaccatccttcggctttctttgagtattgactgcctaccaaaaccaaaaacaatggtgactatattacacaaaatcataagcccttttaagaacaaaccttaaacaagctgtgtaaagagctagaaatagagattttgatcaaacattagcactagtatttactatttagaatgtaaaaagagaaccagagtggtactttggtttgaggagacttgtgtttgttggcagaacttgttgtctgtagcacaggtagccttgcagattgccgaaggcggtgagagtattgaaggagctcagctctcctgttaatgaatcttttacctttggcaccatgtccacaatgaattaccgctcttttgatggtgtgatgaacatggtggtggtggtgatgatggtgatggtgatgatgattggctactattctcctcggcttctctacatatcgggtcactatcaccgcattcccttttctgattgttgcctgcaaattaaaatgatcacctttgtgaatttatgagggagagggagatagagagagagagagagagatgatattaccatcgtagttttgaacgttatgggatcaagggaaaggataaggagctatgatgttggagaacagaaatgtaaattctgagattgattatggttagtaaattagtcatataaatgtatgtagcaaggtggccaagaagatgcaagtccaacctgaaaggccaatatgtccctttggttgcaacgaaacttattaatccattgttcattgttcaacaaagttcttattatataaatagctaagatgtattttaagcaaattagttatatcaatcccaaaaagaattaaaacaccattatttaattgtttatattacctgccacgtgtcaatattatacctaatccacaatagagagtttatttatttattgtttaaatgagagttttaaatctttagaatactatcttcgctttaatttggtctcttgagtgctattttaaaatcataatcatttaggagtagcaatgtagcatatatctttatatgaaaactccaagacatataccttattaattgaattatatacctctcttagccttttctttaaccttttgacataaaaataacactaatttaaatttaattacatgtttactaaatataatcaaaattgaaataaaaaagtaaagacaatcacaatacttttttgtcgcaccagcaacgctatataacaccagctgatatgcaccaacagcaaacatatagaattgtaacgtaccagcatgatcagacacaacaagctgtgcaattctcttcataccagcagagcacgtcattccctgaatttatgcatcaacaacaaacaacaagttttgagctgcatcagcaaactcactcctcaatcgaatactccatacaactacatgatgttgctggttacaatactagaccaatgaatagtactccatagaagccaccaattataaatggtcttaaactgaatgtagatgcggcagtgaatgataaagaaaaaatattaggaatcggggcagtaattataaactacaaagaagaagttgtggctgcattatccaaaccagtctaaggctattttagaagcgatgaaatggaagcgaaagcactatttcatagtcttaattggacaaatcaacaacagatctagataacgcatgttgaaaccgatgctttaagagtgtcttctgttttgatctcttcacacaaagacttatcttgtttttcagatctaattgatgatgtacgttgtctcttgtcttttttccctggaattattgtcactcatgttcgtaggaatgctaatcaagctgcccacggcttagcaaagtatgctctagggttggatgaagatgtctgttagatgggggaaattccacatcctattttctctattgttgtaaatgacctttgatttataataatagtaaaatttgcaaaaaaaaaaaaaaatagaaagaatcaaaattatcattacatatgtattttttaaaaaataatcatttatattatataagtttttttattttaaatttttcatcaccctcatactacctcattggggagaagtattcccatcctttttcctcccccattccatcaggttcttccatttatcatttcggtaaaaatgttgatgcaaaccattaccacacaaataatttctattcattttaggtaaatattttataaggttttgttcgtattattctccaaaattacgatcaagatttttggtaactacttaaatattgaaatttaggttaatagatgagtatttaaatgagaattttttgcgttaacaagctttagtatgcatttcatttgtattaatgttgaggatagcaacaatattatgtttcacatgaattttgacgacgtttttacttagaacccgaatctagattcctttacaatgacaaagggtctcttattcatagttgagactcttgattgggctttatgttctatcaagctctttcggtacaaattcagtgctagtgataatatctcctctattagcctaaaggtgaggccccaaagctggtggtaggtatggatggatgagacttgtctagtggtgatgtgacatgtgatggtaggagctacatataaacacatgagaatgacgtatgtcagaaaatgtagtgtgtaaatcttgatatttattctgctatatgggaaactcgttctaccaaggaagggtatagctacaatgcttaacccctttgtgtgctaacaagtgaggaccatgccatacatagggtatgtcgaaaggtttggggtcccatctgttgggaatatattaccaagatctagatttacta

SEQ ID NO: 379615 - DNA, 3027 bp, Cannabis indica
tttttctttgcctaaagacacaagctttataccaaaccaagtagtttagcagtaacagtagtagacgacgaccatggcttccgctctatgttccaacgccatgagtctttcaaccactgttttctcaagaacccaattcccaaatctcttttctaaagacttcccacttgaattctcaccttcaaattactcaaacgaccaatataaaagtagatcaagtagtagtcaaaagaagagctttactgagttaaaggctatggtaactcaggctcctcccgcagaacttgccccagctgagacccatgataacaggaagccgccgcagaagaaacttaagctactaatcgccggaggagggatcggtggactggttcttgctctggcggctaagaagaaaggctttgaggtatcggtgtttgagagagatttgagtgctgttagaggtgaaggacagtacagaggtccaattcagatacagagtaatgctttggctgctttggaagccattgatttggatgttgctgatgaagttatgcgggtcggttgtgttaccggcgaccgtattaatggtttggttgatggggtttccggtacttggtaagctcaatatgttcttttattaggctttaaattaatcacactctaatttatttagtccaacaaaatagatgaagagtcaaattggttggagcttgatagatatgattatatggattgaaaaagtttctaattttaactgataggctaattaatattttttttccagttccacatgtaccatattgtacggacttttttagccgttaaattttttccgaaacaattgaaattgttggactgaaagatttatgcctaattcaggacgcctaatgtgtccatgtacgccttccaactttgatatgtaccaaattgtgctcccgaacaattttccacatctggcgctcttgttagtaaaattatacagaagtctattaattcaataatatggtctgaaaagtttaagtacacaattcgatacaggttaaagttcggataaagaatcctgactagtctaactgatattattacatcttctaagtctaactaaccttgtgagttgtaatttatataacttcggtgaatttatatataattaagggactagcgagatagataatgtttagttgattatatcaggtacgtcaagtttgatacattcactcctgcagcagaacgaggattacctgtaactagagtcataagccgaatgtccttgcaacaaatcctggctcgtgctgttggagaagagattattatgaatgatagtaacgttgttgattttgaggatcagggtgacaaggtgagtcttgcttttttacatcttgtttattagtaacactaccatatttgtagcataggtaaaagaatatggtgttcataacttttacctggttcagttactcttttggttttgacatttcttttctatttcacaagcttaggttactgtagttcttgagaatggacaacggtatgaaggtgatcttctggttggagctgatggtatttggtcaaaggtacacttctctcctaaaaacttagttaggtgaggaagttgataacataacagttgattagagaggaagtctttaggatcgtcacatcaactaagtatgtaattagttggtggtttatcaactactggaagaagctagtctttcgaaaatgagttatctatgacggacgctgacgttgcagaaggggagacctaggatccctcatcaactaagtatggtataagttgatggtttaagatcacttaggcctctcattggttagtatttaaagattgagttatgtctaagtggttgtaacaaaatccgtcctagttacatagcgaacattatcactcattaggccataagcagctattgttatcaaaatggtgggagctcgtttgaaatgttctgccactggaaacaatcctgaagagctataattgttatagatagtttctttcaacatcaatttgaattgacattttccttttgttcccttgtgataggtcaggaagaacttgtttggtcaaacagaagctacctattcaggttatacatgttatactggtattgctgattttgtacctgctgacatcgatactgtagggtatgctttctatctttaatctttaaactgcatttcttcttagattgaaagtggagactcaaattgacgatcttacttctcattgtgaaggtaccgggtgttcttgggacacaagcaatactttgtttcgtcagatgtgggagcagggaagatgcagtggtatgctttttacgaagaaccagccggtggcgttgatagccccaatggtaaatatgattgattaagaatgctcaaagtcttggggtttctgcactataaaatcttagcattcttacctgtgaactgagatgtgtgcactgtgatttttcaagcccttaagtggaaatttcattttggatttaaagtgaaagcagctttttaattaaggctgacatattaagattaaagacagatttttcaactccaaaagcactctttggcaggtaaaaaggaaagactgcttaagatattcgacggctggtgtgagaatgtgatagatctaatagttgccacagatgaagatgtaattcttcgacgagacatatatgacagaacacctactttgacatggggaaaggggcgtgtcaccttgctcggagactccattcatgctatgcagccaaatatgggacagggtggatgcatggccattgaggtatgccttgttctgttgttcagttcaaaccctttaatgtccttaataaacaatggcttatgtttggacttatatattagatgatcaagagtttgaaaacttgaatcttttgccaattacttcatcattgcaggacagttatcagcttgctttggaacttgataaagcatgggaagaaagtcagaaatcaggaacttctgtagatgttgtttcatctctaagaaagtaatgaaccacatttgtaatct

SEQ ID NO: 379616 - DNA, 2532 bp, Cannabis indica
cttttaatcgggtattagtttatcaaggttaaaatgtttacttttatataatgttttgtcttgattataatttttacttttccactgcaaacaattaacattcaaaagttttagaatcaattaaccagagtttaatagctgaaacgtataaggaaaataaaaaagctctaacttgcaaatacataaaaccgatcaatctgtatattcagtaataatcagaatgtcacaagagaaaaataaaataataacaatcataatcataataaaaataacaatgacatcgaatcattatgtctcaaccaaactataattttagttagttcacaaagccaaagccacaactgtcaaaatggtagcagaaaagccaacaacgctgagggaaccggcaccggagttttcaggtggactggcggtgccagtagtagacggagacggcggcgatgaagttgtggaatctggagaaggagaggtgggaatgccggtcgatggaggagaagcagatgatgagggttgtggagcttcatttgaagatggtaccggagaaggagaggatgactgtggagccgaagccggaccctgaactggaaccggagaaggggaaggagatgatgaagacgatggtgaaggagagctgggttggggagcaacattcggcgacataaccggagaaggtgaagatgatggtgtaggactaggagacctggccggttgaggtgccggagaagaagctcctgtgacgttgattgcgagcttctgaccggcgttacagtggccgggaacggtgcagatgtagtaatggccaccggttttttgtagtgtaatgctcaccggactagaggtctgacgagaaatagggttggtaccactgcatgaatcgtagttagcctttgtaacctcagccacatcgtgttgacctgacataaaattgaacactgcaaaaacataaaacttatcagtaaattcacaaaaaagaatcgaaattgggattgaagaaattttcaaactaagcagtttcaaattttaccaagaatgtctccaactttgaaagatttcccggcagcccaagtggagtaagcattaagagaagaagggatagaccaagaggtggaatctccgacggtgtaggtcgtggccaccaccgagctttggaacatagccaccgcagcaaaggcggcgaataaaaccatgcttagttttcttgccattgcttctttcgtgttctctgaatttggtttaaaactcgcccctgttttcttaattctgtttttgctctgttcttttaagggtgaatagctatgtttttgtttttctgtttactattatgggttttgtagttgtctatttatagagtgggggacataggattctgttgaaaaaagttggtgaatttatggccgttggatgaacgccacgtgtggaattgatcggcttttttattttcacttgccgtgatttgggacttcttaaaatttggactgccgcgttagatttttcattcttaggcttaccgaacaatttgacttttaatattgactagtgacttctcgagtgctttggttcgttttccattaatttctttttattattttatgaatatttgtggaagttgacgtaatgggcacaacgatgactttgtattttattgaataaaaacaaatgagaatggtttaaaaagagctacgtggtgagtatattggttcacattagttgttaataatgtctttccatgcattttgaaaaaagtaccaaaaataaagtgggtcgtccaaaccacccacaaacataataatattataagtagaatgaaaatgttttctttaattcaaatgactaatgtgtaagtttcagcaaaatactagttttggtcccagtgtgtccaatttgttgatttgattaaggaaataaaaaccaaatgcaatcgttcacacaaaataatctcaaaatttaggtcaacaaagtaatttcatttcttcttcttagttatcatttgtcttagatagcaactatataaagaaacgtccttttttaaatgctttcactgatattaggcaaaaaaaaaaatgaaaacttacactaaaactagttactaaatctatttttcatatcttctcaaatgacctcttccatttcaaaaaactcacacaatctctctctttccctctcttttcttttcacattccctacagaaccaagaccctaatcgcaaccaattctagagccaccatcatcttcgtacccacgactagcgagaaggcctactgcgacgcacgacaaccactgaagaaggaaaagggaattgagagccacgaattgcgatcattttccctattgttatttagatattcgatttgtagtttatttgtgttttttttgcttattatttttttttggtaaaaatcgagttttggtaaaatttgcgttttctgggttctctatgatttttatgtataggatacaatagttgtataatctaaaggatagggtgttaggttttatgctctaaataaaactctatttcaatgtaatccctat

SEQ ID NO: 379617 - DNA, 2167 bp, Cannabis indica
taataggtactttttaaatgattacaaagggtataatcgtcttaacccaattttgaaaaagtgagattatatttacacccccaaaagtataaatacaccccaaaactaagtttactccattttatttttaaaatattacttttataaccacaccccatttatttcccaaaataggtcttgtttgaaagaaaacacacttccaagttttttttttttttcatcccaccatttactttaacaaataactccacgtttctacttacggccatgccaataatgttcctttctaatttgtgttgtaagataagatgtgatattagatatgagatatagtatatatactctacatgtttcatatgtatataatgtgtggattatgtaattgattaaaagtttactgtaaaaatgctttcaaaatagaaaaattctgaattttgttgtcttagctagttttgtcttttttatttctttttcttcttgttattgttttatgtttttactttttctttctttcttcaatatcacctctatcatttttgtttgaagtggtagaagtttaaacaatataaaagaagtgagtttttaatagacaaaatgaatataaaaaactgtttattgatctttgcatttagagtagaaggaagtttgttataaacaacatgaacagaaatttagatttacatgaagaactaaaactttaaaagggataatttagtcattttatattaggataaacaagtaattaaatttttttgactaaaaggggtgtgtttataaactttaggggtgtgaatataactcccctttgaaaaattgcatgcttttgaatttggcggttcatggtttcgaggcatatcattagcattaatgagccatcttttccaattctctcttgttcctatctgttggatctctgttattttaatctgacggtaatcaatctcaaactattaaactaaacaggaactatttttctaccatttctggcctttcaaaaaattcgagttttttcttgcaaaaaaccattctgatttctcgaagctttgcatgccctcgttgtcattgacatatttcttgcgcatccaccctagatatactgttcgacctcaagagttttaaaggttgtcgtgccattcatcccgtcttcagtttcggagcttttcgtcgtacaaaaacttaatttcgaacggtaagtgagccatcctcactcctctattcttttttattttcctgggttatgatccttatactgttaattgcatctttgttactccatttggaattttagtaatttcgatttaattttctgggtaattttttagggtttaggcaaagtaaaaatttaggtttatcatacttataagtctctggtttaataaatttcattcagaaattgggattgctctttttgtagaaatgtcccaatctggttctgaagtttattctccgaagtccttagaaacaaaatatcctaaggaattagccctcccatacaaacccagaattttaaacctcagtccaaactagagataaacgatgcaaaaattagagacaatttaataaaaactaatcaggatgaagttgccagtcgttataggcatttcctacaagaaataaccgagggtaaacgtcattacttgcgagatgcagcctggcctaaatttttgtcattatcttctattcttttggctaaacacttatttttacccagagtcacaattgctttttcaccaggtgacctagattttgaaattatgtcttccaagcctcataagtaaaagactccccaagatcacaatgtcacctttgaggctaagcttatcgagtcaaggataagagctataggagactacattggtggtgttttaaagacttgtggcatcaaccaaagcaaggatgttgggttagatccattgcaggtggagaatttaattgttatccaccagaacgaattattcgcgaggaaggcggggaggcaaatggtgaagccagtggtgaggctagtactagtagctcggctgggataggggcttagagcctcgagcatattatggctggagcaattctccccttgagagagtactttaaagagttcatcaaccatcttggaattgctcctttcaaattggttctgatttcctacagaatccttgcaagtctaaaggtt

SEQ ID NO: 379618 - DNA, 2278 bp, Cannabis indica
ggcagtagtagttcatatatattatggtaattaattatgggataataacaccgcatattgaaatttttaattttattacttttatactgttgagtggaatttttttcaaaaatactgtgtaagttttatactgtgtgttaagtttttactgttattctactgttgtttttaattgttctgttttcatgtgttccactgttgttttattataaaaacacagtatttttaaaaaagatttcgtgtgactatatttttgtaaaaaattaacctaaattttaatatttttgtaagtttcttttacttaaaattttttattttgcatgacaatatgtctattaattataattgtaacaatgagccgaggcagtctccaaataattagtaaggattagtaagataatttatacatcttatatataatattaaattcttacatattaatttttgccctcctaactatatatatgaccaatgccttactatatatattccttgaattttttagtccattaaaagtgattcctaaactattcataataaattggtcattttatcaaattttattacacgtgataaataaccatcttgataatcattactgatgaaataatcatcttttattgacgaaatttatcctcattaaagtgtatgattcttgtaatgatgtataattaaaaataaaaaaattataaaatatatattttaaaatatcattaaataattaattaatgattaaaaaattacgtaaaaatattaaaaaaaaactaaagttacttttctaaaattaattacatacatagagttgacgtgatactcacgtggcaattgtctaaatatttatgttactattctgtttgtcacgtgtgataatacttgatagaaggactaatttataatactgtgagtagttcgaagactatttttaatagattgaaaagtcataatttaaaaagcaaaaatcctaaatattattaatgttagattctctatcaacattgtgtacattaatgcatgcatgcaatattagaccttgtgatgcattggagcaaatgcacatgcattttacaaataaaataataatctgatttttataataaacatgagtaatagtcataaaatcattatatctataaatatatatgaaacacaaaaatgtcccatgtaaagttttatcctcatatataacataagatgcacatattttattgataattaatactttttttgaacaattattaataagtacactattataattaataacatttgactaattaagtacaatattattatatgtatacctaataatttaattaggagtaagaatttaaaaaatatataaaagagtttctatcatgtggaatgtgaggtcagatgctcctttattaatttcttgatgatgagtaattgtttattgccttcacaatgggattgggtgtgaacataatatgaacaccaattatttattatcaaacgtctttttcactgatcatttgccacgtggaaaatactagccaggtcaaatattagtgataatttatttggttatataaatatttgtaactaagcaatatcattattgtttataattttaggtataataatgataagggtgtaaagtctacaagtactataatttaaggggtattttgccaaataaaataattcaataagagtttacaagtgcaataattcgggagataaaacctttttgtcctttgagtatggcttgttttgttttgtaatattggctagttttgttgtacgatgtgactaaggttagcataattagttttaatttttgtaaggtgagtacgattagttttgttttgtaaaactaatagactagttttagctttgtaaggtcagtatgattaattttagtttttgtaatgtttgtatgaccagttttgttttgtaataagactaatatgactagttttgatttttgtaatgtccgtatgactaattttgttttgtaaggctaatatgactagttttgatttttgtaatgtacatgactatttttgtttttgttcgccaatatatgattagttttagttttgtaaggccaccaatatgattagttttgattttataaagctagtatatatggttaatttttatttgtaataaggtcaatgtggatctaattaaaacacatcaactttattgtagccacattggagacgagaatagataagtctttgtctttacaccaaagaattatgtgtgacaatatatgtatttaaaattttatattttattaaatatttga

SEQ ID NO: 379619 - DNA, 3418 bp, Cannabis indica
caataataatataataataagtcgtttaattttttaaaaaaatattgttatttttcttatcttccaactaaaatctaaggagaagaaaataagcaaagttattaatatttttgttttagatttttagctaattaaattttttattttcaaacctgaatattaattttcacaaaacttatattaaaatttgaatttttataaatatgtttagataaattatgtcggaaaatcaaaataaagatattttgatagcaataggctttgtactaaagtgtatattcctattttatatttgaatgggatatctactgctttattgctatacagaaataataatatttaatatccatgatgattatatattttgcacgtcttcaaagagccaagcatatatagttatatactatagattataaagtatttttttatctagcatatatactatagattataaagtatttttttatctagcatatatactatagattatatatttggaagtcgtagttcgagttttaggttaggcgcattacaatatataaatatataaatgtttaaataaaaaaaaagtcaagcactattacaatctatagtatatatgctagataaagaaatgctctatagttaattacctgttatgacaacatttgaaagaccatctccatgaataaggcttatatgtctccctcctagtctctctctccctcttccataggaaggcaatggctcaattataggccactcctcagggtcctattaatcaattaaaaaaataaaacataaattcaagactgattattagagaactaaaagatacccctttaaattagatgctttttacatactaatcattcattgttatacatatccaaaaccaaactaacccaagtcaaaaacgtaaaagtcacacaattatagtcttttgaaaaataagaaagaaaaggaaaaaaaggtttaacccactaataataatgtgtttttttttggctgtgacactaataataatgttggaaaacggaagggtggtggcatcaaaacgatttcagttcttgaaatgggtatcactctacatttaataaatagtagacaatagagtacacccactttcttggtctgtgttttctaatggaaattgctcaatggaaacaatagcatgccagcacgtgaattcttccataaccagtaatgactaaagtgcactcctacgcggagaatcttttttcgttcttttcttcttcctttttttttgagaagacaatataaataaataaacaacggtctccctttctaaatttgttttttttttttttctattctttattacataattaaagtgataatgtacataattttcatttttctttttatattaagaagagcaaagatatataaaattattaaagtattttcaaaacattatgtgaaactttcaaactaaaatgtgttacacagttgatatgataatagttgtgttattgtgtggaattaagtccaaaagcaatatttcaaaacattgaattttaagtttgacaaaatgtataattatttcaaatcttccataattatatatgtaactaaagtcaaaatcaaataaaatgtttttttgggattaaaattaaataaaagttctctcaaaaaaaatcaaataaaagttacagcttttacttacctgggaccccacaattacagcaccgtcctcaagaaaaagcgtgaaattactggtgagattaaaacttcccgttagccaccttcctctcggcacgttcagctgagaaccaccttccttcccaaaacgtttcaggaacccaatcgcacgccgaaacgtttcggtgtttgacgtcttcccatctccaactccaccaaaatcatccctgatcgacatcaccaccttcctcctccgaaccccctcgaaaaatccacaacagcttctcgaatcatccgtcgtcgatatcgaagaagaagagagcgccgtcaccggaacgggaataaccgggaacatcggaaacgccgccttcgtcgtgatttgcaaagacgccacagcaacaactgtcaagagaagaagcagtgctgcccatgtcggtctcataaagttaccggccattgcaccgtagatggacctctctggatccattttttgggtcgacatgcatgaatacagggattaaacggaaacaagatttggtttttctttttctttttccttggttggatattctgagagtatatttatattgtttggagtaaggaaaaagaagaagaatcaattgtttttttttcttttgggtgaataatagaacagtggggcgtaatgcgcatactagcggcgtaggttaagaagaaaacaggagcttacgtgagtaatccgtgatataaggttaaaagcgtcgttggtagggtgcgcactgcgcttagctaaggggcatttggactttggagaattctcgtgtggaagcgtgcgttcgatccgaaacggaaagttcatgaggtcgatccgatttgttcggtaagatattagatatatatgaattatcataatcaggtgtatacggttgcaacttttttttgaaagatcagccaattaaataaaattgtagatttgaaagtattttcagttgattctgaaatgttacacgtggattaatattgttgctttgtacatgtggactgttgatgcagctgcagagaattagaaaataaataaatatttttgggctgtttttctttgtccgtttcttttttcttcgttgttttctcaaaagttgtcttgttttatgtattgccacgtgttgaaagaaaatgttaactgcaatttctaaccttttttatttatttattatataattaaaattaagaacaataacatcctcaaacatattatccctggaaaatgaatcaaacaaattcgaatctgtttaaaattcattgtatgtagataattcctaagaaaattttagtgaaagtcccatttgtggtagttaagggtgttactgtatttgttgtagatttcataacatatagttcaattccttgagattttaatagcgggtaagtgttattattaattgtttgttatgtgtgtgaaccacttttttttctggataaattgcaatcacacttaatatttattcagttattgagtttttttattaagaaaaataacaattttagggctgtagtagtttggtccaatttcagaatgtttggaattaatttcagacaaaatcctaacttgagtttttagaccatttcagttcatcaaattcggacaatgttattctaatcattacttgtcatgtcatgtgctttttttttttacgatttaatcacaaataaatattgttgtattatattggcagaggtcgagtttaaatatggtctcagtgtctggtacatcattttgggattggtttagtcagat

SEQ ID NO: 379620 - DNA, 1939 bp, Cannabis indica
atatccccactaacatcgttcctacaaacaatctaaattgggtacgcctctgggcagactttgtttcgaaaagaggaagatcatcatcatcaccatgattttttcccatattcttgtacaatatgtggtgagactaatgatatgaaatgaagtgttcaattatatttaaagagtaacgagctcgcttcagtaggaaagaatgacttcttggtagctactgaagttctagaccatttggtaacaaaaagagttgtagttgtgaaatctaataaaaaaaaaaacctaccaaaaaagataccagtcaataatataaagattaatgtggaaaatatctagcatgttttgatacaaattaagtgttaaactgtgctattcataaaattaattatcaaatctatatcaactaaataattataaggtgttaggcactactattaatactccataagaatgttctaatacaacccttaaactgagcaaaaacataaattatcttagttgcaaataaaataaagtattttaatcaccaaatttgatatgagagttgttgtaactaaattttaatacaaattttaatatgttatttaatgctcacttaataatttattaaaaagatataaaataataataatataaaattaaatgtaaaatttaataataaaataataataatactgcaagtttaaatgagtatattattagctaaaatttaatattaaacatagtattagtgagagaatgagatattagagaggataatgttaaatttttgtctatatattttctttttgttaagagtaaaatgtttaagaaacttttatgatgtactcttaaaagaatgcactgattgatgcacttcagggttggctcaagagtgagcagcaggggctacatccattgctcccattcaagctaaaaaaattaatcttataataaaaaagccagaaaaattatattttatatttttactattgtttttttaaaatttttattatattctaaaaagaatacttaatttatttgttaagatactatatttaatattttattaaaaaatatcaaattacatttttaaaatattaaattttaaatttttaccaaaatatataaaaaaatataaaaattttaatataaaaaagcttaattagatttcttggcccaaaacctccaattagcttgagacgggcctgctgcactctctagcctaattattttcataatcgtatacattgtagttatttaatatatctagtaaaattttgaaaaatttgaaaaaatttaacacaaaaagtaagatttatatagtctattacacacatagtttttatttcatacacgtgtaaaatttaccatttaaacaccgatttttatattataaattatttttaatttttaaaaattatacaaaatatcttaaacttaaataattactacacaaccataaaatattaataaataaattgaactagatgacaaaatagtaagagatgtattagtatagtttttttaagggcacattatcgaagatatgagaaatgctaaagggcaccaatagtgcctaacacactcctatgtgtcaatatcgctattggtccaactaagtatcgggtcccatataatttaatataataacttttagggagtatcgccagtcaattgcaacgcgatatgtcgaaaaagtgctaggcaccattggtgcctaatagcaatgctctaaaataaaattaagttgttgtaatctttctccattcccataataaaattcttcttcatttattttaaaagtttcgatcccttttatattttcgactgtaattttaccacaacatcctaacacactacaatctcagagcgatacatctggtactgaatctgatgctggttatcaatacgacgttctggaaatagttctaggcgaaagatctgactatcaaagagg

SEQ ID NO: 379621 - DNA, 804 bp, Cannabis indica
ttcgttgcttgtatgttactatgttgttgttccctaaattttggaatatccgatttttttcattaatgtctggatttaaattgactgaatgcacatgtatcacatttgcagcctgaaagttggatagtgaggagcctacattcaggaaaacttctccccttctcagaatgaagactattccttgtcaagtttaatgattacatggtttctcgtttaccaaacaaccaggtgaagaagtataactctgctgcttaaacctctacttaggaggtatacatgtaaaggtaatatatatttaaaatttcattgttctctctctgttgattcctattactattagtatatgatcttttggactaggaatatcatccaaataagccatttagagtttgttttgtgctcaaagaatgcctattttatctttctcaggctcgtgttatggaatcttaagctggatattggaccccaccagataagattgcaatgcaagtaaaatccattacaagagtgagtaccctttgtatatgaaaacctaaccacttcttaagcttttggtctgttagcctcagaccaaaaccctaagctgttcagtattgtatgaaatgtctattttaatgtgtggtccaattcaaaaccagatcaaccacacaaagtaaaaaactaggaggtaccctatatcaacactcttttgtaaattaccttaacccaatggccataccaagatagaagttaaaagaagagacagaatgaggaagatatgagatctttggtgctttttttttttttttttttttttttttttaa

SEQ ID NO: 379622 - DNA, 6057 bp, Cannabis indica
ctgacaaagcccaaacgacacgttgtttttctgcttaaaaaacgacaatttcaccccagataaacgacatgtcgtttgcccgacagaggcaaaacgacaagtcgtttttcgtcacccctgtcacccaacaaacttccccatgggtccgcgggtctgcaactcggatcggcgcgacccgtttcgtgacccgatcggttggagcttcccggccaccaaaaccgacggagtttgaggggttttgttccattttcaaccttctatcaatttctatcatccatttcatccatttttcacaaaaaaatataaaacactacccataaaatacaaatccgaaaatgggtttccaccattgataaactcaatgaataaacttgcaatcttacaataaaccatgcaataatcatccaaagaacaagataaacccattctaaaatatttaaactcattttatccgaaaataataaaaaaaaattcagatttgaaaaaaataaattaatgggttatttcaaatattttggagctctaaaatcaagtattctagctcttgataccaattgttaaacattcacatagattatgaactatccaaacatacattaaacatcattgttcataatcattaaaaccaaaatcaatactttatttagagcatcacaaatgtaaaacacatacctcccatattggtattctccattgttgctaagacaccaaaacctggaatgtgaataatcaccaaattggtagaagagaacctatgagagtaaaccctttttttcaccacacaccctcttaactcatactaaacacatattaccctttttatatacaacacttaaccctaaggggttatattagacttattggggtaatgagcataattagtggtggactataatttaatgggccaattatagttttaaggtgctcccatgtgcctctaatacatttattaattattagccatcccattatggtagtgaataaatattggacacaaagttaatgattgtgattatggtattatattagtccacaaataaataattctaacaatcatatttcaacttatctactaatcttttgggttactcttctatttttctcccaaggactttataagattccgtggcgtgacacttataattatttaccataaatgcatcgatgaatattaattagtaagccaataaggatatctattgaaaacatgtctaatgcttgccaatatcagtttatgtgataaatttgaaatatattaaacttcatttaatgatgattgggattaaataattttttctcattgaatctttctttgttttaaactcttaggaaacctcaggaacagaactggccaataatagatcgtatcaagctgcagaagacttaaaagatcctatatcatcatcagttgaaggagagagttcgtctttgaaatccacaaagactacaaaacagagtgatataagtacctcacaggaaaaaactttgaaaaaccagacaagataattccatgtccccggtgcaatagtatggacaccaaattctgttactttaacaattacaatgtcaaccagcctcgacatttttgtaaaaactgtcggagatattggactattggaggaaccatgaggaacgtgcatgtggaagcagggcgacgcaagaacaagaacacttccgcttcacactatcgccatataataacacctgatgtcctccaaaaagctcaagtgtttgctacaaatggtgtacacaacactacattaggaagcaatggtactgttctttcgtttggctcaaattctccgctttgcgaatcaatggcttcagcactgagccttgcagatagaagaaaaaactccgtttcaacaaaagggtttcacggtcctgaaaaaagaatgtttgtttcatctggagtagcagaaaatgggggaaaccaatcaagcggatcttctgtaacagcttctgccccgtccgataagggagggaagccaatggtggttgattctcaaggctgtcctcaactaccatgcttcccagggccaggggcctcttggcagtatccatgtaattcagcgcagtgggcagcagcattgcctactggattttgccattcaggctttccaacttctttctatccaacacagccatattggggataaaatgcagcagggtcctggaacgtaccatgcttctcaccatcatcttctacaacaaccaactattctgtaggaactgttccaaactcctcaatacttggtaaacattctagagaaggagaaattcttaatccgactactggacaagaagatccacttaaagagaagaataatttttcagaaagtgttttgataccaaaaacattaaggattgatgatcccgctgaagcttcaaagagctccatttgggcaacacttggaattaataatgacaagttaaattctggcaatgggggaagtctccacaaggcttttcaatctaaaggaaatgagaaaaattatggagttgaaacatctctaatactgcaagccaatcctgcagctttgtccagatcactcaactttctagcggcacataattactactgaattggaagttgtaaactgcagctaattgaatagtgaaggaaggagttaaacgtcactcactagactatcttgcttttaacaaaattagatagcattttttaacatatacggtgttattctcttaatgatcaagaccactgcaaaaaccagttcaagtggaatctactctttaaaagaacaaggagaagatttgattcaacctgatttttcctcgcaggcgatcattagctgtttctctatagttaatttagttttttcttcagtgatttttttgtctcccacacccttgtaaatcatatgaacaggttctttttttctcctcagaatttagtcacatgttcatgtaaatactaatatattatattgtggaatatatagataatgaagtgaaatgtttggaacaaaagaattcacgagaagttgaataaatctgtactcttccccacatattatcttctacttatatcatattttaacttctgttttcattgaaaggagaacaaataaagtattttcaaaactgcttagtgattggattttcacttttagtcaaaaagtacaagatgcatagagatattagttatggtaattgtgcgcgtggggccccaattgaagcataaatacatgattgtgtgataagggaagtcgacaatatcaggcaaatagattgcagtatgttcttccccagctcaacaaaggtacccttttctgacacacccgataaggttactgcttaatagattttttgcaaaaataaatagttaagtcaattaagttaattataatatccaactatatgcttagattcaaagatagaaaagttagcgtaggcggctctcattttgtgcagataaacttgaatttatatatgggcaaagcatctttctctttctcaactctcaagcataaaagaatccaaattgccaatatggaaaggtggaaaaacaaaaagttgatgttttccatttcctttctttcgtttccctttctcttttctctcccttttgttgaatattctttcttttcaatattatatgtaatcactattctgattatgacttttcctttatttttacttaatttagttaattattatgtgttcatgtacacattttatataaatctgatgcaatatatgtgtctgtaatccgtctgaccaaaaaaaaaaaaacaatcagatttttttatttgtttgttggtacgagttattattgtccccaaagcatgtgcttctgttcattccatcacttaaatcttcattacgaatcatttcttttgtttatgatgtttctgttctattcctgcacgaaaaggtaacattttcttttcttttatccatatatgtagcaatttaacctttctaatttaatttgtacaatcctattaatctaatgtcatctgcaaaatgtatgatggaaaattaaaactactcaagatcaaattaaacaatcaatagataaaataaatcaagaaataagaaactaaaatgcaactcatgttcgattaaacaataacagattataaagcacaatcaaaacacacattaaacagttaaacatcaaggcaaggaatttagcctggttcacatccaatgtttagtgtgaactttggtcctgctcctgctaagaacatgatctcagattatttatcggatcagcaacaatttgagtacatcacagttgagaaaggattctcaatctcaggttctcacaagtatttcagtctcttactctcttacccgagcataaagattcatacattcatgtagctcattacaacaccctcttagaatcctttaataatactctctcttgttgacctaaactctaagtctcatcgtttaaataattaataaatattttattattatttgttagtaatgagttgttgattttgtaacacaattgaagatagtaattttaccaaaattcttgaaaatgtcccgaagttgactccaaggctcaaggaattcaagacaagattccatgaaagtttatttacatgtcctagtcttgtatagtgattttcaaatctatacttaaaaatttctaagtacgaattttagtccactaacttgtgagataaattatttcacaaaaatgatatctaaactttccaaattaatttgtaagactccatcactacaagaatgtgcccttattaattgcgctggcaaaagtatacaattgtcggtgcaagtcaacaagtgcgccggcgaaagaagtcaacaaattggagccagtccaattttttgccggcctatattttcgccggtaatagtgagttgtgccggcgaagaactttaacttccccggaaaatgttggcaatcgaactgccaaaaggttggaatttttggcagtttgattcatcttttgccggcgaacctacatgcgccggcaaaaggcaggtttgccgacaaaaggtaattaatatttttttacttttactggtgcttaaatgcgcaggcaaaagtgttaaaaaaaaaggcggtcaaattccctcgtagtgacaaaacgtgcgtgaaaaagtaggtgaaagcttttgccgtcgcattgaattgcaccggtaaaagtatttacaatttgaccaatcggcacgttgcatcagggtttggcttttgccggggcacaaatgcgttggcaaaagctctaaaattttttggcagtcaacttcccgcctaaataaggtcccacattttttaaacacagcgtttaaagggtgttttgtcagcttcgacttttgtcggcgagcctaagtgtgccgacaaaagtccaggctaaataaaagccttggaagaaccccctcccccattttgctcttttctttctctttcttctctttgttttctctacaattcctccgttccccaccgcgggcagccacctctcttccccaccaaccaccattttcaccatcctgaggccttattttctctaccaaatcattaattctctctttttcttcctttttttcatttttattctaaataaaaaatctctaccggactctgacgaggacgtgtcgccgcacctccagcaaccgctgcccaagcctccaatagttcttcacatttcatcatttcagtcaaggtaacctatattttatttattttagttttcatttgtgtatatatagtaattttagtttatttgtgtataaaattatgtttatttttgtgagtttatatatgtgtgttaatttatatagttttatgtgtatttttataaatatgtgtgtatatatatgtatgggtccggttttaatggaaaccgaaatatatacccactgatggaaccctcatttttaacccttagatcttaatctaatggttgataattgctgactaggctaagttcactttttgacttttcaaacgttttgaagggcaacttgatggtgacctgctgacatggacctacatttaaaatttatttaataaattaaaaattaaactaataaagattcattcct

SEQ ID NO: 379623 - DNA, 2925 bp, Cannabis indica
gttatttgtataatttaatattggatcatgtttactgagatttttaaaaaattaattataaataattaaaactaaagaaataattgaacttgttacgtgcagcgacaaactatttgcagaaggccaactgtaagtccttccaaatattaattgatcttaaagctactcgcttccaccaatcttctacaaacttggtcaacgttatagaaaaacataagcacttggcatcgtcgctaacttggggaacttgcatcattttgttgtacttctccaagtgtgctcacggattgatccttccctcatacaactcaatgtggggcattttaaagttctttgggagtggggtctctgtgatcctccttacacatggttctcgatcctcatcttccgaattcaagagggctccactttattttttgaccagcttggttagagcaactatctgctcctccaatctttttgtgtcactcttgagaagatcatgtccccctcattttgtcacttacatagttcctgaggtcacccccacgcggccttgctttttcacttttgtacttctcatacttggcgtttaattgtcgtctaaggtctgtggtggaccagctatcctgagaatatcctgcagtcgtcctttcatcctggttgataaaattactggggtggttccttcaccctttgggcttgggtaccctcacactttactccttcgtcgtagttttgcctctagaatcagaaaggcattaaggcttaaaagcaccggtggccttcttcatccttgaggcacaaccagacagattcatgtctctccaaagaggtttaggagtagacttttgtgggagctcatctaccttgccttacctttatccttgcagggatttcaggtttcagccttcgtttgtctatgagcatgctctttgaccattacttccactgaagggttatcgttggactccaccaagtcttcgaacttgttttagaggcgttccgtcattggtttcattttctcaatgagcttcttcttttttactaactttgtatgagtaacttctagttctttggttactcgcagcaagtttgggtcatggtcatactaataaccatctttataaaatttgtctttcacatagccatcgtcatcgtcctcctcttccctatctccagggttcgggtcatcattgatgccatcaaacacgttctggtatcctcccttcgattctcagcactagttgtaccttcttctcttacacttcctggctagagaccgaaggcaagggagtttgcttcttccataacggtgtccagggaagttttcttgctttatgttctttcgtgtattcaccatggttgaggtggtgcgacgattagcaaactttcctaagctctcaatgaaagcactaaaatatttaccgaaatttttaaaaacattaaagagcttaagaaaaatataaaacaataagtaatagacaagtaacttttacgttattcaagcgttaataatctctagtccacgagtttgttgtattagccttgtcaatgagtgtttgaatattacaagtatttatattatcaaaattaactctatattcttgttgtctctctagaagaagaaagctagtaggaatttttggcagaggttttgtaagtatgtaattgttcaccctttgcatataaaaaattagggtatttacgacacgtatgtgggtgagggcatgcccttcacccacctagggttttgtattcaacacaaaacaatggcaggtactacaacatggtgatctgaccattggtttgtatgaagctttcccattgtgtggtgtatggcaggttcaaggtaattcatgggaataaggacacgcgtcacccaaagtttcatcttgtaaaattattcctagacaagtcgttggacaaaaaaggggcttcagaggcacgtatgcgcactaccaaggtttgacataagggacaaaatttgatttggtgtcaaaaaaatatgtaattgaatcctgagctctgggtaagatattgccaaataagttctaagaacatctgaccattgccttcaagattagactaacttgctaccctcttggaatactcataacttctgatctttttcaatagcagattaatggttggagtcctagagtcctttttgtccttgctgatagggagaacctttaggtaactcctagaatataacatcttttgcgatgccaaaagtctgaaggtacatgctaaacgcgcatgatttggcgtggcacatttctgtgattgccacgtaccaggcattcgggaatacagataccaatattagattttggtattgtatgtatttgtatttagaaattgaataaatgctatgtaaatttaaatatgtaactaacgatcgaggagctagcttccaaatcataatctttggttcctatatactattttctgaacatcacatgcaggtttctccacatgtagatcgatcccggagacaacctttttcactagtcctctgcagacttacttaaggtcaatgaagaacaaaaatattttgcatcatcactggccttggtgacttgcatgatgcgattatatttggacaaatggtctctggggtccgttcatccttcatgcagttccatttggggcatcctgaaattctccggcaatggcgcatcaataattcttttcacacaaggctttgtatctttttccttagaatcagatacgaaaccactttgttttctagtaatcctctccgtaatcttcatcaactcctcaactttacgttctaggcgttgggtcttgtcatttgaggattctctttcacgaacctgatcattgatgcggttcttcaaatcatttttgtagggtcttacttttttggctttagctctttcctttttagcatccagttttctttggagatcatttgta

SEQ ID NO: 379624 - DNA, 1650 bp, Cannabis indica
gaaacgaagtagaaacccaagaacctaaatcaaccaagaaacaatgaaactagaactcacatttttatctgcttcccagttggtctgagccatattgttcagaacacaatacaccaaataataatgccagatttccgagccactgactacttgttctacttaaattcacctctgaataacaccatatctagaacaggaaacttgttaaactttccgttaatttacagataatgaatccccattaagaaaaacaaaaaaaaggagaaaaaaagaaacaacaacaaagctagagagacaaacacaggaagagagataatctgtaattttagcttatcaaattacataaacgaataaataaagcaaaagattgacagatatacctgcaactccgaaacgttttattttttcatatattttttttacatggtttctttctttctttctgttaaaaattaaagaaaaagctttttttatttttatatatataaaatataatgttggtggatgagttgcaattcgcggatatcataatggggttgaaattacgaatttacccttggaaccccatcaaattttcaatccctactagctcacaaactagtgtgcattttaccctcttctttggtagggtatgactgaggatttttttgtaattaagggttctcctctatcaacaaaaaaaaatattagttttcaattctattttagtttatttatgaataactttttcaaaatgaatcatttaaatctcatttcattagtcagtctttggtaatattttatttttttattctttttttgaactaaggaaaatttttattcaaacataacccaaaccagtacagcagcagtggctggaaaaaactaataccaaaaaaaaaactctacagtcttctaattacatcaacaataaaggcttccttttttttagactatgtttggtaggggggagagatgggtggatggagaggggtggagggagagtgatggaaagaaagactaaatcacttgtttggtaaaaggaagagaaggagggagaggagagatagaggaagacattctccctccaaaccttcaaaatttaattgtagaaaaagacaaaacaaattttacaaaatacaataactacccataaaaaataataaaattttatttttaaaaggacaattttgttattttactaatcaattttttcttcatcattaccttacacctaataccaaacaatacaaaggagattaacaattctctccatccattttactctccatcatttttaacatctccatccatcttactcaccctccctcccaccaaacatagccttaatcttagccaaattaagacccaaaaatatagatttttgtagctaactttatggccttacaaatggtaattaccgagtgacaagtatatttaaagaccagggctggcccaaatatttttggggacctttgcaaaagattaaaattaggctttttataaaaataaataaataaataaataaataaaaattatgtacattaagaccttcattgctagttttttacttctttttttttaagatatatttctaaactttcaaatataaattttttaatatatttataataataaaaaaaaaaaaaaactacttacctataaacaaat

SEQ ID NO: 379625 - DNA, 3175 bp, Cannabis indica
cttgcataactctttaagaaaatgccattcgactcggtcaaaagctttactcatgtcaagctttagagacacaatgcaaagcgtccccgagtcttattcttaatggtatggaccagttcaaatgctaccaaaatattatccgtgattaagcgattcggcaagaatgctttttgagtctctaaaattacatgtgtaagaagttgcttgaatcgagccataagcacttcagtattaagcttcgaaatcacattacataagctgatgggtcaaacgtccttcatacattgagtcttcttaattttttagaataagagtaatgagtgtcttgttcaggcttgaaggatcagccccttcgctaagaacttttaatatagcttttgtgactaagtctccaacggtggaccagttttgctgatagaacattgctgacatgccatcaatttttggactcttatcagaaactgttgtatgtaaggccaaatccacttctgacgcttcaaagggtttcacaaggttagcattcattttggtagtaactaatgtacgaatggtactaagagtgaagtcaagagctgattcatcaataactaaagccaaaaaaaaaatggtggtgaaataatcattaatgacagcagccatgttagtttttgtttgcattttaccacctgtgtcattataaagaatcttgatcttattgttagaccatcgagcagatgctttagcgtgaaagaatttcatgttcctgtcacctaaattcagccagtcgatctgagagcgttgttgccaataaatctcttcttgttccaataactcatccagtatttctttggactattgaagctctatcatgttgtcatttgttcaagcaggtgtgttattgagattattgactttggtctgagcttcattgattcttttttccgtgccaagactgtagaccggttgcacaagcatcaaagtttgtaataacaatttgaattggatcaacagagttcagattgtactagcatttggtgattatttctttgatatcagggtttgaaagccatagcttttcaaagcaaaattggcttctctttttgtcatgttgttgcagtagcgagattacacgatgatctgagcaaaagaaatccagctgatgaacctgaggcttgccaaaatatcagtcccaatggtgattaacaaaacactaatcaagatgctttccaatagtttgaacaatagtacggtgtttggcccaagtaaaagtctcatcgtcagctagagtttcttgcagaaaatagcgatccaaggcagtcctaaaagcatccatttgagactcatgacgtaggtagccacccgatttatccgcattggtaagaatttcattgaagtcgccaatagctagccaagggaggagcaaagcaacatcacctaatcgttcgaataaggtccaagatgctgctctgttattggtagttggtgcactataaaatgcaataaaatggaatgttggtcctccatgagtggccatgtaataataaaaaaagtgtgtccaaagtttatcaaagtaacatcaacatcattagtccaatagcataagacctctactaagacccactcgtggtgatttaaggccattattaaagtgtagtgattgatgaaaacaggaaatagaattattattgagttttgtctccatgagaaacaaaacatggggcgactgttgttggactaactattggaaatgtctgaatgcacttgggttctccaaatcccgtgcattccaactaacaattttcatggcgagtggtgggattgcaaagcaaccttcgctgtagagtcaagaaaagcattggaatctgaacttgtagaaaacaatacctcatcaccatcatctcttgacaacaaagatgcagctatgtttgtgttacctcgacatctctttaacattttacgcatcgatggagaatcattggcttttttaattgtgctattaggtgatgcattctctttatccatgccattgtgaatgatcgaggtaggaggcttattaattattgcacaaagagtacttgtagcataagagaatgtagggtgatgggagttgtttataactggtgcagtggtgcaataatttggagtaatcgtggttgtatttggtggatatgtggcaaaggtattacggttaacatcacaagcaaacaatgtaggcccaacatcaggtataaagacatgtgaaaggtcagcaaaattggattggggagcatcgatttaggcaatcatagattgaggaagaatcccaagttgtgcttgttaattagttgttggctatggtgtgttggttggaggagtttcagcatgttgtaaacgaggtgtagggaaatttgtggtgtttggagaaggcagtagaccattgctttgagtaaagggactggtatgcatccttaagtttgggttagtcatgacattgacagtggcagttgtggtttaatgttgcctggtagtggaggactctccttgaaacagagttcgtggttccaagttatttcagtgttgcaacaaaggcagagcattgatcaaggaagaacgtgcaagtctagtaagcaaaggccaaggattgcttttagaaaaatcagtacggtagcgatcatagccatcagcaagaagtttcgatcctttaagccatggtccatagggaagttcatcatcattgccattatcagttctttccatgaatttaacacaacgttcaaacgggtggcctagaagacaacaatcaaaacaaaattttggcaatctctcatagcggtagtcaacccaaaattcatctttgattctcgataggcgtatatttgtccatgaagtagagattttgttatgcactatctaatacggagacgaagaaaagggtcccatacttaccaattttatttccaagagctttggccaagagtgaagatttactcagaaaaggcagccaatagatttgtacccaaaacagtgtgtgagtcatgtcctcatttgagacattttagagagcacctagcgtgagaagcacaatgagattgttttgaaaatgtcaagttccttgtcaagcacccgtcgtttgtcaccttcacaactaaaggtaacgtggaagatttcaggcttgtaatcttgtatggagacaaggaagcatgttggaaattatttt

SEQ ID NO: 379626 - DNA, 1269 bp, Cannabis indica
ctctctctctctctctcttataaccaaaattatatttgttcactgattactgagtcctctctctgattttcaggtaaggttcacggatctttggctcgtgctggtaaggtgagagggcaaacccctaaagttgccaagcaggacaagaagaagaagcccagaggtcgtgctcacaagcgcatgcaatacaaccgccgttttgtcactgctggtaagtttttatttcataataatttctttttttcttcctaaacaaatcaaatttatttaaattgttgattttggtgacctttgaattttaattgagttatccctatgggcattttttgtatttgttgcagtggttggatttggaaagaagaggggacccaactcctctgagaagtaaggtagctgtttctcaaggatgacacctctttaggttattatggagacatcgtttttgggtttttgaccatttgttattgagtttacatgttatttttaaagaccctttttacatgttacaggattgtgctaaagctatgctttaattaaattaaattagaagtaatgtgaattcggttttgcttgtttgtttgaattgccaaatctatcttcagtcttttttgatgtaacaaatgaaggagataaaaccaagaatattgtcttttatggagcttcttaaggtagagctcttggaagagtagattgggaaaaccaactctggtaaaaacagaaaaaaatagcattacaatttgaggtggggataacattgctggagtctttatgtgactagtcagcttaagccatggcctatatttgcacttcaagccttgaatcggtcacatagctgagcagcattcacttaaagaacccaagtcaaaagatggaacataagcatgggatgagttaattttacgcttgagactagatgtgtattagaatctggacatgtcaaattcagattttaaagctagcattaatgattttagaactcaagcatggggtgccttaacattggcttataacaaattgttaacaccatttacctccttttacaagttatcaagcttatgtttggccttacaaatttcttggactccactgtctgtagagttgagagtgggtgtccaatatgataagagagtgcactgctacaaccttttttttaagggtaaatacaattttggacctctgttttacaaaatttaccgattggatcctgtgttttaataaatgacaaattggactctgtattttttaaaatagtacaaataggaccttgaa

SEQ ID NO: 379627 - DNA, 1516 bp, Cannabis indica
agggtataaagagtgcaaccttgacgtttgggtttgagcctcaagggtactcagttttgtgcgaatgcatacacttgacctaccacacgcgccgtccgagctgggttggttggcttttttacagaaaaattatcgttcatcttttattttgctagctctttactcaagagggtctaatttagccagaagaatagttggtaatcactcttccactaacccaattggtgacgacacttagacaagagttaattgattatggttcacgaaaataataataataataatacatagaataaatgaataaataaaatggcgcagaagcgaaaaagcacgcctggtgatttagagtaaaagggtgcgtcttcaatggcgaagattgttaagagaagcaaagattgggcccttcaagagagctcatccatggcttccaatagttgaggacaccctaagagaataaattaagtaaacctggcaaacatattcggcgacccaaaccttgtcaatggcgagagaagaagaatcaacagaggactgtgatttggatttaggatataagtttagtgttcaatgttgcagcggtaatcgattatcacaacagaggactgtgatttggatttaggatataaggcattatatgaatttatgtgaagttttaacaaataattttccttgtaaacacaacagtcttctgattcagcattccaaactagactttttatcaccattttttacaagaaagaaaataagagaatccaaattgctgaatttaatttaaagctttacaggaagtgaatacagataaaagaagacccaaatcacagattgtgtgcccttcaatttgctgaaggaataaaatattcttttacaattaattacttattacatatacagactgtattactccataagcaattaaattgatgtggtttcaacttcattgctaagagtatatcacatgaaaattaacaaaaccataaacttgaaaaggttaattaacctaactaagagggcaacgacatataacctgtaagctacctaaaaccgaagttgcagagctaactgtgaaaaccagagttgtgattttttttgaaagagataaattcagaaacaaaacctaaaaatgaatttaaaaaatgaataagaaatatttatgtaaataaaagtttataaaattgaaaattaaaaaaaaaaacggaaaagaattacaaaagttataggtaatttctgttaaaataataaatatcaataaattttacaactttttttaatttaatacataaaaaaataccattattatctttttttctttaaatatatatattatctcatcttatagcatcctaatcctaatataattacactatatatataatcctaatgtaattagaaaggttttttttttttgaaagataattagaaaggttttaatatctatataaactactactagttcatttatttcatctcaaaattattgtatattctttctctattaccaaaaaaaaaaaaaaaaaaa

SEQ ID NO: 379628 - DNA, 3820 bp, Cannabis indica
tacctggacagtgagagtcaatatatgttacatgaatctacaagataaattaaatttggacatgacatactatcctgagaaataaataaagaaacttaaacaatttgcagtggacatttgttgagtttgatcgatcaagaaaagcaacattgtcccacacatgcatctagtaataatgagaaaaacggctaagaaaatccaaagaaagatgttactgtttcggagaaatgataattcaatgtaaccccaaatacaagaaccgataaaagaagaaaaaggacaaggtatgccaaccaagtgtgtaacttaccatacatgaagtactacttccttctttcgcatttgtggatatgcaaggaccaagcttcaaagctttaagagcctttgagagagacttgagataacttgttaagtcccaaccattggaaagagagagaaaataatcacttattgagccaacaagagaagcattaccactttctatcctcattgcttgagggcaatcgagtaatacaaacccagaatttgaagatttcccataatctacatccatttgattcccaaaactctgaggtaaatgagttcctagtttgcatgtctcataaactggaagagaaaaaaaatgagaggaaacaaagagtgttacacaattacaaagtgcaaaaccaaagttagaggaaacgccaccataaaacttaaaggtgcaaatgtcaaccgacgtctctgaggacttcaatgcaattattagttgcattaacttataaaatttgtttctttaaccaaaaattgtgcaatcactttatttgaaggaaaaaagcacaattaataacctagcagttatgtcccccactaatttatatcaattaaacataaatgccaggaagtaaaagcaaattaaagatcttccttcactttaaagggaatatttatgcagacatttaagttccaaactccattgtatgttcatgttttctagcaaatttattatcactcaccagtagccaattgttggaaaaaatcagaagcagcagaagtaaggggatcaatgtttgggcatactacacagtaattaatctgcaacaagtaataggatgttcagaagatgcaagtgattgaatatactcttcacagaagattgcagttttataaaaagatcaatgaacttacaggtttgggcagggcatacggttcgaaaggagccttttcccatagctgtagagaactcgccgatgttttgagccaatcatcctgatacctgttacaaaagtcactatttaatagactatcacaagaatatgattaaaacaaaaatgaatatgattgtaaggtcaaggtgcgagaatattcacacatttatccagaaattcagtgtatctttctcatagatgtcttatgcatattagaaatgttgctaatgaaaattgatatctaatataacttgttgttgcaaaagtttgagcagaaggtgtacccaagaagtatagaaggcaaaggaacaatataaagtgttggtctaagacgagagccaattgacagatctgcctcagaaccagagttctcttggttcaatctcctttggcatgtctcatccattttcacaccgtctgcagcactaggcattgagccaaatggtcaaactgattgttatgatgaaactaaacaaatcacggatcagatcagcgtgataacacgcatatttgcaaaggtctaattatacctttgaggctagattgtccactagaagtctgagatgggctaattggttccccaatagaaacaactgcagaacttgattcattaagagatgattcagcagaatatccatcacctgtgttccctgcttcacctgattggtttcgccctttgcaccaatccgtgacagacaatggtccatccatagcatcaaatgcagactttaaagctgatttaatgtcagcctgcagcagactaaccaccgaggaagcatatacctgacaagaaataaatattgaatcttctattttctatcaccgtgatgtcttgaaataagtatacttgcataacaggtcaaatgagtgtatcaaaaataatcctataaattgtgaatcatgaataaagagatcttacatcagcagtaagtggatcgattaactccactccagcaatgtccaaggaatgacaagatgccaaagtccccccacagcctgcatgaaccatagaaggcccacaggaaaaacccttcctccactgttcttgtaatgcaagcaaaccataaggtccatcaccacactctgcatcaagagccagatcgacaaaggaagttgcttgttggacaagtaatgtcataccatcgagaagctcttgaagtggttgtctttgcccataagaaagaataccttcctcattgaaggtcttatgaggcaaagattggctaatttccatacttggtgaatttgttggtttcgataccctaggaacaccaacggagcgccaaacaccaacaggagcattgagatgcccatctagcatcctaccatcaatatcaccagctattctaattggtatagattctttcttcttcacctcatatttgccagataagttgtctgtcatcatacttggttcactaggaagctgatttagaatagtgtttgaatttaacctgtttaaacctactgacgtagagctacttgaagataatagggtatgtcgaatcctacacatggaagcttggaacgtaaggcactcgatttcagttgcaagcgtggttttcttagagagaaatagattatctgaatcaaatgtgctatcatgaagcttcctctgggcagagttagtggcagttatggaactggtatttgaagatgaagcagccacgccatcagatgcaacaatgctgttattacaagatcttctgttgttttggtctttcacactctccacaacagtgtaacagttctttgactggacattagtacttgaattttgctttaaattgttgcaaatttttggatttatgagggtgccagtcttctcatcacccccatcaaaacaaggagaactaggcggtgttgcaccatatacataattgtttgagcttgagcttgaactttccactttccgagatttgggacagtatgggcttctgaagatggatgaagataactcacttgaaggagtttccactgccccaaattcagaggcaaatgtcatcagagcttcagcttttataatatgatcaaactcggtggaaattgtagaagatgctgcggattgatttactaaaccaaatgaagaggagttatttatgaccccttgatttttgctgagaacctcgtcattaactgcttgaggtggattaaagctgtcaaaggaagtaaaaccttcattggaaagcaatggatctgaaacatccatgataccacctgggctgctgagtatatcaccacaatctggtgcagagaacataagagcctgcgattctgcagttcctgggggcttcagggaaaggacaaagtaaacatgttcagacttcataaatttcattttcaatctctttctagtttttacttacctattagcaacagacgtaagataaaattaacttctacaaaaaaaaaacctcaagtacacattatttatcacccataatatattataatttataagcataactttctaatttgtttcgacaattgggaattttttttacttatgagggaactaaaaaaaaattatcctaattttgtggtttaaaaacactacatattcccctaccagggataagtatatgtgccataacaaaaaggtttaaatcataagtaaaatataataaaatcat

SEQ ID NO: 379629 - DNA, 4218 bp, Cannabis indica
agagtaaaaggcctttgagagattgaaattccagtaggtgatcgactcacctcatgccaagaaaaaatcaagttggccaaggtcttttaattgtatttagcattcagaaattttttgaactcaactgttgctgaggcattgctactagcaatgacaatgtcatctacatagatgagaacagccatgaagagtttgggagtggatttacggaacaaggaatgatcagattgggattgagcaaaaccattagagattaaggtagtgcttattttagcataccattgtctcgaagcctgtttaagaccatagatgctcttttggagtttgcaaactgcattggggggaagtttggtggcaggtttataacctgaaggaagtttcatgtagatttcttcatgtaagttgccatgaaggaacgcattgtttatgtccatttgatggagttcccaattttgtattgcagcaagggcaagaaggattttcaaagtgttgaacttagcaacaggtgcataagtgtcaagatagtcaatgccatatttttgagtgtaacctttggccactaatctggccttgagcctatctactgccccattggggagatattttatcttatatacccatttacatccaatgggattgtatccaggaggtaaagaaaccacaatccatgtgtggttgtcttctaaagcctttgtttcaacattcatggcattgttccatctgggatctttggcagcagcagtgtaatgtttatgctcagtaatggtataggcagaaagtatagcttgaagaaactgaggagatagtttatggtaagacatgtagctctgtatggggtgggaggtgggatctgtagtggtgtctacagagcagatgtagtcttctaaatgttggggttttgtgatttttctgccagttttggaagttgtagtgtttggaactttggtagggattggtgcactgctggtgggatatggaacagtagtgggaggttgagatgaagggagaataatggtgtgaaacaattgatccaattgttgtgtgttattatatttgggaaaagggaaaattgtttcatggaagataacattccttgattgaaagatagaattagtttgcaaatcaaggaggttgtaagccttcattctagaagggtagccaagaaaaacacagcttttagctcttggagaaaatttgtgacgatttctgtcaagtgtggaggcatatgcaaggcatccaaatgttctaaggttgtcataggatggctttttgttatgcaataattcaaagggagtttcggtatggaggacctttgatggtgtcctattgatcaggtaagtggttgtgtgaattgcataaggccagtaaaccagagcaatctgagattggaaaaggagggatctagccacattgagaatgtgttgatgttttctctccacaactgagttttgctgtggggtatcaacacatgaattgtaatggaaaatacctattttggtatagaaattgttgatattaaattctttggcattgtcagatcgtattgctttgattttggctgaaaactgagtaagagaccaaagataaaaggcagggataatggtttgcacttccccttttgttttcatcatgtaagtccatgtatatctagacttatcctcaacaatggtgaggaaatatctgaagccttcaaggctaggcaagtgaaagggaccccaaacatccatatgtaccaagtcaaagcaatttgcagaaaaattattgtgagaaataataaaggagtttctttgttttgcttgatgacagatggaacaatgagagggatgttgtttatgaaaagaaaaaatgatctctttattcattcctttcaatatgcttacagatggatgactgaggcgattgtgccaaaggtcattgtgttgaattacagtataagcattacatttattgtaaggtaaaggagtggaaccagtagagattggggattgctttagaatgtagagctttccaatcttgttagccatcccaaccttcgaagtcactaggggtgcctgaataaaacagtgcgcattagtgaaaaaaatgaaattattgtaatcttcaagatatgattggacagaaaataaattgtacttgaaggaaggaacatatagaacattgttaagtttgagtttctggtttatgatgacagtgccagatttaataatgggaataaggctaccatttggtaatatgacatgctttggatgaacctgattattaaaagaaacaaattgctttgaatcataacaaatgtggtgagtagcaccactatcaataatccaaaaagaagaggaaaaagaatgagtaccagcaagattagttgctgcaacaacagagtgagtgtctgatttcgagttctgttgttgaagctgctgactcaaaaaagagattagttgctggtaatgtgcagtgagattaggtggaggattagtaagagtttggccagtttcattgcatgaaagatgagtagtagaaccagagacagtactggtctgattagcctgaggaggttgtttggatttgtctgacttgttcttgtcaccatagccagggggaaatccatggagaaagtaacatttgtcaacaagatgaccagccttgtgacaatgagagcaagaaggcctgggttcttgcttcttggttgattaggtggctgagtagcagcagtatccataggaggcaaagtagaaccaagggttctttggcgctcttcttgaataaccatagacaaaaactttggaaatagaaggtataggttcaagaagaaggatttgagctcttaccgagttgtaggattcgttgagtccagtgaggaattgaaggacttgatccatattgtagaattcttcgaggcgttgaagagcaccacaagtgcaatttgcagatggttaaaattacttcaattcatcccatagagacttgagttttgtgaagtaagaactgatggactaatctccttgttgcagactatgaagtttggccttgagctggaaaatgcgtgggccattttcttcattgaatcgatcgacaagatcattccacatatcagatgcaaggttaaagaacatgatgctttgtgcgatttgtggagaaaccgagtgaaggagccatgacatgaccatgttgttgcatctggtccaggcacaaaaggatagatctgtgggatctggtttgggaagactgccatcaaggaaggcagtcttgtttttggcagcaaaagccatggtgattgctctacgccaggattgaaaattagatcctgtgagaagagtagatacaagcagaagacctggatgatctcctgtgctcaagaaataaggactggaaggatcctcatgagcaggtcgatctctggtttctgtgttggcttgaggagtaggagtagagtgaatctcaggattgggaatgggatcagacgaagtgtcgccgttctcatcgttgacagagctccttgtgttgtgtttggccattgatgcgtgaagaagaagatgatcttagagaaagatcagagaagaagatgaaagcggaagcgaatgtatcaatctgataccatattagctgtgagaattaaagaacatagtgaatcgtttattctcatttattgaattgaataagagatacaaaatatatatagagcaaagctcctgatacaaagggaaaggaaacaaaactctggtataacagaataacagaattgatgcaaaggaaaaaagcacgtgcctaattacactaacaacctaactgaaataacaatcaagctaaggatcctaatacaagtcaaggcgaatagtctatgcataagtaaacttctaatttgtcttaccaatcaatctacatcccagcagccaacttctttaccatgaacggcaatttgattcaacttcaaagatgcaattgcagtcccacttggaaactatcacatatagcatgcatgaagtttaacatgcaacgaagagaatttttgaggcaaagacaacgacactagtagcatcatgcaccacattactcacaatagcggccctagaacctcccgtgaaaccagcattaacattgatcttaaatcgaccttcaaggaggcaacgaccatttcacttcaaccctcttaacttttattccaacagtggaattggtttttttattctcattcaaattaggcatgaaaataaataagatttt

SEQ ID NO: 379630 - DNA, 2117 bp, Cannabis indica
agaacacacatgcaataagctgtttgaactttgtatttggctctataaacattcgaaatctctaaattttgaagaggtataatgaataccttcataaaaaaaataaagatttaaatgcttaattgtatcgatttgagggcgtattgtatcttagatgccttctcacatatataaaaagatttggtgtagttataaaattagtctttccttcaaaaagtcaagggttggaatcttatttttttgcatatttatatggatttttcatattttctttaaacaaaattgaattgtgagaggttcgaatcttagatcttgaggaatgacagggataactctttccaatgtgctaaaagtttagaatgaatttttaaagatttgctcctgctggcaaaaattgttgggtccacatatatttagagtaaaatgatctatccttttgcatctttctatcatggaatgctcacgacttttaatgtgattgggtcctcctttccacctgaacctgccagctttatctgccatttaggctatgtttagagattgaaatttgttggttaattaaaattggaaagaaaaaagtgaaaaatacataaaataaataaataaaataatttttcatatttgatattaaatttttgttcaatcaactggttttccatacaattattttcataccaaacatgaaaaattgttttttattttatttttcattttcctgactttttttccaccaaaatctaatttccaaacatgaaaaaatgttctgatcactaaactacaagctttctgtgttttgcgagagcaggtttgttgacaataaagaggacattgcgaaattgagaaaatgctttgcaggcctatggagtttggacgactcagatatcgttaacaaagccattgaaagacccgaactgtttgttatgaaaccccaaagagaaggcggaggtacttactttgcttagcatttctgtattgaagcctcatttactaataattaatcattgttgaaattcaggaaataatatctatggaaatgatgtgagggaagcgcttaaagcattacagaaggaaggaactgaagaagatgctgcttacatccttatgcaaagaatattccctactgttttttccacatttttgcttcgagatggcatttgtcataaagatgatgctatatcagaactaggcatatatggtgcttacttgaggtaactaatgttttcaagtcagttaccaaatatatattatgaatagaagtaaatatctttgcacagaatctcatcactatgctatacatttctcttgcggatgaatttatttgatcttattggattgggatatgatgcaggaataaggagagagtcatcatcaatgagcagtgtggttatctgatgcgaacaaaggtatcttcctcagatgaaggtggggttgcagcaggatttgctgttttagatagtttatatttaacttgatgaaatgaagccatgccaccttgctagttgcttgctgctagttattaataatagaaagccctataatttctgattaacccatagacacatacatcatttgtcatgctaattgtacaatgtatgaaaatgagagttataaacagtcaagaaatgttggataaagcagaatgaataagcttctatcttcactgttgtcttctttcaaatgaacattttctttttgcaattcatgtatgttaaatcagtttgtgataataaaattgtttgaaatggaaaaagggaatgctaaagactaaagcttttaaagtccaagccagccacttgacattatttttgtttgctcttctaatcatttcaaatttcgtcattttttttttgctggaagaaattatttgttggttaaaatgttattttgtggagtaaaataaaatttgacattgcccatctgttttagaaggaactaaagaataatggggagaaaagttaagaatctaaatttaggtaactatttaggccttgcttgttgcattggataattttgcccagtccacacaatttgttcctttggcttgggactatattagggaaatttacatggtatactaacttttgccatttttttacaaaaatactgtcaggcggtat

SEQ ID NO: 379631 - DNA, 1149 bp, Cannabis indica
cataaaacccaacaattcgctccttccctactctccaactgagggatagggccaatcacatcttgtgtttgcctgtggagaggtgtgacatactcagcctagctagtgaggcaaatttttggaggtacgacttttaccctcctgcacttggtaataagggtactagaggtccttccagaggtcttggcaacactcccatggcagagggagctagtcaagaagaaaggtttgtgcctaagtaggtagggggtgagtctaatgattaaattcccttggctaggattgtcaagaatgtagctctgaggaaacaggcccttcgacaacacttggcacgaggaggcgccactgagaatgcccccgtgctattcaggtccgtaggatagaactttgctaggtgtgcccaaccaccgcctgttcctagagacaagggtaagactgctacctctgaagataattctaaggattcttcttctaaggatgacagaattctagattgtcctcttgattttagtaactttttttacttttacttacatttagtattgatgacttgtattctaactttgttacttttatttttgtagacatgacttttaggatgacaaacctggttgggtgaccttcagtggtacctcttctggcttcccctagactaagggtgttcagatgccaaatctttagatgtaagtcagtccatcttgcctccccgtcccctaggccctattccggccaaccaaccggtagttatggatcctcccttgaggagcacccctcccccttgaaggccatcagggaaggggacccaaaggcctagttaagtggcttgtttgtccaagggtgagaaggtgattaaggttggccaaaactaccttggcaagagcctacaaagtgtttatgaggagcttcatgatctagatgttgagactctagattacttgacttccagcagtcttagagacttttcatctataatttgtttatttatttaactttgtgtgtgcaagacttttgtagagcttttatcactttgtttccctttggtttcaaggtatgctaaaacttagccatgctcacgctcgagcaaagggctctgccgcagctatcaagaaaacacgtgagggcaaagaagtgttggatatttattttacc

SEQ ID NO: 379632 - DNA, 1730 bp, Cannabis indica
ctcatcaataaccctttcctttcctttctccaatattctcgaccctgagatgtacgaagagagtccagaatttggagaaacctccatgttaacaccaattctgaattcaggcttatgattgacacccttgcccacacctgattgtaacattcctgtagatgatgaagatatttccttgaagccaggaggaggagaaattgggggaagaccgcctgaagaattcttgatttgggaaaatagaggctccgtcttctcaacaatctttaaccacgatccatatcccggtagttggtttctaagtccatcttcaacaaatttcattggttctgcacaaacccgagtatcatgccccacaaaaccacaattaaaacacatataaggtaaacgatcgtacctgtatgggagccatatttttcgaccttcaatcgggaaaaggaagcctgggcagatgggctttgatatatcatacataactttgaaagtgaagaaacctttggaaacaatctttggtatatcgatcttttggatctcgatgacttcacctgcaaaccccaccagcctttcaaattccctttagtgatcgatctagcagggagattgagaatgcgaccactgagagggaatttggatagacaaatttcccaattctgtggaattccattgaatctttccaagatcagtataccggaaccaaggattcttggccaagatcctattcaaatccttagtcgatttgaaagagaagaccaagaaacttgctgctgccgtggtgagtttgatttccacattccaatctttgtccgagatgccccagacacgtccaaggatcgttctcaatagagaacgactcattgggcgattcgaacaccaacgtcccatagcacagagtgcgttcacttctgatcccccagcttcgttgatttcccagccttcctcatcgagcacggtcaaattggtagttctgttcaacagttcttccatggtggtatcagggttcatcatcttcgtaggcttttccagcatctcaggaaggctcttctcaagagagagcaaaggttttttagataatattcttaaagcttaactttaaaacctacaaacatctatatacctttttgtttttcaaaaagctataggcaatatgtaattgaagagtccgtttggtacggtacaaatctctacaataagtcgtttagttgcacgtatattgcactctttttatttttatatttatacattattttttatgttgttttgatattttttttgttactttcatatgatttttgtcattttttttttatatttttatagaatattgtaaaaatgtataaaaaaaaaaaactttgaaggtaactatgtaaaaaatttattacttatttttcttttttaaccaaccgtgtcatgtaacccatattcagccaaaaaaacgtataatgtaacgtacatttaacgcaatgaaacatctcaatagtcgagcggtccttacgttgtctcaatgttagaggttgaagccctcttaaaggattagataatgtcaagagaaggaatttgacaaaactatgaagttatgaacaatcctatcgaataattattaaataaaaaatttgatactgttataaatattaataattatgtggatgtccaaatattttatttattaccatgaattgtaatgaacattcctcttttctttagtttctctttttcttagtttcttaatatctcac

SEQ ID NO: 379633 - DNA, 1855 bp, Cannabis indica
atacaaatgagaaatgctaaaagttatcagtggtgttaaacactctcttacgtgtcaatatcgctattggtctaattaaatatcgggtcccatatagtttaatatataataggtttcagggagtatcgctagtcaatcacaaggcgacacgtcttaagggtgccagacataactggtgcccaatagcaatgctcgatataaatatacctagtattgttaggaggtgatgttttataattaattaagaatgccagatcaaacattaaattacactaataactacctcaaacttattgtggaccatggatgctgtttagcctttctagtaaacttgagtcctctttttatgccaaaacaataattggacgaagacaaataaaatgaaattaaaggtagctatagctagagtgacctaaaagactaaacacgtagagatagagagaaagctactgtcaataaaaataatatatatatatatatatatatacatatatattataaatatatacctcaatgaagactgttttggaaagcctcccagaaaaagcagtaatattagctgtaattattttgagcttcaaagattcgaacacctcacacagcttgaccatagtgtctgttcttttactacatgttaaactaaccaccaaagtcttctctcccatatatgtcactcttagctgcactccaaacattattttatgttgttataattaattataaaggaaaaaaaaaacaacataattatttattttaataatcaacaaaatactaatttagttagcttactgacctcaagatcttcaattggggaaatggaaccactacatcttgatccatttgaatcatatagttgttgatcaatctttttcttctttgatctcaacaatattggcaattcttgatcaaaatgatcataattaccacccagattcttattattgttattattattattattattattattattattattatgacttcctttattatgatttgattctagctcaattatttcagcttgtatatttctctcttcttcatgaagcttttggatatattcaattgcgtccttgattatagaagctttgtccatctaaaaaaataataattaaaagtaaaaacccagaaaagatatcgcatcgaatttattaatttaaaaataaaggccaaaatttgttttaaaaatagtaaaaataatggagtaggaagatttgaatacctgtttatgtatatataaattgcactatcatcacttaatactattatattatatataatatatatatgtgtgcataaaaatataatattcaaattagagacaataattaagcttagcaataatatttattaatggtggggtaaggcaccttgctaatcttggggaccactgctcttagtgcaaacaacctatcattgagcttctttctcctatttctctccgacacaatattcttagatgccgccgacgatgctgccccgtccggcgagctcgagtcgtagtacccagaaaacgctgcatcttccaacccaccaccccaactgtatttaacaaatatatattacatatatatgaaaattaatttctacaatggaaaaatcttgagcttattatgaacaagttttaagtagagtaaaaagatactaccctttgaagagctctagttagtataataagcattttagaaattattcggaataattaatgataataattaattagcagaaaaaataattacctgtgatcaagttcctcagtttggaaaaacattgtggtctcccaataatgtttatactcatcaccaatgttttccatagtgaaaaacaaaggaaagaaaagagaggagatgat

SEQ ID NO: 379634 - DNA, 1198 bp, Cannabis indica
atttaaatattttagattgaaacttccgccttgacaagatgttgctctgaccaattgaactaatcttgtttttcatattttttttaaataatatattacactattaattatattttattttaaatttatatatttatttaaaaaataatttagggtataaatatataagtttaccttgtaaataaatacttaagtttaatgataataatacataaattaataatgtggaccaattaataattgtataacttaattatttatttacaacttacttttggaagcaatttttgtttgtccttaatataaaatttggaatcgaattaggactaagtttattaagtgaattttgattaaacaactcttcactttcatatataatatattttcttttaagaaatcaattgacgtaataatcatcaaatattgaagttaatttaaatatatataacaactaatttgttcaataataatataacaactaaaaataaatgttatgatagtttattggattataattaaatcttataaaaccctatcaaaaccaaattatttagtttaattagttgctttctatgaatgaatcaaataattttatataccaactaaataattttaaaaaattatttgatttgattaataaacatccaaactaaccatcagtacccatacccatggccatagtcacagaaggttacatacaatttctgtcaaaatcatgataatgaagtgaatttttttttgttcaaattaagacaacaaaacattatttggggtcactattcactagaatttaaaaataaaacagtactactcaagatcaaaataaattattgttttatcttattccagctaaaatatctatagagaatgattttattttaggaagaattatattttgatatatatattttttcaaatataacatgaaatggacatagtcgaggcggagttctctcgactcgacgaggtttaattttcgtctgatggagagacaaagaataaaattaaagtgaaaacgttacagaaagagtgcaaaattaatagtaggagtattttggtaacaagtgtttgtttattaaggtgccgtttggtaacacttttgttttttaatattttaatcacaaaatgaaagtaaaatttttgtttttaaaaaatttattttttaaaaacaaaaatgcgttttataaccacttttgtt

SEQ ID NO: 379635 - DNA, 3854 bp, Cannabis indica
tacactttcaaactcaccacatgcatttcacccttctctcctggacgaggtggacatggtttgggtcgtgaactattttcacttgaaccaggtgaacagtgtagcaaggtatccactatataaccgcccccacgtgcacttaatcctgctgagggcttcttaataacgttaactacgacaccccaaccccagtctgttccaccttccctaattctgacctgaaatgacacaaaataggcactaaatggcaaaaaacacaaacatggacaaggatagataaaacgcaaaacaattaagattctatacacgattcaacaataatgcccatcaggacataccagtcgaccaggttgaagaaaatacagaattctttcaggcctcattatttctgacatcatcattttctcaatttgggctatatcaagtttaatcttatgatattcagcaacagcagcctgtatgtcgatcatcaatcaagaagaaacaaattagacaaataaataaatttttaaaaatgaacttgaagacttgtagaaaaagaaagaatacctctcctgatgcatcaagtactgcaacttcctcctcaagctttgaaactcttttgcctatatcaggtaaagcctgaaccatgaagaaaatttcatgtaattaatcactgttcataaagtgttaattcaaataaaagaaattggcaatagaaaccttctcatactgaaattggtggaatgaattctttatcacatgctcagcggtgaactggccttctgcacggctcatcaaatttaaaatggagtagtagctcaatctgaaggtactcactaaaggagctggtttacccaaaaccatgtcccttagcgtattcatctccatctgtaatgagtacacagagattgttcattcaaaatgagcctaataactagcacttttcaggctgtaaatttgtcaaaaatagttcacacacaggcaatttcatatttttctttaatcatatcactaacatttagaaaacataaagtgaacaataaaacaaaagccatgtaataaaacgagacacaaggataactataaattaaaaaaaaaaaaatgataaatctcctaaagcttattagtattgcacaaaaaacagtaagatgatacttggtttttagtacaataatttatacgaatagagcatgactgaaaaaagttacctgctcatctatcattattatacaaatgccgcggtcatctttgccacgacgcccagcccgtccactcatctaccaaaaggaaacaaaataatctttagaaattaacacataaattttcagtaagggaaacaaccatatgcactaaatggatggaaacgaccatatgcactaaatggatatgtcttttaagaaagctgggagtgttcttctgtatccttcttggttttgttctttttttattttacaatggttttatacgccaaaatccctaaaacccacttagcagaggtaaagcaatcttaactcacctgaatatactcacctgacccaatgaaacgatggctatcaccatcccacttcttaactgcagtaaacacaactgtttttgctggcatattcaaacccatagcaaactgcacagtgaaatgaatatcatctataaagttctaatctaatatagaaactaaaaccgcacattgaaatccaaaatgaaattttaaaagaacattgaaggtaagctattgccaggaaatcattgtaccgtctctgtagcaaaaagtgcctttacaaggccttcttggaaaagaatctctaccaactccttaataactggaagaagaccagaatgatgaacagcaatacctcgttgaagtaatggtaacattaactctattgccggtaattctctgtcttcttcgttcaagcagagaatggcattacgaaaaacttgctctactgtatctttttcctcttgtgtgttgaaatcaagcttggacattgacatggcatgttgttcacactctctcctactgaagctgaaaataataactggctgcaactttttttccataatcatctgatgaaaaaaaacaaagcacagacaatttactaatagttctataaacaatcatacagtgataaatttgctaggaagaaacttcttttcaagtgttaagtttcactgacatgagaaccagtggtttaattccaattatcgacacggataaagaaacgcaaaagattaagagaacacttatatgctctattagtttagcaattgatttctagtaattgactacacaaactcgaacctttttctacagtttgtgattgtagggcacaacacaacggacaatcgagagtaccttgacgattttgaaaatgtcagaacccccagaagcaggtccaccctttgctattctcccacttggcttgccattagagcctctgtgacctctggagtcaccaaaatctttttgttttgagaatgtagcttgcagcttcacaaaattgtcttctctgaattgttcattctcatcaaccacaagatataacccactcccaccaactgggaaaacataatgctgcaaaggcgtcggtcgaaaatctgtgtaaacgacatgacaaggctgtttatgcaaattacagatccattcagcgaactcggtggcatttgacatcgtcgccgagagaaaaaccattttaatggccggcggcaagaatattatgctctcttcccaaacaacccctctttcacgatccttcatataatgaatttcatcaaatataacccacgcaacttctttcagaacctctgaacctctataaagcattcccctgagaatctcagttgtcataaccaaacagctagcgtttggcgaaagagtgacgtcaccagtcattaaaccaacgtcttgaaactcttggctgagctctctgtatttttgattactcaaggccttcaatggcgaagtgtagataactctctgtttatctctgaaagccatggcaatggcgtactcagccaccgcggtcttaccagcagaagtgtgagccgagaccaagaccgactcgttacgttccaagcaagagacagaaacttgctgaaacgggtcgagtttaaattggtaggtcttggccatttctccattgtagacaggattggctagggttccatgcacagactcgtccttggccgaggagtagccactcggaacagcaacttcatgaacgcaggttcgtgtgaggcttcggcgctttgcggagtcggtgacttctgcctcttcggggtctttccgtttccctaaggttggcgaagattcctccatggctaaacaggtggaagcttttttttccctcttctaaagttttttaaaaaaaaaaattgatttagggtttatggataattgtgtaagattttagcactaacgaatgccagaaaagaaagaaattcaagaaaacacatgtattgctccgatgctgttcgaaaatgtattgggccacattgggctttaatacgaaatatggctcaacatgcaaaattgtcttaaatctaaccattaagttaataaatgtctatttttataaaaaattaataaaatatctattcagttaaaaatttgataataaaattacaattataatctttgataataaaccctaactttctaccctattctcattttcttatgtccagactactcgtctctttcttctcccttagcaccaagaccatctcgcctctaccagtccgaccgccactccttgagtattaccaccgcagatcgtcactatcggaaaatttaccccagctttctacttcttcatctctcatgtcaaggccaaaagtctcacctccttcttctctctcggcaccgacaagtc

SEQ ID NO: 379636 - DNA, 1601 bp, Cannabis indica
gaataccctcaggggatatccaataatagaagctgaagggatcatccggaaggatccaaccttctgaacactccttacatggcatacctctgacacaaatctcgaggaatctagtgagttgtctcctctgccaaacctagctaggagaggcacaagacaaaaagataatcacctttttataaggatcacccactactctgcacatttctttttcccaacgacagcttgtgcctcaacatgttactgtcaacagcattatatcatacggtagactgcaccttggaactgggcttcacctacccagcctaatagttcagagtataatattaaataatgtactttattccatcaatgagatttattgtacaaaaccctaatgagacctagatctgtccaacctgttaagcatatgtgcttataaatatgacactatgtcatcatgcaaggggttcaaaataagagaatacattatagagctgtaaaaaaacaccttaggtaagtccttataaaaattcttcatggactaaggctaattgacaccccaaccacgtaataatcatggctcattttcttcttaatcttatttttttagcttattcttcttttataacaagaaaccctcgtatagttgcaaactttgatagtaacaaggggttttaacctagaggttcctcctacaaaccaatatcccagtctgaggtttcagattaacaccatcccactaggaaatgtaaaaaagtttgctcatcttggaaccacaccatctaaaccagcaaatgacaagaagaaagttgtagcatctgatccctaaagaaaaagcattctaccaaggcctacatagtcaatcttaacctccataaaggaacaactcaccaaaactaagggctaggttacccggccaatccgcaaatgagggtcccttaggtcaataagacccacttaggcatcgggacttaatgcctagggaaggaagactcatcccaatgcctctattaatcagggatgatatcaaggacttgtatcctgaagaaggcaactcaagtgttaatgtcaaggacaacctaaatgtgtgaagggagaaagctcgatgtgaaggtatcagggcacgcagaggtgatctatgaaacaatatcaatgatcgaatctgacgacgagagatatgggatgataatacgagaaggctagaagattagatagcaaccctcatgaaagtaaaaaatcaatttctcaagaaataaagtagagccagattagaatctaaagatgaggatttggagctatgtgttaaaagaattctggtcgtagtcccattgtgtcacttttgaatgtcatagatcgacttatacaagggcaagatgcatctcagggttcacttgacctgctataatcaactcatgaaggtctcacatgtgaatgatgatgggaagtatctatgtttttttcttcaccctggcttccgtaaaagagtggtagaagaggctgccaatctattcaaagttggtaggatttacaatccttattcaagaagcaatttcttgtagcaagggattttgataactctatggtatagagttattttttatgcttttaaactaaaagta

SEQ ID NO: 379637 - DNA, 2616 bp, Cannabis indica
atctaacatgcagtataatgttatgatggatatacaatttataaatgtgtatatatatattcatacacaagctagctagcaatcgagtacatatatttatacatttgcatgctttaaaagatgtactttagaaattattcatttgaacattccaagcttattattagttttatgagtacgtactacactacacctggacaatatcttaaattgagtttttatatatacaaaatattgaaactaattcaagaaaaagaaaagaaaaaaatccactcattgactgcaaatagtgcattcattattgtttattaaagcaaatttggatgtattttatatgttgactgaacagtaaaaaaaaactccgcaagaagaagcaccaatcatttcccttttgcatttattacacacaaaattttcattaaataataaaaaaaaaaccttcttttataattattatttattattgctatgagtgtattaattaaagttagaaaaaaaaactaataaaaaggtaattgataggagagagaaagagaggaaatgacaaaaatattatttaaaaatatatataaagaagcttcaatgcttctctacatctaaagaagatataaataatgctaaataggattttttttcccaattaattttgatatataccaaatcatgttcactgaactattgagattgttagatttaaagtctttaattgaattttattcaattttttactgtttcagtgattatttatgtactaaatcatgtttcccggactttaatatctattaaatcatacctttcaaactttaatatgtactaaattataaccattgaattttcatccatgttaaataatcgtacaaaaatacccaataaataattactcttattatttttatatatatttatgaaaatgaagggtccactagctagattcatgatgattgagttgagcgaaccaatgtagaaggtcaatgattggtcacagcgggtttaggttaataaacgtggccgtgcaatgctccaagaatgaattaattcttctcgatcaacttgattagactatatagtagtagtgtagttgttgcactaccatacaaattaattattatgacacctttgtctttggcctttcttccactccttcccatatatattacaatcaatctttgactctttctctctctctctcaagttggattttggagggcctcaacgaatcatgttgcctaaagaaaaataatgatctattttgtggcttttagtgagtcaatgactgatatgagaatgagattcatgttgtatgctgctgttgagatatcgatcgacaacttaatttgaacaaatattaataggaaactcattaatattataccgacttaataaaatggtagtaggcatttcaaataatgtatatgtgtcttctcttatcttttgagagtgtcttcataatttgcaatatattgtctttttaatttactctgttggtatatattctttatgatcataattctccaattatctagtaagatatatgatgactaggtagaatgttgatatattttattctataataaggaatattaacatttgcatggggttaataagttgtaatgagatgaagaatgagaagcataacttgtgcattattggtttatagtgactttattatggtcaagtggaattgatgcaaagaccaaatgggaatttatgagaaagaaaagggcacttgaacaagaacaacactaatgaaattctcctaatgcagtaacaatgaattttaagagataatagtggcaaaagtccataagtagtattctaccaatttctaaatttaaatggaatatgaaagtaaagtgaatatattatgtaatttcctttaaatattttaagtttttataagttttagtacttttgtaggactggtatgtttttttagtaatctttaccattttgtacacttgcgtttcaaaaatatttatcatcgattcacattctattcaaacccaacgaagtcgttattatctcttcttttaataacaattttgactctcaatttcaaattcagccaacaatgaattcgtaagaataaagcatctaaactattgagttgaggtgctgccactttctttataatgcagccaaaaactcatatttaatgccacctgaatttttctgctcattacaaatggttcttgaactatttacactattgttaattagtttttctatcaaattttatcacacgtgctaaataaaatgataatatgattgcttaactagttgtgtcccctttgattaagaatttaaactttattgtgtcccgtttatgacactaaaagagtcttactaaaaaaattggataaaaattatacttttactaatattgggtacttatttcattaaaaaggtatcattgagtttatattgcttacaaactcaaaactttaaatacttatatggctttttaccaagtataatgtaaataaaatgcaaagtaaagtttaatgtttatataatgaatatgagatatatatacagtagttactctatttaagaatactctattcaagaataacctctaatttgttataaaaaaatcaagtcccgatttgggcc

SEQ ID NO: 379638 - DNA, 3706 bp, Cannabis indica
ctcaggtccaagtctcgcgtacgttggttaagactcaggtctggttcacggtcccgagtccgggtccaagtttttgggctggggtctgggatagtacgaccttaaaccagaccctaggtttgggttcgggtttgtgtcccaggtgtgggtctgggtcggagaataggattgaccctgaatcctttgtaaatattataatacaagctaatacagaccatttgttatgtattaaataatacaacatacattgtattaaaacttttagctgtaataattaatacaatacattgctttatccaaacataatgttatttattatttactacaatacaaatcttatacggcgtaccataagtattacagtttttattttcatcaaaaaaaaagaaaaagaaaaatacttacgagtgaccttgaaatcatagcaaacaacatacattttttggagtatgtttttagttttacttaaataaattaaacatcaattagaaagttacgtctcatacataatataaaccagtcaattgcattcaagaaataaatttaacaaactataataaagtcttttattgaaagataaatatttaccgaaattttacatggttggggcattaataagttttagtatacgagtcaatattattatactaagactagaaaagtcttaggatttacacaagtatttgaaacctacaatttacctgagcaattgagaatgagatttcaagcctttgcataggttgatgttcttatattgatagtgctaggattcttattcgtttttctttttctacttatagggtaaataaaaataataaattaattttgggtccatgtcgtggagcctagcccatgtggcactgattgtaggctgatttggatgtcaaatcatcttgataatttttcaatttatgtcctataattatggataataaaagcatattaaattcttgatactcaatttttattgtttcatattgggaagatacgatccacaggggagatcttgggagttaaatcataatatcgtgagatttgataattaatgagtacgagacgaagctagttgtccagatgtctgctgattacttctctggacgctccaaatgatgtcttctggattctcgctgtgttagaggattgtctcgcctaaacgagttgcatgtatgtcatctggaagatctaatttgctaatagatttggtccactatcttggttgggcctactattgggcctgaagtgactgagctttaattggctttggatattacacgtgtcctgcttctggaaatacggataacatttatccctaagtttttaaaactctaggggttatggaagcttgcacccttcctctcagacaccgtgaggacaggtgaaggctaaaggtgaaacttttttgaattcaaaacaaaaattgtttatggttgatagcttcttgttttttttaaatgaagcgacacgtgtcattatatctttggctcgttcgaactacttttcttaatagggcacgtgcagtagggcttcatgaaacggtagttgattatgtcaacacgagtcttgaggagaatatcatcattcaatatcttagtttcatgcatcgcattaaatgtgtatcttacagttttcccgaacccttggatttttcttgtattttcttaaatgtgatcttgaccattgatttgggaacacgtggatcaccttcttcatgtataaatatggtgaaagtttcccatttaccacttttacccaaaatttaaaattgtgttcaaatttgcagagagatgatgtcgacgaagaagagcaccctatagtattacatcgatcattgcattcatcttctttttagattcgcgaatgagtgaatctaggtgtactgacccccagtattaattgttgatccttcaacgcaatcaagaacattggatattcaagcgaaggttgaagagctcatcagtaagactcgtatgattcatctccaaatccttggcctgagttcttcatcccctagttcttcttcaggtatgtttctcctttttatctttctagaatcttttttttctgtctcgatttggcattattttttcaatttttccatgctttccttgagttgttgatgaatatgatttaggccatggagtatttcataaatgttttgtagaaataagatatttttcacatattttccctttttgttgaatagttgattaaaatattgctaaatttgcttcctctatctgagaccatcatggttgcaaatgatatgtcgtttatactttctattggctttctgtgctaccaatctaattgtctagaaaaaatattctttgagaactatgcttcctggcatagggttcggtggggacctctccaagtagtatgaatggaggactctcctctgtccctactatcttctttagtatgggtatctaactgctagggatttccttttctttttctcgtctagtttctgtcatggcttgggctattctagcatacgaggtggagatcatggaacaaaaagatgtcgaggctccaaaagtagtgtataattcattcatctcaatgggagattgatcagtacaccaataaatttagaaactatgaagctctccagaggtacaaagtttgttgggaccttaagagtgttcctggtcttttcaggaggaggctctcctttcttagataatctccatgcaagtgtgcgaacaactttggtgtctagagctggaccaatacagagatgggagcacatcttccactcagaaattacttcataaacttctatgtggatgtgggtgtttcccttttaaaatttatttctgaagtttataagctacttgcaggatggtttatacattgctgggccaagaacatggacgtcctgactccagaagaaattctttatttctaccaagttaaatctaaccccatgaagaagaataagagcaggattgacttcttttgacttgagaagcgttatggggcatttcgtctaactagcattgtgaagtacaagtgtgacttctggaattaccaatttttcaccacgggtttcctgttgaaaagggttttgaccctctcatttgatttcaatactgcaagtaagtggagctatcctttgcagtctaattttcttcccttacctttattatagtctttgattaggattctcctatttcttccctttttagatgagattgtgcatccaacatccatccctttcttactttcttgggaggtcatgtacagaagctatcttccaagggatttgaaggtggagaatctcatcactacagccaactataggcaagttggtctgattgctcctgactagagcatagacacctatcaagttaaagatgctcttggagaatctcaaaaacttctgatgaagaaaaaaaggccataaaaaagaacaagagatggctagaagaatgggctcaactgtagggaatattttaccaggatctagatttactaacaagtatgttgaattaacatcctaaatatgaattctctaaaacaatgaaataaacacataagggtttaagaaaatcttatattgattgcagcggaatataatgactcattccattcaagatctctagcccttgattcctttcagtagcagagcattatcaagatctgaacttgaatctctttctctccttcgggttgggttaccaccgtcttactcactatg

SEQ ID NO: 379639 - DNA, 2460 bp, Cannabis indica
gctggctaactactataataaaccttcttataaaaagataaaatataatttctcactagaaatgaaaaacgcccctacaatatggccaaaagtaacaccctatatatacctaacaagatcccaaaatatatatatatatatatatgatataactctctttaaatatgtaattacatgtatatatatctatataatatttattagttggtggtaataaattaatttctcatatatatattttatgatgacttatcttagtcaaggctaatgtggtccaatattgtcatactatgaaacacaaagagaaagcaatatacaaaattgactataagtctatatatatattgagttaatattcgtaactaactactcaaaacacttaattaatattacattaatttataagattatataatcaaaatgcatagaagcaaaatttacaatacataatgagtgcatattggtcaacgtcaactgtgtggtgtgtgactatatatatacatatacttaatctatagtcataatagagtactaatagtagactatatattactatagagaagtttcaatcctattggtcatgcattcacgtgacttgtattcacgtgcatggctatatgtgaataatgatcgtgtttaccaagacactacattgacaattttgtcctttttattctcatctttatccaaacttctctctacacaaaatatgtatcaatatattttagtatttaaaaataaatttttttaaattttttttcataattatatatatatgacatagttatttaaaatatcttgtaaaattttaaaaaattcaaaataatttataatataaaaattaatagttcaaatatttttatttcacacacataaaaaataaaaaaaaaaattacatacatacaataaattatctaaattctattttcagcatgttaaataactataacaaatacgatcaaaataaaagcacatcaatagattagtgtagaatattctaatattatatatatataaagttagtttttatcattttgtgcatgccgggcttataagggctcctcttgagagatcactatcccatttgaagtcggcaaatgcatgtgcttgtctatatttgtcaaaaataccaaccaaaaaacaagcacaattttcataatatattatattctctatttattaaatttattacactacaccatgtctttgtctatatataatataaagtttctctttttctttatttgaaaacgtctatatatagtatttcaaaccacaacaaaattaaaatagacgtagtactatatattcaacaaaaagtttagttttgaatataactaattacataattagtacccatatggttaaaatagggatagtggcccctattatatatgtatatacattttctttttttgctatgagatggtcttttttcaccccttactttcttcaacacgataaatggtatagatatataaatatatatatatataggagggacgtagtggaaggagatactaaaaaaaataaagaaaaataggtgtaggaatcaccatttttttatttttaatttcatattttacactcaactaaatacttagaacagctacaaaaaatgcattaaaatttcaaaccaaataagaaaaacttaatgtgccagcaaaataatgtggaccagaactccaataaatacctttaacataataataataataataataatagtaataataataattataattataataataataataataataataataatcaaacaatggtaaacgaaacacaatgttttaactaaatttttcattctatttatcttgaaaaattttgaagaccattttcaagtatagcaccaaaagcattgaacactagtataatactaagaactataaatatttattgttgaaccagctgatccattatagattaattaagaacattatgatactatactgtaaacacaaaaataatagaagaaattacactacatagctcttttaatttaatatctctaaattttatcttcttttttaaaatttattatgtttattacctctttttttaatcattctaccaattttaacctaccacatgttcactatagtcttcattattctctaatcaaaattttttcccaactttcccacaaacttacaacaaagaacacaaatctattatatttgaaattatgttttagtgatgtgagtgtgattaaattttatttagaggtatatttgattaatgtatataaaaaaaaaaaaaaaaaaaaaaaaagtaaattttactaacttactctcataaaatacattgattaatatgtgtgatattaaaactttaatggattggactaagacctgagcccaagttgttctactttgatgtggacatcatacgtatctatattggttggcaatatgctattattatgtaattaatctacaaatt

SEQ ID NO: 379640 - DNA, 5921 bp, Cannabis indica
tattccctatttcatattattgtggacaatttattatgatatttttagagtattaataaatttctctttaagaaattttcattatgaattgcttttatgaaattgagcttcgtattttctttaacttgtacgacaatactatattatatttatatgttaattttttatgtgttgtattttattattgatacaaaatctatggtacttttaatctttgaaaagagataataccacgtaaacactactacaaaatacacaatttgcgttggtcaaagcgtcacacaaaaatagttgactgatgcaataaatagccagtaattttatgcttcaaaggataactgaagctaaaaaagctcaattagcgtcagttaactcttcgacgctaaaagaggaactgaggaaaaaaattgaaaattttaaaatatatctttacattttgctttagttgaaaatggatgctaattatttttgcttcagttggaaactgacactaatattttagcgagtgttatccactgaagaaaatgttttaattttttctaaacaaccttttgactaataaaactatcattttgtcttcatcaagttttgaaccctagcacagccacaatttcttccattcacctcttcgaccaccaaaccacgagtagtaggccaacaacgcacccagccaccgccaccagcagcccgagactcaatctcgctctctttaacctcgtctctcctctctcgttcgagcagcacccacttagctttgactctccctctcagtcactctctcactctcccatgtagattttcactttaggtttactagaaaaaaatatctcaatccaggaacatagaagttttatgttgttctcaagtatttcaccttgggttttaggtagatttttatctggtttatttaattttgtaatagttctatatatatagaatcacattcacaataaatatatgtacaatataagataaattaaaaatccctatatatattgagtcatgaattatagtagtgagaaatcgataaagataccttaagagaaggatatcgatacttaagttttgaaccatttttatctggttgcagttctttgtctctctctttctctctctctctctttatatattttggtgttaattacacttatctatttatttgtatggtgttactgccaaattatctctatagattcagaagctctattttatatatctaagtgtgttttgggggattaaattattcaaaaaattaactactttttatatttatatttgaatttattaaggttcataccctcagaggaagataatatgagtacatcttggaagcaaagatgatgagcttttaaagagtatcttttgcaatcagtaggaatatgttttgtaatgcgacatattagctagacaatatctgagatgcatttaaggcagcaatggattgctctatatccaaagaacggatcatgttttgaaattcacaataagattataaaacaacccacaaattcacattaaatactcacatggtatttatatagcttttactcttgtctttttattttttagtaaggtacaatgcttcagatttgattgcgctaaatactcaaaaagagaaaaaacttttatagacatttcactttattagtaaatgagttatgatacatgcaccaaaatattacacaaaggaggtactcttagtaaattatgtgttacaacttagttacataatgctgaaaaaaaaaactttttttgcatgtttttcattttagatttgcctgaggtggagaacagagagaaatgttgtatctttttttttaatgggatgttgtatataataaaggtaataccatatattacatttacatcttactaaaataaattgtatcttgcttcattttattaatcagaaagttatatctgtatgtgtttgaatggaatgtctcttaataagagactcaaccatactttagaagtgacttgtttctctttaccattaggtcagttcatatgtgaaaacaaacattttagaataaaaaaaaaagagagcttagcaagctatgaggcacgtatattttagtttgtatgattcatcatcaatttatattttatttttttaacaaaaaggataagattttattcaaaagacagacaaaactacaaacaaaagcaagttgagaaccagctgctacacaaaaacaccagctaccaacaattgattacattaataatgtgcaactccctccctttcaaattgttaaagctacaactcaagactctatacttaacagcatgtttaatctccctactaacgaatgtaggaactagacagtacaagttaaaccagcagcagttcctattctgctataagtaataaactgcagcagtcatgacagcattcgtcaacctatccagaaaattactcatcgccttcgaacaccagtccatccaatgattgaagtcgctcggctagagattcatgccaaaccagtaacctatatctgtcgttaccaatttagcaaagtaacactcaaagaaaacattgttgtgagtctccggattcaactcacaaacagggcagttcgtattagtgatctccatcactcgactaaggtgatccctagtcaaaagttggtcatttatagcttgctaacaaataaacctatgcttgggcacacacatcttatgccaaattgtaggtgcatactcagatttttcgaattataaaacatttttgctttgcatttcccattctcacccgcccacatgagagcatctcgattaatgatctccttgagactcaagattttcttaaaataccagctgctatcatgtttaaaagtcagcatctagaagtcttgaccctttacgcaaatggaactaatccatttaacccaaagattgtcttgctttttcgagatagcccaaatgtttttggctatcaaagtaacattccacttcttttcctctaaacttttttgggagacagattttttcccaagaagataaatggaatttactttgattaacattgacgcccaagagaaaatccatgcaacttttgtcaatagcattcgtcactttcttgggaagaatgaaaagattcatccaaaagtttctaatccccaaaagaattgaatgaactaattatgcacgccctgcaaatgaaaggtttctgttagcctaattatttagcttcatattcaccttatccagaatgcaaccacaatccaaaatcttccatttagtaggacgaagattcactcctaggtatttgagaggggaagagccttcttccatattcatcaagttcaaaatggcccttttggtaacttcattgacccctccaaagtagatagcagacttattcatattagattttagccttgttgtgtcacaaaacaaggagaaggcttcataaaagtaaatctcacagatttttcattgctctcacaaaagataacaaggtcatctgcaaaacataaattgacaagcttgagctatttgcagagaggatgaaaactgaagccaacttttcgagcatgatagttcaggattctagtcaggtaatccatgacaagaacaaaaattagagagatagggtctccttagtgcagacctttttcacctttaaatgaaccctggagtcttccattcatcatcaggttataggaggtaccttttatgcagactaaaacccaattgatgaatctagaaggaaagcataaaccatttagcaaatcagcaacaaaagtccagtcaacagtatcataggcctttcttaagtctatcttcattatgcatctggccgagatgttctttctagtgtaacccttgagaagatcttgaaaaataatgatgttgtaagcaaaatatcttttcttaacaaaagctccttgattatgatgaataatatctggcaaaatctcagacagtctagagcaaatcatcttggatatgaatttgtatagagtattacagcacacaataggtctatagtcatttgcatctttaggactgtctgttttggggacaagagaaattatcgttttattgagcatattaggcatccttgagtaatgtcttccccaatctcattctaaagccccttaaagaagcccgaaccatacccatctggaccagggctcttggaagaatggatatcaaacatagctcttttaacttcagccttagtgaaaggtcttatgagccttacttgctcctggatgtcaagaatcttgccctgagtgagaatagtctgatctaatcttctggtagctgaacttcctttccccatgaagtttttaaaatggttaagaaagtgctcagcgaccttcggatagtcttcaataacttcttcattcctacagtaaaaaagaagcttgttttcttgtcttcttttttccaaagaggcatgaaagaagcttaggttctcatcaccaaatttcatccagtttatctttgcatgctgctgcatatagcttgaataatcctgtttggcagaattatacgcttgttgagtacttttctcagtaacatgaaagctatggttgttcaggttcgctgccaggttccctcaagcaatgttgaagtcctctttggttgctttgtaagagccaattatgtccaattatgtctccctgatcagcacatgcttggttctcaacaacttttgaacaatacctttaagacccttgctactagactgattattccaacaactaagaacaacctcgttatacccttctctgtccatccagtaattacaaaatctaaaaggaatggtccctaagttcccagcctcaacatgctttattatacagtaactatgatccgagatagcatcccatttgttcatagcaactgttttcaaaaaaacatccaacaacttttcattacagaaaactctattcagtttagaataaattatgtcccccatttcatgattgtttgactaggtaaatttggcacccgtacggtggaactcccccacctggccttttgctaactagtcttgagcatctttaatatctctaggactgacatgacagcctccacttctatctccatagttaaacatagcattcaagtccccaaaaataatcgagggatcttttaaatgaccaagagctgagaccttgtcccacagggaactcctttatgtcatggaattactttcatacatagcagtaacataagaatcttctttgtccccgatccttctaattttgcaatgaatgagttgagcatcttcaacaagaacctcgacattcacgtagctagcttgccaaaacaacataattctttaagaaataataggactggagtagaaattccagctcctaaatatattgtccatcacatctaacacccgatcatggttgattttggttttaaaaagagccaaaaaaaccaaccttgtttattttacaaacctctaaaagcacatgctgcttctccttcttattaaaccccctaatattccatcccattaaactaacactgtccataatctggttgagttttagttgttttcccatatccatctccattatcctgtagcacaccatatacattactggtactggccttcagacaagctattccactggtttataccacttcttcctaagagttatcaagtcccttgaacctctcgatctgctgtagttatcgactttctcttctctgttttcttcctttcatcactcttcacaatggtgccttcaggtttctccatatcagctccctctataagctcagtatcattttcaacttctagttcagccacagtatttggttcctgcttcttgttcgctgcactcttttgttgggttttgtaccctacataaaaccctttacaatctgattagttatcaatataagaaatttgaagtgatttatgtttgcatgaattttac

SEQ ID NO: 379641 - DNA, 2978 bp, Cannabis indica
cttcctttttttttttttttaaaaaattttaaaaaaaaaaaagttcttcctttcgtgtgctttttttgggatagttgtaggccagcttctttgcatgggccgtcttgggtactgtagggatgaaatcctaccgttggattggtaggtggcatattcttatatgacatttaagggtgttagatcatacgagctgggcctcggatgcgtgtcacctcagggcttctcccttttgaatttcccttatctctattcattggatcatttggtctagtacacaaggacatgcatgctctgtatgatggcgtgtcattggagacaacctctgacattgtactcaaaaaagcctggtccctaggtccgtgctctgacacgtatgggtgaagcttccgcaggtcaagagcataacccggctccccgtgtttcagaatgccttggacgctctgggcaatccatgctcctcgcccaggttgactgccataacttctagaagggaggggaattttggttcacggatcctcttcgtgtggctagcagtcggggaactccccttcatggagactctttccgcgaggttgatgcctttaccttcccagaacatcagttgagggattggggtagctaatgactcttttgaccttccttgattggaatccacgtgtcagtctaaagaaaatgcggataacaatagtcaaaaattattttgaagcttcatacttaattttcaatcacaaaggagtgtatagattatccaaaacgttctattttaagcaattatatcttacaactcccaaatccattaaatttatcttatcacatgtttcttcttatttaaactcatatgatgtacttaactattaaaaatcggaaacaagaagaaaataagcataactctacacaaaataaacataattaactaaaatacacatctaaaccacttcataaaatgcaccagaaactagcctatcagcggggcaatccaataacagatacaactaagtgatctttgttagatagaagagaggaagcataatctgaaaaagaaaagctgagaaataggtttcgaaatgttgttgcttaccaaattatttctcatcattcaaatggtgtcaattataaaggatacatagaaagacacttcctcaatcttcaccccatgattacgcagccctcacagaaatttaacccaatccaatatgtaacaagttccattatcctgaataagaaaagatgaccattacaagtatcacattataataaagaaaaaagtgttccatgttctcctcccacccgggggcaagtagtatgttcaatttgaattctagaacccagtacaccccaaactaaaaaatcatttgaaataatactcttaactgaataatagagtttgaagtagataggcggatttagtggagagacggccactattctctttaaccatactcaccaatctcctccgtggccacaagatttgtcacttcaaaagatagcagcaatagtgtcacaatcataagattaacatattagttaaccattatctttagccacaaggtttgccattcttactcaccagacacggtcactgtccttggccacaaggtttgcgattcttacttaattattgactatgaaattattggcattaagtgtcaagtactatacattaaaaccaaacactattatttgtgcaatttaattttgagtcctacgtacatttattaactatgtgcattatttatttgttttgcaaaaggactaatataattatactaattagtactctgtacgtagtgcgcaagtccaaccagaagactcttggaaacatgtacaataataattaataagctataaattatgacaagacgcacgacaaaaaaagaaagaaagaaattccaacaaacaatataattttgtaagaaataataattaaataaatattccactacattaattaattaattaatataattagtacaacagtcccagatatgtcatattctccagcataaaagctctgaaatattgattatttgattaatatatagattaatcattaaattcatgcaccatgtacaactaatgattagtataccacccaattaataattaagttgttattaccaaaatgttttaaatctttttacaaaattcaggatattatcatattagtgcggtggtgttgatcagtttgagcatcttgtacaaagcaaaagacaaaccaaacaccatcacttgatatattattaataaattttaagttttacatatgtttgttgccactctcttttgtctcccttgatcttaattattctagattttgatcaccattaaaattatattgactctctccactctccatccatataaatatactgaaatgttacgtaccgagccacttattaattaagattttattcatttttattttatttttgtttatgatattggctattttttttttatttaaggaatatagtgttttgtttgaaataatattacttataaacaaaaaaatagtttaaagtattagaagtagctagtgatagtgttcttataaaattgtaaataaatttaatattagaatagtaaataattatatttagaggaatgtggtattatcccatagtacaccatgctaggatcacctagtataaatggtgttgctaaaagacgaaataggactcttaaggatatggtaaggaacatgacctctcattctaccttacctgagtccctccgaagagaagcattaaagacagcaacttacattttaaatagagtaccaagtaaagcagttgcaaaaataccttatgatctttggataagtcgaaagcctagtctaacgcatttccacctttggggatgtccagctgagacaaggccttacaggccacatgaaaataaattggacttcaaaattattagcaactagtttgttagttattctgagcgatctaggggctataagttttatgatccca

SEQ ID NO: 379642 - DNA, 4084 bp, Cannabis indica
gaagccataatagccaccagaaaagataacaatctaaaaccagcaacagacaaaacttagagacaaaagaacatactcaacatgtcaccagacaagacttaaccttttttattatcttaattattaggtaaagtggatctgattacatattaattgtaatagtttttataattttcttaattaaaataaaattacagtaattaataacatgaaaacttatgtattgcacgtacgtaacacaatatatacaaattaaatgaatgtgattaaggtgttaattattatagtgtatgtgtatatgtgtgtgtgggccaattatatattatatatatagtatcttaattaggatatcattgaaattttctaatgatcattccaatatatgcaatctaattaattaattaattaatttgattgcaacaatggatggatcgacaaattataatgctaattaataatgaactagctagctatagacaaagatctacatacataaggaaatgtccaaccttaatcttataattaatattgtgatataatttcttcaaataaaaaggtttctaaaatattatttttagaaaattgtttgactcacaaaaactgttcttaaaagacattccttgttcttcttagacgaatttttaggaaagcctgttttcttctagaaaggaattacgaatgactagctgttcatcttggaaggtagttccagatagtcaattctagttggctctttcctatctggcaatgtcattcagcgagtgccttggtctgtattttcggaagtccttatacttgctccaggatgcactcttacttacactgacgtggagacattgctcaaaggagagttggttaaagttagttatttctaactagttaacttaacaacttcaattcttgcaaccaccaattttagaattttgatctcttttcaaataataaatggatcatgttgatattgagagaaagatatagagagaaaaagattgagaggtagagagatagaggtacagagaaaagagagattgagtttgagttttataagaagaattttctgtaaatagaaaaaaaaaaaattgggttagagtatgagagttgaaatactttgagagaactcataagagaactagaaactggaatagagtcataaattacatcgatatattagacttgaaccaatatatatttttgtattgatttctttattttctgccttatttgttttctagtttttccttatatccttgtttatcgttgttttttgattattgttcgtgattttgttaatcttgttattaattgtttaattatttaaagtttgttagtttaattatgcacctttacttgtaatttttccaaaaatataatatataaatatcatattatcatgactaaattaattactgatgatgatatacatattaaccaaattaaacgagtatacacccaattccatcatactattttcacaataatcccataacctctacagaaatttgatcaagtacgtactaatacttaacagcaagctgctatatatatactatatacacatataattatacataatcatgtattccaaatgtgcgtttatattatcaaaataaaatatatgtataataacttaactatatgggcaataaattattgtgtgctagcttcgatcttctgaagatatagttaacactattagagatataatcatccaacaaaataatatataaattaatataatctttacatttattcccgaagttggttgtatgggagtagtgtagagattattgttgtagctttgcaacaatcccaactagtacgtatcacatgttgtaccaagtagtatgagctaccaaatgatagtagctcaggattaatgatcaggtcttaaaaaattaactaaaatatactcaatatatatatatatatatatatatttatacatagttagtgaaatctttacattcaatttaaaattgtctattccctagctaacatgattaatttgtacgggagtagtactagttgggatttctgtagctttacaacaatctcaactagtattacatattgtatcaagtataatcgagctatatatacttgcagaaagtatacattcaatcaagatttaattaatctaatagttaattagaaagccaaagtatatcatatcgaacttagtatatacaaattaagtacatttataaacaaattaaacttatatatagttaaaacatattgtggccataaatttatttgttgtagtacttcacagcttacatacatacacttaatgtccatatataaaatatatattatatatatgcacactatatgtaaccaaaaatataaatattagtataggaataatagccaaaaatatacaaacatacattgattcatgattcactatatataatataaataaatatgtaagtacaataataataatgcagagacaaatctgacaacaggctcaatatatatatagtaattttttttttttaaaaaaaagtaagtttttaacattatatgtagtaatgaataatgatatatctgaatgatgtgccaacactagaaccccactaagaatttatagaacaaataacgagaaaaaagaataattatatataaaataaaagacacacaacatgatctgcaaaatctatcacttgtcatcaaaaagtaagacttttcaatctctcctcccctctctctttctctatatctaaaactatttagatacatacataaatacattatgtatatatatatgtattgatcacttcagttcagttcagtttatcactactatgtgcattcaattcaatatcagttcctccctaatcactcacactgcaccatatctctatggtcttaaacaatgctctatataataatgtctctcatatatatttctttagcatcagagaattgagctgaatttaaataatctgttaaacatgcatgagacttttcaaatgtgttaattttttaaaattttacaaaatatcctaagaccatcaaaaaattgtaataaaaatttctcccacataccaaaacggataaaaaataaatcagtaaatctattttaagaggttgaattgtaaaatatttaaatttcatatattatacttattatatatataaaacataacatatataatcaaaacttaatgttaaaacaaatataaaataagaaaatgagagagagtttataattaaatccaaaattactacatgataatgataataatataataataattatgtgttactcaataatattatgatcatcggtagaaacagaatgagcagcactaatattatcatcattatcattaataataatattattattattattatcatcagtaccaccaaacgacatcgtttcattggttgagattattagctgagcagtagtagtagtggcagcattttggtgaggtggccttttccgtttcttcttcttctcataactaactcctcttgccttagattgagaatccctaacttcacgcaagtaaagcctaactgcccgagccccgaaagggttcgcctcgggttttcccccatgctcctcaaaagctgccctaagacgccctatcagggcatctaggctgccccatgcctgcctcagcgggcaggggcatggacctgggggattcgggtgcccgaaaaagggacagagattagtgtggacttttgtcttaccgaattgatccaagtaacggaggaattcgagaacgtgagctccgctgcaccggcttaaagatagcggcggccggtggttccttaggtactgtccgaaagtgttccaatcccttcttttttggttctcgtacctactcgaacctgaccccgaacccgaacctgaacctgaagtagctggtggtggtagtggtggttgttgttgtgggttcatgaggtgaagatgttgatcaccaatattggagttttgatcatcatgttctgatgattccatggtgttggaattagggttttccaattcttcatcaactgaattcatatccatatctctctctctctctctctctctccctctatatatatatatata

SEQ ID NO: 379643 - DNA, 9654 bp, Cannabis indica
tttttgttttggtgaagactaaaggttttttcttgattgatgggattattatttttataccttatattaatattttaaggaaaagtaatttcgtaattattttatacctatatatttaagagtaattaatgggtaattatattgataccatttataagtatttaaatgcaccttttaatttttacaatttttgttaaaagtcaatttttttgccttcctattgtgaattcatgatatgtgtatttctttttcataaaccttttgcttttgtaattcatttaaactctttatttatgaatgttgatttgttctttttactgttttatcactaacttggttattgaaagttttttcatttcatgttttatggaaaacattatactttgtgaggacttaatgcgccacagtttgttggtattgctacattttaaggcttttgtgtttatttttatggcttgtccctaattatttagggtagaatggttaaatatttcatgttttcatttttttatagcttgcccttaattatttagggacttgatgcgccatactctttaaaataaaaatattaccttaattaatcatggggctagagtgttgagacaaattttttagttgtggactttttccaatctggtcttatgcataagggcgttaatgagacgaatatagctctcattcttaaggtggcaaatcgaaagaaaatatctcaattcagacttattttgctctctaatacggtttacaaggttatttttaaaatcattgcaaatagaattaggtcggtgctccccagattgatttgtccaactcaggcggcttttgttacgggggcagagtatcaatgataataatgtgctggtccaagaaatcatccactcttttaagctcaaaaaaggtaaagagggcttgtttgctattaagattgacctggtgaaagcttatgatatattcagctgacaattcattgaccatgttctcagcagttttaaggtccctgctaagttttgtaattggattcgccaatgtatctctactactttgtttaatattcacctcaatggtggaaaggtgagcaacttagttcctgagtgtgggttgagacaggatgatccactatcgttgtatctctttatttgggccgctgccatcctctctcatattctagagaaggccatcgatgctggttctattcgaggtaccaagatgagtagagatggtcctaggctctctcaccttttctttgcagatgaccgtatccttgtgggaagggcgactattgcagaggacaaaggcttttgccttgagaaattttggactggtctgggcaacgtgttaataagcttaaaacttttttttttttccgtaataacactagtgagggtatgaaaagtggtctcatgcaggagcttgggcttaacatgaccacttccaacataaattacctggggctcccgttatttagatctaagcaaaaggatgcggattttaatttcattcttgagaaccttatcttgaagcttcatggttggaaattgaaaactctctcaaaggccgatcgtgcagcattaattaaatcagttgggcttgctatgctagtctacattatgcaaactaccaagctttcaaagaaacttgtctttaaaattgatggtatgatcagagagttctggtggggttgcgagcaataaaaccgtggtatctacttgaaggcatgggaccgcttatgcctcccaaagtccaggggtggccttaggttccgtaaaaccctataaatgaatcaggctttgctgaccaagtgggaatgggccctcctcgatgatgaacaatcgttctgttgtaaactgtcaagagctaagtatcttaaaggaaaaccgttcttggaaggttcttatagaagttcagactcttggttttggaagaatatggtgaaatttaaggatatcctgaagaaatgtgcttgttagtttattgttgatgggaagaatactaatatctggactgatccttgggttttacatggaaagaatttctatctgaagcctattacccccagacatgaaggggtgatgaaagtggtagagttactcctgtagaacggggtttgggacattactaaactccatgccctgtttgatttgaaaataattagtaacatcatcaaaggaggatatcccaatggtttagggagggacaggtgggtgtggatgaaagagctgaatgttattcacaaagaagtctacatacctagtacaagctttagaaagagcctcgacctgtgttgttgctcctgccttgtggaacaaactctagaactcaaacattttagagaggcataaggtcttttggtggggcattttgtttgatgctctactagtccgcgccctactggctcagagaattagaattgaagaggtgttatgccttctttgtggggttgatgaggtatcaatggagcaccttttttctctattgcaactttgcataccatctttagcgttcttccccttgaggactctttccgtttcgtgactcaggagcctgggtttgggattgggtaacttttatttggaacttgaagtcgaaaggggtggactttaataaactgttcctttatgccacaatagtagtggacacaatttggaagacccgtaacgaaaaggttcacaactcatccccgagtaacattaaacttggtattaattctatctctttatgttaagattatgcatcctgcttttttgcgtcggcattggctgtggtgtctcccgcttggtcccctcctccaaaatattatatcaaaatcaactgtgatgttaaggtttgtagcgagtccatgtgcgtggcggctttggctagggatcatatggggacagttttgtgggtagcagctaacatgctcatcttctcgtatctattgatcggcgaagctacgacgtgtcgtttagcattggattcgactgtttcgatgaagcaccgttttgtcttgattgagagtgattcagaaaaggttatcaaagcgctgaaaagaaactattcaagttggagcattgataattatattaatatttgtaatcaactctctaatatgttgtaatttctcgtttattcctaaatgttgtaattttgcggcccataatgtagctaagtgggtttttacttagaatatttcaagtatagtagagtcctcctctatatctaattttatcttttgtaatgactgagaggtctaactctttctattttataaacactttatttttcaaaaaataaaaataaaaattgcagtaattgaaattggacacaaaaattgtttgaataaaacgcagagttttggtttcattgatgagcctgagtgtgtgtgcattgtatataacataatccttatctctctctttctctttttctctctcttacctgactcatcatcatcacaccacacaactccaacacctcaaatccactctctctctcgagctctgaaatcacaatccatggcttccatggctgctcccactcatcataacctcaccttccctaaccccattttctcatctcctcttagaaaaccttcctcctcctcctccttctactactcttctccattttcctctcattctcattcccactctctctctagggttcctgattccgccttctgccgatgtaacagctcctcctcatcgtcatcttcgtcttcttcttcttctgactcgcagtggagatgggattcggctctcgctgatgtcatcagaaccgcacttaagcgattcgattcctattttaattcgaattcagctgatgatggttcttccggtgtttttgactctgatggttcacggaatcaatctcaagtaccggagtgggattgggatcggtggcgtcagcattttggtgaggtcgacgagcaagaacgattggtctccgtcttgaaggtttttgctttttttctcttattcgtacatatgaatattcatcgaaattagtaaatatacaattacgtatcttgatcgtaacataaagtaactaaacatgaatttgggtgttgtttacgattctttgtaggtaagtaactaaacatgaatttgggtgttgtttacgattctttgtaggtaatttatgcatgcgcgataatatatccttaccctttgtcattagctcgttcatatatatatttatgtgtttatggaaatgatgatttttatgtatgtgtttcaatagtctcaattgggtcaagcaatacatatggaggattttgaaggtgctgcgaggctcaaggtggcaattgcagcagcagcaacaaacgacgttgttggcagagtgatgtataagctgaatgtaggagttttcactttcattttcaatttgttgtttctgttaaggatatattaattttggctaataattacaaccatggctatctcagagagctatagaggaagaacagtatggggatgcggcctttgtaagagataatgctggtgctggattggtgagtcggtcaaaatagttcattagaagagaaataattatcatcttgaagtaaaagcttatcatttgtataattttatgggaatgttcttgtgttcgtttttatttttaatgtatcactgccctctaaaattcatgctgtgttttcattatgggtacactgatttattattaatatggttttcttagatgaaaaacatcattttaagccaatatttttttatgctatttgattatttcttagttggtggagcttagttcttgtcacagatattttattttgaaaaaaaaaaaaaatcttcagacagctatcccactttttatggatgtcagttgaatttttatgctgaaaaattattctaatagtcatttaattggtactagtacttttaatgtaatgtctgtccttgaatctgtctaatatgtctaaatatctggtttgtgatataatatgtccttttatcacttttgatttgctctgttttatgatactggcttgtggctttcaggttggatggtgggctggcatgtcgaaagacaccaatgatcctcatggtctaatcattcgaataactgctgagcatgggagatatgtggcaagaagttatagtcctcggtacgttcttttgcttgataattaaggacttcagattggcactatctatttaaatatagtggtatttgctgtttagctttgtgagaaccatcgacttttagcctatgttttcctcccgtttttccaaatcattattttccattagagtcaaggagtttatgtgaatttgaacaaatatgcttatggtaagctgaaaaaacaaatgttgctggaagaattataagctgcaaggagtatcttttatgttatcctttaatcttcttctatttaggtatgaattacttagcaaacccacataacctgggcaattatgccgtatcaattgggattatttgcccaattcattatccttaatatcctatttaagatagtgtacggagtatcttttacattatccttaatcgtcttctatttaagtatgaattacctagcaaacccacatatcctgggcaaatatgccctatgaattgtgatctatgtgagtagataccattaaggtcattatttattcttagttgttgtgaattgctgctacgtagccattaggatcattttctaagtgtctatgatttatattgtgaattatgtgtgagataaagaaacagctgctgtattgaagtgaatgacaatctcactacaatttttaataggaaattcacattagttagatatgtagggatatcagaaaaatactgatactactactattagttactggaacttgttggatccaagtctctggctttttatattttggaactcttcctaggcatccatgaggaaatatgaaaaagtgtatgctgcaatgctttattgtcattttaagttattcttttacatactaattagtaattactttttagtggatcttagcatcttggccttctgcgtgctgcagatcagtttgtttttaacctttcattgctcttccttttcttttgcaggcaacttgctaccgctgcagctggtaatcccctgttcgaaatttttttaacagtgaataggaggggcgaatacagacagcaggtatcttttggtagcttagtcaatgtctacttcaatgtgtgaatgtaacttgtagtttgataatatgatgctattatattccacaaagaaattgttgaaaatatctatatattgccaaatgaatggactggtcctaagaatgttatgagctgaaattaagtgtttttaaaaggagcaggaaaggaaaattgggagagaggttggaggaattgttgtggtggaggggagcctttcaaattaattcgataactccaatggtattgtaaagtgtgcaaatctgacacatgccaaatttgacacaaaatataatatgtccgtacttggcacaccattaaattgtacctttttatttactttgaaatttattgttgcctaattttgctcactgaagtggtatatcttttaaaatgtgttaaaatatagcaatgcatcacttttttggcactttattagttctaataatatacttcacatatttagttaaaataaaatttattgtgcatttattaaattagtgacttttaacttatacttctaagtgaaattctatttagtatttgtgcagcataatactaaattttgtgcctaatataacatttagtcactttttgttcaaatttggtactttcattggagatggtgttagctttgtgtagaaataggattaaaataaatttgttaatgagatgtttgattgtaattggttacgacactaattattatttttttatatacaatgaccattcatacactacttaagtcaattacttgacagcatatttgaatccattaagaaattggtctatgtttgctcattggcatctttctttatgtttgatttgtatgtatgttttccccccatatctatgtatttcagaatttatttttcatgacagtatggtttatatcatcttagggcaatgtcatgattttcaggctgtgtatctaaagcgaggaggttcttataaagatatttcactttcttcgaaagtatcagattctatcagtaacatggatccattagattcagctgatggcaaaagtgatctgcttgtttctgttaatgaagatgttgaagatgaagacgacaatgatagggatgatctttctgattcagcccagggattttctggttttcaggatattttgaaagatatgattcctggtgtcaaggtgaaggttttgaaagtcacagcacctgggaaggttgataaggatcttatctctaaagttatcgaacagataatagaagaagatgatgaagagaaggatgatgatatggaaagtttagaagcagaggatgactttcagagtgagagtgatgaagagaaagatgtgattgaattggaggcaagtcctggaattactgaaagtgaagagcggagtgaaattgcatttaaggttgtcgttggcggtcttatgcaaaaaatgtcaagtggcatgtctactagagaaatgctacgggttcctgctaagctagagaaaaatggaaggtcatcattttctttctctatagagaaagacaccaatcaggattcttatgacaaggaacaggctctgttgcagaaaaaatctaaacttaaaggtcgacttaacattgataatgttatgtttgatctaactaagtttattggtaaagagaaaataccactgaaggtacgttaagtatctagtcatgctttgaatgcttttcgtagagtgagtttctatttttcattagggaattagcatctatttactaagtaaaattcataaaaatttcttatgtgtattttttattttcctggaaaaaaatatatattaatcaggtgctcaaagatgttggtgagctgataagtcttactctgactcaagctcaaaaccgtcaaccactgtcggaatcaacaactttcaaccgcattaagttaccaaattcttcagatcctctaaatggtatcattctgtgataactttctaaccatattccatatattgtttctcagaccctttaacttgatatattgtttatcaggactctacattggtgcgcatgggctgtacacctctgaagttattcacctgcaacgaaaatttggtcaatggaaagatgatagtgggaaatcagagccttcaaatcttgagttctatgaatacgtagaagctttaaaaataactggggatccttatgtaccagccggtcaggtaacttccttaaaatttttattcaatttaattatggatgaccagttaggggtataattgactttgtcttcccaactgagtgtttcagtttaatgagatatctctttgtatccattttgaatttgtaaatactgtatatatatatatatatatatatactgctgttgggtttgctgttgttttatgtgttgatctagttttataaatataacaaaacttgactgtttattactgattggtgtggcaggttgccttccgtgcaaaaattggtacaagataccaacttcctcataaagggattattccagaagagttcggagtggtatgaaaatagcttcttcttcttcttctttatatgtaattatattttgtatatccttatataattttttttgccaaattagattgctcgatacaaaggacaaggaagacttgctgcaccaggatttcgtaatcctcgatgggttgatggtgaacttgttattcttgatggaaaggtttgcactacacttccaccatgtcccattttttatttattaaggcactattttaatcttattttattttatttctgaaattctacttaaatttatattttttcaccttttcaaactttgcagtacataaaaggtgggcctgttgtagggttcgtgtattgggcccccgagtatcatttcttggtgttctttaatcggctgaggcttcaagagtagatttctcattgtacataacagtcaaagtcattgttttggttcaataaagtagggtaagttcattctctttgaaatatctaaagtaagaaagatatattactctttactggagtggagagccaatgcatctacttttcaaaaactcagccatgaaattgttttcagtttgaaaaggtgcttgatggatataattttaagattatagtctattacttgtatatatggataatggaggcagtgtgtggagctgagaacttttacaactgaaactagaagaaaacaaacatctttttaattttctttattactgttggttattatccgtgatcgacagaaaagaattgaacgaagcgtcttctaatccgtgcctctcttgtcttgcagtacataaaatgtgtttatttccagaacacaacttccccgatttaaaggagtggagaaatctggaaatgtagggctatgtataatgaaattctgctttgcttgctcagctgactggtgcggcacacttggctgactcaacaacaaggagagttgtagtagtaagtaaccaatggaagctttggaatgcacaaatcatacttggcttttacaatttacctttttaatcacacacatgtatgtatg

SEQ ID NO: 379644 - DNA, 4496 bp, Cannabis indica
aaaaaaaaaaaaaaaatccctttgtcacaaagtgttaaaaagcatgtgaaagtgcctaggaatgaaaatagagcccccaagtgtttaggtaagggtaataataaaattaatataataatttgcatataatgtaaagtgctccaatacaattaccaaggaataaggatcacttccaatactttaataagatagttaaagctctctctttctctatctctctctatatcgcttggtgccaaaaccatacaaaatcaattagatttcatatatttacgtaggaatataataagttgatttggatctcacagctgcaattgatagggggggacttgctttttttttttcctacccttttcttcttttgttgctttctgtctttcttgtctccttgtctttctttagctctccttttactttttttttcttttcttttgttattttttggctgattttttcagatgggtacctgattctcacatctatctcaagctctctcacaactctcattcaaggagagcttagctagctggactacccttctttcatagacattttaaatcacgaattcaaaagaagagaagtactagtatagtaacaatgatcagaggcagaatgaaggatctatactaatgtgggaataatatatataataatcatataatcaaagtgctctgcccaaagtgaactccaaattgggcttcctgggactatttgttggtgagcttccatctgatgatgatattctttcgtcgcttaagcatttgggatccatgtctttctgaaaaaaaaaccatatatatttattttagaaaagaaaatgtattataaaaagaatgagcacaaaaatagtaagagcttttgatgatgaaagaagaagtgtgtgtgtgtgtgtgtttgaactgtggggcttgggaatcagaagcatttgactcatcaggagaataaaagaatagttatcaatattaaagaaactttggaagagtacgtttagaaagcctgctacagtgtgcatgacagtagtatgctacacccccaaaaaatattattccatttacaatatcatattctcaatcatatataatatatatttctacatgtataacatggatgcatatacattacatagaccatttataaaaataaatttacaatgtatgcatgttcattataataatatatacatggaccatcttacatatataatgctcaaagaaatttcctctttttttcttttttattcacatgcaggaacttcagcttttcatcacctaggaaatttgaaaatgacaatgttcaccttaagtttcagaagaaattatctatccatgtatataacatgtacgtacacattgggtttctgaaacactctcattgatacttttctcttcttttcttgcaataaatgtatgctttataatttatgacaaataatacgtaatattcctaagaatatataatttagaggaagggaacaactggggttattttaggaaataaataataaaggttaaatcgaaaagagtaattcgttaagtacctgatcatcatcaagagatgctaacataatatttccaccaatagaatcctttgttttgccatgcaaccaagcttccctgctagaaaaaccaaaggcacattgatgaagagagaatattaattttaatcagtggaagccatgcaagagataaaagcaaacatagaaaagaaagctatcttttacactgtctttgtttatagtctttcaattaagttttataggtttttaaattttgtggtgattgagatataaagttgaatttccaccttctcatctctcccatgtgatttcccattttttcccattacccaaaaacacactacaaagaagtttcaaacaccgcatatatctttggcacaaagagatttccactaatgggaccatcaggatcatgtagatataattaatatatatatatatatatatattggaggtgggatgagaagtatttagctttgagactaagtttttgtgcatatatattcatattgtagggcccgcatatttaaaaaaaaaaaaaataccccctaaaatttgtgccccacaaaatccaaaggaaagagatagatatctcaattttttaggcagattttgtcaaaatagggattcccatttattggaattctaggagtttgtggtgggtttcttttactccccttttcacccactagaggagattataattacctcatcatggagttttcagcatcctatatagttcatagtaattgcagacagatagaccgaagcaataataaacgttttagttttattttccctctctttttgtaatttcttacttacaattatgtctctatatgtgtggagtagctaggagagagatatatatatagatatagtacttctaattaaggttttcattcatgtacacttgtagtgaagatgactacttcattaagtcagaccctcgatctttaaatattatctatacatatataattattgctaaaggtattctctatactccaacgtacacaaatttaaaacaccattccttattattgcttctttaatttctttttgtactctctttttctttatagctgagacaaagttcccttttgaatgtgtagttatagatatatattaaacaaagctcatcaaagcaaaagacttcaataaaatataacgtacatatagatgcatacacataattactatgtttcaattatgtttggatcgtctagtaatatatgtacataaatatatatataaatgcagttggtgatattaatgtatacattgtctatcctttatttaaaacaaatttaaattattaagcacaataaatggagtagatgataggaccatttgaaataataaaatggttttatttcaaattatataagcatcagatttagatttttattaccttgatgaattgctccatagggcagaattgttatagtccttgtcttgaccacttgaccttccctgttgaggcgattgctcagaccttcttgtgttctgaatgtcaaacattaaatcttcagttgtgtctccagatgacccattctcgtacgcctctgattgtcgtaatcaatacaattatatataagaacataattatgtatataaacacttcaaaaatatctaaccccattatttatgatcaaataaagaagagagaaaactttaataatacctgaagaagcggctgctctatctgttgtcttcaccgtccggtacatctgaaataaatttgggccaaataatataaataccaaatatgtttgagtagctaggcatattaatgatatttttttttttgaaacaacatattaatgatattaaagcatatacattgtagaaatcatttgccgaagtacagaaatttgaacaataagatatttatttcatattttcattaagagacaaataacatatagaaagaaaagcaataataagctttctccgacttaacccagccaaaaaaaaaataaaaaagattttcgcctacttattaccgtacagttgtttttattttagaaaacacaaagcaatctgtagatgcgactacattatacacaagtcggcaattatttatatgtgtatatctacatacataatagatgagcatgtatgtgtatatacatatacatataagggcatgggagactagtatatatactgcatgcatttaaccatggttaaatagaatacaagtgtggtcagaggaaaccaatctgatgaagatatcattgagaaatgataatgttctgtacttgtttcattaaagaaagaaaaaagaaaagataaaaaaaaactctcctataatctgaaaatcatttcttattcattatagactgtagtctctgtctcggcttggctacacgactcattcttttgaattccttgggctttgtcttatttgtttgctgaaatcgatataatatagtacatttatatttatatttatatactactctatcaccctccctctctctctatctcactttttttcttatttcttttttccttcttcacactgttactaatatgtgatttatttcttccaagcaaaaagctgtttattagcttggcaggattagcagaaccatcagatctagttgaaaaagaagtgctaaggattttccaacttaagtaaaaaaaaaataaaaaaccattggaggattttgcattaacatattaatctgaagttgtagtaagtgattaaaatcgaagatactgaacataacacagaaataccccattgagtatttagtgtcgtttttgtttttccctcacctgtaaatgagatttaacatgagcaagggtcaaatccttcacatccattagctcaagaactgacttcggcgtagcccctaaaaaagaataaaagaaaaaggaaaactgagtaccccaaatatcactcaatttgatatctaattatatttaaccaaattacttgttattaaatatataatataaaaaaaaa

SEQ ID NO: 379645 - DNA, 5201 bp, Cannabis indica
taaatattgaaaaaaaaaattataattggaaataggaattatattatatattcttcattattataatattaaaagaattgatttagtgaatatgcaaatgaatataatttatgataaaataattattataaaattaaagacatattaatttatattatagtgatgatgagtagaaatatcaaatatagtccaaaaattaggtcggtcccaaaggaagagggactgactgagtcatcaagtgttcgcaagggacaacattatatccacagtctatactacgacaccatatctctctttttctttttgagatggggtccacaattaattttaattaactgttaactaattaaatcactaattagagatttaattaatgaaaaaactattaaatgctcactacttcacccacttcacttcacttcactcgcaccagtcaccaagttccaaccatggctcctccactcacatttatctccttcctttgtctttgctcaatttttgtggctaaaacgctgtcgttttcaagcgatcagaggcccaagactttcattttccgagtggatagtcactctaagccttcggtttttcctacccattatcactggtactcctccgagttcgccgaagcacctcaaatcctccacacatacgacaccgttttccatggcttctccgctgttctcagccctgaccaggttgcttctgtcagtcgccacccttctgtcctcgcagtcttcgaggataaacgccgtcagctccacaccactcgttccccccaatttcttggcctgagaaatcagaggggtctttggtccgaatccgattacggttcagatgttattgttggcgtgttcgataccggaatctggcccgaaaggaggagcttctcggatttgaatctgggtccgatcccaagtcgatggaagggtacttgtgaggccggagtgagattcactgccaagaattgtaaccggaagctgattggtgctagattctttgcgaaaggtcatgaggcggcaggaaatattggcggcccggttagtggggtgaataacacggttgagttccggtcaccaagggacgccgatgggcatgggacacacacggcgtcgacggcggcgggaaggtacgcgttcgaggctagcatggctggctatgcttctggaatagccaaaggagtggctccgaaagctcgattggcggtgtacaaggtttgctggaaagattccggttgcttcgactccgatattttggcagctttcgacgctgccgtcaatgatggcgttgatgttatctctatatcgatcggtggcggtgatggaatttcttccccgtattatctcgatccaattgcaattggagcttacggagctgcttctaaaggggtcttcgtgtcgtcctcagctggaaacgatggacccaatggaatgtcagttactaacgtggcaccatggatgacctcagtcggagcaggaaccatagacaggaatttcccagctgttatcgttcttggcaacgggaggaaactttccggtgtttctctttatgcgggagcgccattaaagggtaaaatgtaccctctggtttaccctggtaaatcgggtatgctcccagcttcattgtgcatggagagttcgctggatcccaacttggtgaaggggaaaatcgttatctgtgatcgcggaagtagccctagggttgctaaaggcatggtggtgaagaaggctggaggtgtgggtatgatcttagccaacggaatttcccacggcgagggattagtcggcgatgctcatcttcttccggcttgtgctgtcggctctgatgagggaaacgccgttaaagcttatgtttcgtccacgtctaatgccacagccaccattgatttccacggaactgtgatcggaatcaaacctgctccgattgtggcttccttttcggggagaggacccaatactttgaacccagaaatcctcaagccggacttgatagcgccgggtgttaacattctcgccgcttggactgacgcagtcgggcctactgggttggacactgatacccgaaaaacggagttcaacattctgtcaggaacctcaatggcttgccctcatgtgagtggagcagcagctttgctaaaatctgctcacccagattggagcccagctgccattagatcggctttgatgacaactgctagtacagtcgacaaccgaaaccaacccatgaccgatgaagccacaggaaaaccctccacggcttacgatctcggagctgggcatatcaatctggatcgagctatggatccgggtctagtgtacgatatctcaaacaatgactacgtaaacttcttatgctcaatcgggtatggaccaaaagtgattcaggtaatcactaggaccccagtaaggtgcccggcgaagaggccgttgtctgagaacctgaattacccttcgatggcagtgttgttttcgacaacaacgaaaggcaggccaagcaagatgtttatccgaacggtgacaaatgtcggggttcccaattctgtgtacagggttagtgtcgaggctcccaagggaatcacggtggcagtgaagccggcgaagctggtgttcacggaggccgtgaagaaacggagcttcgtggtgactgtttcagccgacagtcggaatctagtattgggagactcaggtgcagcttttgggtctctctcgtggaccgatggaaagcatgtagttcggagccccattgtcgttactgaagtaactccattgtaaaacgaaacgacaacataaacaaaacaacagatcatgtcgttttgatcggtcaaagtcaaggtcatgcttagttttagaagtcaacacgcgtaatagagcttttgtttttttttttttttgaataatttttttctcctttaataactcatatagatatgttcgtgtgtttagagagggatgtcctagtcctagtgtgaaatctttttttttacttcctttttattaaaggtttggcaatgtatttatagactcatatacgtctatttatgctcaattttaaacttgttaacacatgattgattattatgcctactgtagtctgtagtttacaatatatgaaggtatttccatagatgtgttttgactaggcattttaaagaaagaaaagacagtattgacagtctaacctaacctaagtacctaactaagctactgacaaaaatttgtgtcaaaatttcagcggctttcgcggcgcatggtaatgaattgggttttaaacattatcacataatcaatctatagttctatacttttcgtaacactttttttttcttttgagtaaacacttttcgtaacacttgttttgacttttacaagcttttacttttcaaatgtgttttaccatcaatcctctttttttaatcttgattatgtggattttttttattttttattttgcacaaactgggttacattgtaaattatagtatacagttataacatttattgacttaagtactccaaaactgatatgatttcattttttttgtggaattgacatgatttcaatttgagggagggaaaatggactgttatttggtgtggaagttgatcctccaaatcaacctaaaattaactcacttatacttaactaacctaattcactttcagttatgttagttagttagttggtgtcggttttgcacctattttctaggtgtgagttatacctatatatagattactcttttcacgtttgtaaggagagaattaagagagaaagtttagagagtgaatgcttagttttctaagcagtgaaaccatgttcttgaaggggttaaaaacagagggtgtactcgggtaggagttgagaaactgagactgtttttctggtgtgtttctcgagtgttgcagagatgaagacatgaagacatgaagacatgaagcaatcaaatccaggcctcaagagttgaaattacatgaacctgcaccctagaagtcaatctgggcacctaggatttcatcaagcgcccaagttgacatccttaactagggtttgatttctcagactgtcttagtgaaaatgggtcaaactttgtattgggacatgaactagacataccacagacatatttgaggcattaaaatcaaatttggagaaagttcatttttgagtacccagagcactcagtgtcgggcacccaacgcccaggttgacaatttgtcaaactgggcaccttcgaagtattagatcgacaatctgacttctgcatcttatttgtcttcatcaaaaacagggaaataggtattaatttttatggtactaaatcaaatatgtggcggaagagtttcgtattattaattatcattgtaccatagcctaatggatctccagatgtgtatacattaaattaaaacataagattaacaagtttagaacatacacctcttaaagactatcaaggtatcttcaaaacttctcgtgtgttgtattcttaatctagatgatgagcttgatgcaattgactcacactagtgttttccaaatcagtccaccacacataaaaaatagtgtggctattaagataaagtgtatagcgttgttcttgtttagttctcaacacatgagtaagaataactaaaagagaaaactatttcttttctcttctatatattttgaaaatactactgtaaaagcgtttgtctgatttttcaaattaggcttctatttaaagtaattaaaattctttaattaaagcatatttaagtatttaaataaataaatatctataactaaattcagtcactgatatatatgagagaatgtctcaactacttgaaagagtgttgagagattctctcaataactttgaaatatctttcaccacttttaaaattcaaatatttatctaattaaattaattaaataattaattaatctaaaaagacaaacgtgcatagggcataggcgtctacccttgttttgtttagaacaaggatggtatctttttgttgacaactcttatctcaacaaatatttttttgacaaattttgtctttttcctatttaactaatttgaaaaaattatttggtacaaaaataaataattactattttgccaattcaaaatagattttttcaaacgatattatactattaattatcccttcccttaattgtaatacccgaaattaagaaaaagattagcaaaa

SEQ ID NO: 379646 - DNA, 2052 bp, Cannabis indica
cttttaaagtttctacaatatcaatcttatattacaatttaaagtcttgttaaagtatctgccattacaaaggctgagaaaagaaacattgaagaattcattgcaaaagaattcaaccaaaagagaaagaaaggataaacaagttaccgtttgaagaaaataaattgaatgctgcttagcaaatctacttttactttacaataatttctgaaaacttaaatctgtgaaattcaaaacaaacagtacatctatagaatgtgttttcttaaaagcttttcaaacaataaaacaacagtaaccttcaaacttatcagaaatcttaatcatcagtttcacataatgtataatagagcaccattaaaatatagaaacatccaatgcaaggtcatctatcaaacaaactagtatgtgtgaaatgctcaccaacacacacttaacaccaatttctgatcctattgcttcaaactggtcaaaaatctgaaatgtaagctccctgaaagaagatgtaacaaatgcaaataaaatcagaaccttatatgagatataacaatcaccgctcaacaaattattcactacacgaaaactaaccttgttggacacagcacgcaagcaaagaatgattgtggattctctaaaagagcttgcaatatgggaaggacaaaggctccatttttaccagaacccgtttgtgcaagtccagttaggtccttacctgtaaattcaaattaatttttcaaaaccaccctcaaattgtcaaatatatgcaaccaaaatgttacagtccaacaatttttctgtacatataaatgcctttcaattataatttaattaaatctcccatcaaatgtactactcagtcaagaacaacaaattaactacgtaggatcaaagacattattatagttaaacaaaagaaaagaaagacactatttcaaaatgtcatctattccatgtatgtttagtaaactaataaaattaaaataaaatatatgcaaagtaagatcaaaattgtccctatagttggctagattttaacaaagttggagagcaaaccatcaagtgtgtgaggaattgcttcagcctgtatcgtcgaagggtttttccaacccaattcatcacatgactcagccaattcgtcacatatccgcaactcttcaaatgtttggaggacctcctcgctttcctctgccattctcaaatccctaaaccaccaaattaaataacatatgatcatcaattttcacagaggtactgaaagtctcatctcaactctgaacgtttaaagaacagaaccgtacctgtgagtgaagcggaagtggtaatgaatccgagtgtgacaaccttacagaattcttcttctccgattcgtcggtgaaggacgttgataatgtatcaactttctattctactagggtacagcgacagaggagaagaaatatccaatcaaatatataagactgataattgttattttttttttttttttttgaaaaatgactgataatgtattttagccgtagattattaattaaataaagattaaaaaaattcaaaaccgtaaaattaataatatttagaaatttttacaccaaaaatctgatttgcacaatttattactgttttactcctacacgcctacattaatatttttcttatcatctttcttttattacaataataccacttacacatcattttcatgcacagacacgtgtgtcatctccatcatacatcaatcaacttccactctcttccctctcttttttcattttcttttcattttattttcgattttctttcagttttttttttgtttggaagatcaataacctccattgttgaagcataactacccattactcatcacggtttttttaggggtgagcaaaaaatctaagaaaccgaccaaaccgagtaaaccgaccgtccgaacaccgaaaaaactggcaccgaaaaccgaaaaaccgtcttcggttaaaaccgccttatcatggtcggtttagtgtcaatggcaaaccgaccgattaaaccgagaaccgaccgaacatatat

SEQ ID NO: 379647 - DNA, 2060 bp, Cannabis indica
ctgaaccaccacacgcgtgtcgctaccgagctgagcggtgtggtgtcactttatttttggagaaatttttatttattaaattattattatttatttaattaaattaaaacaattttttttctaaaacgcatttaattaattggtaaatagaagctttctgattttcagcatcgttcccacgttctaatgttcgcttcagtaacatctttcttcctgttactaccttcggtgtattgcctatataatgcatctaaaccaacgggagaaacacatatctttttctcatagaaaaaacatatacgatataaacatactattatattacatatatatattccaagcagtagtcagttttggagtgtagtattttgacggttctctattgtgcaatagagtttcgatatagtgtgctcgactgggctattttatcctggacacaacgaagctgatagtctgtttgcacatatctgggcagtgccgcgaatgtcttaaagagagcaacctagtccgcgactcaacctaaattttaattcgataaatttattctttttattttctgcagcaactattttcacaacacctattaactaaattagagagcttaatgatagtttagagctatggacaaaaactaattgcaaattgtattaagattaatgtagacactgctattttttaagaggagagtcgatgatggtttgggtttgtggttaggaatttgtgatgctaaactgatggcgactgctagcttgagtcggtcgggaaaggtgaagcctaaaattgcaaaggcttgcaaataaaagaggtattgagctagttgaaaaggaaggattttcactttgtgtaaagacaaatagcttggttgatgtgcaatccatcttcactcctatgaaaatgttctatccctttggttatttagttattcaagattgtatgagcttgttgaaatctttaagtaatgtttcttaaaatgttctactaatcaagtttttgcacactaatcttatttatttgctgattgtatgttcactaataatgttgcctcgaaacttttaattgttttttttttgagtaattactcttaatcaagttgatttgttattataaaaaaatagagaaagcctaatgagacttttcttatatccttactcttttctaattgaaaaatatgcctcatgcacaaactagatttatgataaacaatagtataataatattattttgtgccaatgcactttccatgttattggtttttttacatatataattagtttaaacaataatactattttgtaataatactatttttacatatgacctcaattttaggtgaaaattaaaatcaatatatattttgaaaatgaaattatagtcaagctcaaaacactattttcaaataatttataaatatagattcaaaatacaaaagcctaaagaagtacttagcaaacaatcaaacatggaaggtacaaaagggaatatattattgatactatacttctacaatgtatttcttatttgttttgatattcgaaagagtttttagtctaaattttttataatcgttgacgttttagttatttaagacattcgataaaatttaagagatttataaaaatttgacacatcaaaaatagggtttaatcagcatgttacaagcgatacttttttatttgatacacgtgtgaaataaattatttgaatcctattattggcgtgttaaaattttttaaacttctcaaaattttgctaaataactacaacgtagacgactatgaacaaaattagactaaaaaattctcttaaatactagaataaatagatggtacctcactaaaccccttttaggagtagtattgtagaatttttctataatatttttttaagttaataattcaaggatttattgatcaaataaatcaatggaaaattctacatgataaactcccttaaaagagatgcccatctttatctgttttggtatttaaaataattttttagtcaaatcttttctcatagtaatgaacgttatagttatttaaaacattctgtaaaatttt

SEQ ID NO: 379648 - DNA, 1700 bp, Cannabis indica
caaaaaggtcaccctttggccaccattgagtataactttgatgtttgatattttcccaggaagaccaaatccagtagccccaaaacctgccaagaagaaagacattagttatgtgcataaactcaaccataaaagaaaagataagtaagggagaaaaacaagaacaatacaactgcaaaacatgttcgggcaaaagtatgttctgtgataaaaattacgttctaacaatgtctaaaccatataacatgaattcacaaccatatcaatcttatcacaactcttatttaaaagaaaataatgcaaaccaatcaaagttctagcaaccagacatcaatctaaaaaaaaccacaataccacgacagctagagatcctagaaccgagcttccgatccaagattgccatacagtccaagcaccactactttttcaagtcacttcggaatagctcgagtgattaggtatgtgagtatctgtatgtgtggaaaggagactaaaaggggttcaaatccccaatgagtcaaaagccctggatataaggagagcaacctatggatccaaacaataaacctatcatgcatttttgtatcaaggagcttcacaacactcttcctgagaaaatttcgtgtaatttcagcatgatctgaattaagaaaacctaacttttatcattgaagaacaactctaaagactttcaaataaaaagaaagtcatttcaaacccaaaaagacaagtaatttggacaatctctaaccaagcattacatatattggtcgttcaaattaacaacagcccagtagagaaaattaccatttaaacaaactaatataaaaggtcaaaatttcaaatctatacagttcaaaaacctaatctttctacaattcagatcatgaactcttaccaatgtttcaagtaattgagtgattcagtaacatgaaaaattcaccataatatataaaatagtttacagtaaaacctaataaattgcttaaattggaaaaattcaaataaaaaatcaatctttagattcgagaaacagaaataggatacgtacttggaatcttaactcgaccatgaatggagtaaccttcactggacctgaaaatattaataatttgaataaaaaaatcgaatatttcattgaatggatgcggaatcaatgttccacaacactgtttggttaccaagaaaatcaaaaagggggtaaagttaaaatcttacacagaagaaggtgaaagcgaggaagacgagatgagtgtaaagcacaattgtactaaaatcaggagaagaaccgatttggatcggatgctcgacgccattgaaatctgaaattggaagaaaattcaatttctgtgtgtagagatttaatagattttgttaaatacaaattatgcaatttttcggggggttttgcataaatattcctaagttattttttgttttgcaatttaatccttggaaattatttttcttttttttggcaatcatatttttttttatttgtaaaatatacatagaaattagccctgagcattgatgttccaacaccaacctatgtgaaacattgtgagtgattaaccattttttatgttagtcatggactttatattaatttaaaaggggaaatttacatagtatactaacttttgtcatttttttacaaaatactgttagacggagttttttacctttttactgtgttt

SEQ ID NO: 379649 - DNA, 4415 bp, Cannabis indica
tgtcttctcttatcttcagtataaactcattgaaaaagctctggtttttaatcttaaaacagggaataagctatgctaagcttgcaaatcctccccccattgtcggtctatgtgagtagtttatttctttttttctcttttgggaatttcatactataaagttaatgatctatactgggttttcaccattatttttttttccagattcaagctttgtcccaccattgatatatgccgtttttggaagctcaagagacctagcagtgggacctgtttctatagcttctcttatacttggttcaatgctaagcaaagaagtttctcccattaaagatcctgtcttgtttcttcaactggcttttacttcgactttcttcgccggtctgtttcaagcttctctgggattgttaaggtgactattattatcattatgtagtcgtttttgccgttattttcttcatttttcactgtcgttttctcatggagaagcattgcttttcgtttcgattttgtttcatcatccatgcaggcttggattcctcattgattttctgtccaaggcaattcttattgggttcatggctggagctgctgtaatagtttctttacaacagcttaagagtcttcttggaattacccattttacccctcaaatgggtttggttcctgttttagactctgttttccaccatacaaaagaggtaagtgtagcgaaaacatagtgcaagattttgaacttttcaccccaaaaaaatataaatttattttatatatataaatatatatattcattcttcttgaaattcaaaaagtgatttattaactttttaatattaatgggattttgctttcttgtgttactcctactggcaagacacgtcgtacgttattctctttcattaaaaataataataataataataataagtttttgtacataatagtttatttatttcatcctaaggttttttttaacattcagatcttcttcttcacctctcttttttctttctaataatttgcagttcagtaaataaccaataataacataactattattcttttcaattgtatatagagggaaaatctatataaactcacttaaaatttaaacctaccacaattaataatgtgtacttttcaattaccactctaggaagttttttgcttttgcagttcttcttaaatcatgataataataataataacaataataataataataaggttcggtatgtaaggcctgatttcgtgtgtaacaaatatttttggtaatattcgtctcaataaattgagccagaaatggaggtccctttattcaatccaatcttcatacttacttaaacacagatgaagttttacaatttttatgaaacataaaaatattgcatcaatattgctgtgactttgaaaaatatgaattgagtaatttttatgtgcaaattatacaaatacagatagtatatatatatatatactattctaaatatcttaattagtgtaatattaaatgctttaaaaaggtgagatagtattttaactgttttagggaatgagtttttacagagcacaaaaaggccaaagctgttctgggtctcagcaggggccccactggcgtgtgtgatagtctccactatcattgttttcgcattcaaagctcaacaccatggcatcagtgtggtaagcaaagcttttgaatttgattaggtcatccccacacacacttaataatatttgatcaaaatttcattgttggtatgttattatagtgtggctaattaagaatttttttccgaatttttacatgtactaaattatgttttttgaatttttttggctattaaaaattcccctgaactattgagattgttagatttaataacttttgtctaatttcattcaattttactgtttcaatgattgtttatgtactaaaatatgctccccacactttgatatctaccaaatgatgctcctcaaacttcgatacgtactaaaccatgcccccggaacttttatccgtgttagaatttttttactaaaattaaacaaaagttcttaaatctaacaatcttaatagttcaggaggaatttttaacaactaaaaaaattcaaagagcatgatttggtacatgtgaagttcgagtggaaaaattgttaattagccttatattttacacacataaatactcattttgtaaattttatttctaaaaataccatttttatttggtagattggaaagttacaagaaggactaaacccaccttcatggaatatgttggttttccacggttcccatcttggacttgtgatcaagaccggatttgtcactggcattatttccctcactgtaagatcctcctcataattccctcttttttatttatttatttaccattataatcataagagcaaatttcattctaacttataggaaggtattgcggttgggagaacatttgctgctcttaaggactatagggtagatggcaacaaagaaatgatggccattggcctcatgaacatagttggctccttcacttcctgctatgttacaacaggtaacttttcttgaccatactttatgtttagttgaatttaaaacaagacttgtgaactcaaattattgtttttattttacaggcgcattttcgcggtctgcggtgaaccacaatgcaggagcaaagacagcggtgtctaacatagttatgtcaataacggttatggtgacactcctcttcttaatgccactcttcgaatacactcccaaccttgtgttgggagctataattgtcacggcggtgattggccttgttgatgttccagctgctatcaacatttggaggactgacaagtttgatttcgttgtcatgctcactgccttctttggtgttctcttcatctctgtccaagaaggccttgctatcgcggtaatatttacctaattttcagtcacaacaaaatttataataaaaaaaatgtaaatgtttattcatacataaataatggttttgttttggttcttttgatgttgataaggttggagtttccatctttaagatactcttgcaagtaactaggccaaggactgtggtgttgggaagcatacctggttctgatatttataggaatttgcatcactataaggatgcagtggaagtgcctggtttcctcattatatccattgaagctcctattaattttgctaacagcatgtacctcaatgaaaggttatttctaatttttaagttttatttttatgtatgtattctgtgcaagtcttatttattcttttcttccctgacaatgaacaaattttgtttgatgaaggattttgagatgggtggaagaatatgaggagaaagaaaatgcaaaaaagcattcaatcaatattcagtacgtgattctagacatgtcaggtaaagaaaagtcacatgttgccaaattcaattgtgaatggagaaatactaatcaaaattgggtttgtgttttatatgcaatttttttcagctgtgagtggcatagatacaaccggtgttacacttattaaggagctaaagaaagcaattgagaaaaaaggaagggaggtaagtaacaattaatcattgaaatattttacagcttatatatatagtttttttttttgttctgtttctcaactttgtaatgaataaaatttgatgtattgatcagcttgtgttggtgaacccattgggagaaattatagaaaaattacaaagagcagcggagacacgtgattttatgagaccagaaaatctgtacttgacagttggagaggctgtcacttctttgtcctcatcaatgaagattcatcctccaaccacgtacgacgaggaggcacaagccgctgttcctcatcccaactgaaaattgttgtcgtttatgaaaaatgaccaaaagttttatatatataaaatatttatataattataaaaggaaaaagtaaaatatatttgcttgtaattttgttgcatatgtaaaatgattttacctagtagtttttcaaatatagatagtaggcatgcaaatctttgatcggaaaaatggtgagggtgtatttggagaattttaattcggatcaatagacttgtattattggataatttaggagtgaacaagaaatgattaaagaagaaaaaacaatccaatagaagatatccataaaagacttgtattattggataatttaggagtgaacaagaaatgattaaagaagaaaaaacaatccaatagaagatatccataaaaattcatataccagctctctcgttaagcataaaagttgatacacctcaggaaggactaaagaagtgtaggaaatttaagataggcttttactatcctgcccctacaccaacaaaacaaacaaatcaatatttaaggtcaatttc

SEQ ID NO: 379650 - DNA, 935 bp, Cannabis indica
tatgacaagccaagactgaaaactataatttaattggttcacgtacataaataatattttttcatcttatgaagatggtttttaatttttagcatttttaaatgatcaattataatgatcacaaacaggtttgatcaggtctaccacaaaacgcagaagttgtgaattgtgggcatatataggaagcaaaatattgaccaattagtttgaatattgaaaatgcctgttaattaattaagtattttatttattattcattctttatttgttttagacaaattgacctttgtatatttgatattgcatatatataatttatatataccaaagtatttttttttttctcaaagatggaggacaaattttggagcatatataataataggacagaaatttatcaaaggaaaaactaatgtgagtacgtattaatatattgaaattttgctatttttataaattattcgtgccagaatattgaattataaatatatattttaaataaatttaatcacacaaaacaccaacctttattagtcaaataatttattctaccatgggttaatttataattgtatatagctcaaaagttgacttttattgtcatatatatccacgtgacatgcatgaagaacaattcagctagttgaagtgtccacagtccacaaatacgtaatgaggatcctttgttagacatttatatatataaactgaaatgtatatgtttaagtattaagtgcggaattaatcaaacatatatacactatgaataaggatcgaaatacctccagccattgaatcttgagcttcaaacccacataagctttgatctgcaaaggaaattgactactatgggtaatcgggcttcctcgctctctcaactctctttagatggaatttgctgttataaacagaatgagtgaggagctcggggaccg

SEQ ID NO: 379651 - DNA, 1626 bp, Cannabis indica
aaaaaataattaaagtaaaaaccttttcaagatgttgaaacaaataaaaaatctagtgcactacaataatttggaataacatatatacactaataaattacaaactaatcatatactacacttaattaataaactacgagccttataaatacaaacacatatatgatatatatatatatatatatatttatatatagtctcatttctcatgcattgaagttgaagttgattgatttacagagccaaggcaatttggccgccattgatggaggagaacaacaataatcagccattactctcctccagagaagataaccaaaacaaccacttagagactcttctctccacaacctcaaatcactccttcaccgccgatgccgacgacatccagcccataaataccgtcagagacttttataaagaattcaaagtcgaatccaagaagctctggttcttagccggtccagcaatcttcacctccatatgccaatactccctcggcgccatcacacaagtcttcgccggccatgtcagcactattgctctcgccgccgtctccgtcgagaactccgtcatcgccggattctccttcggagttatggtataataataataataataataataataataataatataaatacatccaaaattactacatatttatatcgaaaatgatgattttaattttgggttttgaatttgaatgaagcttggaatggggagtgctttggaaactctatgtggacaagcatttggggctggtcagcatgatatgttgggtatatatatgcaaagatcttgggtaatcctgaactcaacaggggtaatcctctgttttctgtacatattcgcttcgaagctcttgaaactgattggtcagacgacggagatttcagaggctgcggggttgtttgccgtttggatgattcctcagttatttgcttatgcaatgaattttccaatagctaagttcttacaggctcagagtaagatgatggtgatggctattatatcagctgttgctctggtttttcacactttttttagctggctactgattctcaagcttgattggggcatggccggcgccgccgtggtactcaacgtgtcgtggtggttcatagtggtggctcagcttgcttatatttttagtgggacttgtggtcgagcttggtctgggttttcttccaaggcttttcagaatctttggggctttgttaggctatctcttgcctctgctgttatgctctggtaagttttttttaaggataaattgcatttttgctccataaattttcacactaaatcatgttttttttttaagtttttaagcagttaaatttaaggatttcaatccaaattcattattacgtttctgaattctaatatcgaactaaataatgtttttgaattttaatatatactaaattataccattaaatttttattcacattaaactttttttaataaaattatactaaatgttttaaatttaacaatttgaataattgaaaaaaaatttaaagtacttttcagttaagaggcattttttgttatatgtcaaattttaagattaaaaattcaaattagcccttttttataattataattattattatt

SEQ ID NO: 379652 - DNA, 1235 bp, Cannabis indica
aaattgaaatttcccttacacaaatgcatgggaaaagccacatagtactagtcaataatatagagtatatgaagcaagcattaattcctaatataatctctgggaatttaaatattatattggttgcagaattaataaagtataatcatattatcttgacaaagacatatgagctcaacaaattaattataatttatataaataatatatatagattaagatttagatttagatttagatcaagcgcgttaattggaaaaaagtccgaggtatatttagtagcctaaatatgtaacatgaagttggagtccgatcatatcgagttcaaatagcatgcctagagccactaaggctaacttagtggtgagggaggatgggaaaaagggagaggtcatggttcgaacccaagacctttaaactattaagctaatatataattgtaaaataccataacgctacactaaaaaaacaaataagcatgcctagctagctatttttatatatatcctttgacgttagtgtggattaaggtcagaggcatgcatgcgctgttgcatgattgttgttagtagcttgttttgacttttatatatatttaggaataatattaataaacatgatgcagtatcagatcaaaaaaaataaacatgatgtagtatatcttttgattacgaagagtggagatacatgaaaaagaatatgcattgccacctcttgaagaaacacagaggaaggtaagttgacaaacttttctattatattatataaaaagatgtgtgttacatgctctttaaatgatgattggattgacttctatacctcataatttatataaacaaataaataattcggacttaaagagtgatatatatataaattaataccaattaatgtacactttctcgcctaagatcagcaagtgatcatgagtatatatatctattctatataaagtgtgcctatataactgaattcttgcgtttatgagaaattcatggataacttttttttaaaataattttctattcaaaaataatatattttttttattaagatgtattttaatattaatttttaaataaattaatattacttttaaattttaatcgggtttatgagaaatttatgggtaacttttttttaaaataattttctattcaaaaataataattttttttatgaagatgtattttaatattaatttttaaatacattaatattacttttaaatttta

SEQ ID NO: 379653 - DNA, 5183 bp, Cannabis indica
agaagacaaacatagtcatgtctagttattatttctttgaagctggtgcaaaatttagtgggcctttagaagaagataaaagagaatgcaaacaagtcagttacacttggttttgcgtgttttctttgaatacaaactataagtattgagttgtcgcctagcctcaagtagcattacttctaactaaacacgtctcttttaaaagttaaaaacaaaactctaaaaccaaaatcagagaagacaactcaaaggactttgattcagagttcagctgagctgtacctgtaccaaatccactgaaagcactcaatttgtgattgcagtcttttgaataagaaaaaaaaaaccctgcttgttagtttttgggctgaatcctagtgcttgatttatcaaaaggaaaaccataagttattttctgggcttaatccatgtgcttcaattatcaaatttgaattcaagtaccattgatacttgttattcaatgtatgactaacccaatattattattcaggaagattaccagacagttcatgcattgtcttttggcaaagatcttcctcgatgtcaacaatattagacgcatttttgcttgctttcatgcatagatctaattctcacaaatcaatttggttcaatgctggctggctgccatattataggcagacattttcgtcaaagtcaacaaaaaatattatttcctttggcttgaaagattcattattattactttttattttctgaaggagtattgtatcttcatatatcatacccaaaaaagttgaaacaaataataactgaacttgaactttcgttccaaataaaaaaaaggaaaatgaaaacttaacaattcaagagtctgcaacgttaaaccaatcaaaatggttctagacaacagcagtttacaggatcgcaatagataaaataaaaacacaaaggcagtttctaaaagctgatgtagaaaaaatcaccagaaaaaggtccggagattggtgcagccgatgctttaccattttacagacgagcaacgtaggaattggacagagtaacatatctcacccatctgtatggattgtatgtccccgacttctttgctatctgcaagtacttcacctgcatcccaatagataccatcattttaagttattcattcaattaagctggtctcgtacaccctttaaaagttgtgacagtactctatcttacttgccctctttaggcagagattttaagctttcatggaagataaatttagattttgatgactggaaccaaattaggaggcgatgctcttcacataaaaccaccattaacaaatcactaccagttcataacatagatataatcaatcatcaacttcaaatcttttatcccgctaagtctagtcatgtaacgtgagcatctaacaagtaacagtacttgacagtgttaacacactaacacttaaaccatctcataggattttcttctggagaacaattcagtaaactggtggcaagtacttgtagaaacttgatctacctcactgtatccagccaacggttaagattttacagaggtaattaccacattaattaaattagcttacctgaagctttgaagcattatacattggtatggtaaatgtcatgctaacaggaccggattcttttgttatattacctgcattaagcaaatatgttgcatgaacatgggaaggaaagcaacctcataaaagtaacgagaagagtatacatttaaaataattgaatgtcaataataaataatcataccatgcgattcttgtgaaaatgttagccttgctcgcagtgtatgttccgatccacctacaatctgtttgaattgaacacattaatatgaataaatgttcatcttctttcttcagttgagcacagtaaatgcatcaagaggaaatcaggtgcatctgtttcacttcaaaattgcaaaatactgaaaaaacatgagggcaaagataaaaaataattgccttctttaaattccattcaagcttcttattagcttccttgaaatctgtagtttgtccaacagctccagtttccaactcaaaacttgctctgaaataacaaaattgaaaaatttatggaacaaatatatgtatgttaatttcccaaggttttccagttggcttcttgatgcacctagatcataaacctttgacggttcattaaaatattagttaccataaaagagttgcaaatactcgacaagaaacagagcctgtctcgtaatgttttagctgctgcatttagaaatttacggtaagtaaccttccacaattccctttttaattttaaagtgctcttcctaatgtttctttataaatttttctaacacaaagactaccaaagccactagctcaagtgggtgagtgggtgtgtatgtgtgagtgcctcggacttcagttccctaccaatctaataacagggataaaaataaaacacaaaaactaccaaaaccccgtttagttaaagcttttgcttataactaaatgtatgagatatgtaaacattgtaacttattttttctattaagataactattatataaatattattttttaatgaaaaattattttcaaagtgtttggatgtcactaaataaagatttttgtgagtaaattaggaagtatgtaaattattccaaatttaaatatagctttagaaaagtccttttgggagaagctagaaatcctatcttctcccaaaaagacttctaaattaaaaaagaactttttatttttcatccacacatcttgacggattttttcatcctaaaagttaaaaagagtttataaaagctaagccaacggaccaaatgatcttttgctgattatacaaaaggtcatctcatctttcaaataattagatgatccaaacgtcatccaatattgacatacctatagcactagtattcttaatatctatttcaatcaaaaggtaaacagaatttgaagttatgtaagttctttgcaaacaaattggaccaaaaagaatgtgagcaggttatattaatggagtgtttgttatgtgagagtttggactcttggaaatggaaatgaaaaacaaacctatgtttggtatgatgttagtggaatgcttatgattaagctggtccaacttttaagtttatttttggggtaatctcaaactctttaaatactttgagtttgagattcccttaatctcaactcctctaaactaactaaaaaaccatcaaatgaaactcttacaccaaacaccccataattgatatcttccagctgaattttataatcttgaaaagaggcagaaacttatcaatgcaaattatcccattcttttgaaaggatccattcagccaaaaaaactaaaacaacgtaaatcaattttagccttgaaaatttacagataagcaaggtaataacaaatttacctcatagtatacttaggcagtggcatctgtatagaaatagtgtttgccgtaatgctagagggaaactctgcatgtactttcagaatcacctcagcctacaaggacgattccaaagtaaaatagtaaatatcagtcagtactagtaacaatcccttcatataagtaaagtgtaattttgaattttattagcaacataaggaatataaatttgatgattaataaaattctggtagtgtataatagccatataaaaccatcacatctattctttcaatatgttgatatcgaactagcttttgtcagtttgaatatttttaatctctaaaatgctaaagtggttttaccttaagggctcccgcttcttcaatcaaagcattaatacggaaaggaggcttgaattcctgggtcatacgataattcatgacaggaaactcaccatccggaggaacctagcaaaaatcagaagtgtaacatatcattttatactttaaagttaaacaagtactgtcaatctcatattatctaagtttgatttgacttaccagggacaaagttttttctgcctcaaaactatcaagacgtacggattcatgaaaattacagtcatcaagaatcactactcctgagccgacggagcttctatagtctgtttcagaaagaaatacccttgtctcgtgagattgtcaaaaaagaaagagaaccttcacaagaatattaaaataaagcttgaccacattcaacaagattattattaaacaataaaaagcaataattatcttctacccttttattgcataaagtacaaacccataataagttggatgcttctcctcagagttcaaagaattatatcagtttgtgactcagtcatacatgatacatccatattctccaactactttaaaagaattcaagaaattttttatgcagaatgtgaagctaagacatccgggtctaggagaaaataaatccaggaaaagaaaaatacatataccatagactgatctcccacctcttcctatgctcaggtcatcattaagtgctaaccgaatttctgggtttccagtaagataacttttcatttgaattgtgccatcaatttcagaggtcagtatgtatccctgttaaacaacattaacacgatacggcgaaatgagtaacacacagccaaagtaaaatactcttacaaacatttacagttaaatttacagaaaggtcaagatagcaaaagacttgcaagcatttatagataaatttagggaaaggccaagaatgaagaattcagttttaaagaaagaaagaaagaaaacatgcatatttctttctatagatatttgtagataaaatatgagtgctcacatgcgttgatgcttggtgattaacaaggttctgttaataaaaaaagggtgtaatactgctgagcaattgaagtataaagatatacataacaagatatcaactatggtatatgagccctagtacaaactatctacgccacaatggcatcttcaaaacaagattgaggatcgcatcatccataaatcttgtctacaatcatgttaaaaaacagaaaacaggaccaaaagttaaacaaataaaatcagcaaaggacaggaatactcacactagaactaaaagtcatgctgatcttctcaattatatcaacaaaaatttcctccctctttctaccactaggatcatttgcaacaacagattttgtgacagcagtccctggcattcttttggtcccttgc

SEQ ID NO: 379654 - DNA, 1357 bp, Cannabis indica
tttgaaatataaaaataaaaaagtccctaatttttaaatatgatgatttgcaggtaattgtactactaattctcattcacagcaacaaatgttgagatgacaacaaaaaatacacaattgttcggatgatcaagagacaaatgctgcaaatattcagaattattagaaatgttattgcagaaactacaattacacaacaatgaaacaacagatatgcaaatccaatattaggtgaaagaaggatacccaaccctcgaaataactgacggtgaaagtcttcaattttacttgcagctaaaatcaaaagaaccaaacttcagaaaatatcctctgtacataaacaaaatttataacacggcaacaacaccacatacatataatctttgtgcaaaaagagaaagaactgctaccaacgaagttcgcatgattgaaaataaacaattcatactaaaaacaacaacagatacacaactaaaaaatacgcatgaaattgagaaaatgttcaacattgtagactatgcaaaaatgatagtaacaacaatgatggagagtttgacgagtttacttcaagtacctgtgaggcaagatcatctaaataaggaacacaaggtttatgaactgaggtatttcagtattgtcaagatattatttcgacaaacattcaacaagatgcaacaaagattttgcacttactcataatacaaagatcttgcacctagtcgtaatacaagaatcttatagttgttcataatacagggatcttctagctaattatacaggatcttgtacctagtcataatacaagaatcttgtagttggttgtaatataagaattttgtattcggtcgtaatacaagaattttgtagctagtcgtaatataaaaattttgcaactagtcgaaatacaaattttttgtatctgctcgtattacactcttcggtatgcatatgctcgtagtacacattatgctatgtatctgctcgtagtatacactcatcgatgcatctgctcgtagtacactctgttatgtatttgctcgtattacacacttcgttatacatttggtcgtattacacattccgctatgcatctactcgtaatacacattttgctatacattttctcatagtatacacttcgctatgcatatgcttgtattacattctttactatgcatatgcttgtattacacactactctgcaaacaacatggtttgaccaagtcaaaagctacttcttgtaacttcccaatactcaattctaatgttaggctatttttagcctatgttttggatccaatttatgtgcattctcagctgtgttgggacgaaattacgcttgttttctatgttttca

SEQ ID NO: 379655 - DNA, 9913 bp, Cannabis indica
agcttactttaagcatataatctggacaagaatcttctaagatccaatttgaagcttttcgagaataatatgctgcagtgtccttaagcatggctgcttcaaagtcattctcatagtgatccatttgccccatcccaatctcaacaaatatatccaagacattctttagcaaagctcggtcaatttgctctccttcacgttcttgatcaatctgatttttttaaaaacataaaataaaatatcacccctcacttcaaagtttattaaaaaaaaaaaaaaaacctaactaactaaatagtttaagaaaaattaattacacaccagagaaatcacagcatccctaacttttgaatttaactcctggtagacctgaaaaccataatagatgtccacatgatattaggtatctctaccaaaaaagtgaataacacaatgaaatcaggtgttatttaatattcactagtcaaaatgaaataaaagtaacaaacagaattcttctatttagaattcaaaagtccaaaatttatatatatataaattaaataaataataattataaaaatcttgtcttgtatcaaatatgtacacagtgatcaatttaaaaataagtaattgtaacaatctacaaaaataataagaaagttgtgtcatgaattaccagatcacggaaacaagtgagaccaacttcattaagtggtgggagtgacctccgagcaataaagtatcggtcaagatagtgaaagaaacgagagagccaccgaaccataattttatggtttgcccatcttttcacaagttctctcaacataaactcatcatgcttctctcttaatgaaggcaaaacctgagttaaaaagaacaaaaaaggttgacatggtaggaatagtatgttagtgagtattttagtggtcataatgagcgtcttctccaactttttatataaggtgagtgctatcacatatttgtttatgtgcattttataagcatttcaaattatgttttgacataaagttaactacagaaattgatattagaaacttctaaagattctgaacaaataattccagacgattaatcaaagtttattgaaataaagtgtccaaacaaaattaaagaaagcaaaggtatcaaaattttctcactgttgatgtaatgtactcctcaaatgattcacggtatttgtcgtacagctgctgggagtaatcatgtggaggcttttgagtgcacatgttatagatcgttctatagagaatgttaagaacaacaaaagtgcaattacccccataaaataaaattaaaaaattgtactttggaacaaacaaagtacgatcttatatcaaactacaaatacaatacaaacatcatagaaaaggatacgtataaagcatcatgtaatcctcagagctgaactgtggttctggtaacccttcgagaatgttcttcagcttggtgattcccttctgcataaactcccatccctgttctaaatcaatggtcttccgctcattcatcgtcatcttgtcacactccaatcaacaattactaattcccggaaaccaaccctacatctgaagaagatgatgacataaaatcatttttaatcaaccaaaaccgaaaacacaaagttcaaataatgcgacgcaactcgggtaatcaatagaataaacacttgcgaaaatttcccccaaccgtataaccagagaaccctaaaccctttagaaaacgaggtcgaaattttcaaaaagcgcttcactaataatcactgtaacaaaacccaagatcccgaagcaaactaaatttctgtcgaaggacgatgctaatcaaaactcacataaattcaagctcaaacacaaaaagatcaagagaaacgcgaaaatcagatggacgatcaggttttactgcagaaaaatacatataccaaataaataaaaagtcggagaataaaaatattaaaaataagcagatacctaatgtgaaagacgaaggagagtctccagaaaccctagcaagtgaagacgatgaggaggaggtggaagatgaggtcgagcagagggttgttaatggtgaatttgggaaatttagggatgaaaatagagagtcttagggtgagatcagatgtggactccttcggaattcgggtcctattattattttcccttttattatttatttatttttatgtaattttttttttctttttttttcttataaagatttttatgagtcaattgtgtatctctttttccatttttcatgcaaagtaatacctttttcacttctttgtttgattttcttagatatgtgtactcacgttatttctcggtgtgttaagcattttaactttaaaaactcatggttacgggagcctatgtgtgagcagttcgtgaggggtgtttagaagggtaggttggaaccgaaactctttgagaaaatctctagttgtgaggcgattttaggagattagggtaagagtgtcaccgggtgttttaaggagaggctgatgcagtgtaagagacagttaaggcagcttcatcaaaaaagctaatgttgattcacaaaagttgtatgaggaagagcagtataagttttatgagattctaactcaaaaagaaattttttggaagcaaagggcgaagcatttctagttgaaagagggtgataataatagttattttcatgtggtggcgagtgctcgtaaaaggacaaattatatttctaaattacaagatgacatgggtgattggtttacttgggatgatgggcttcctcagttagtaaaagactatttctaaggtctttttactgcctctgatgccgagtggggtaaactgcttaatgatattcaagtttcggttcaacttctcaagtttcggaagaggaagttcgtagggctttgtttcaaatgcattaggagaaggctccaggtcctgatgggatgagttcgaggttttatcagaaatattgatatattatggagcggatgtggtaaggttagttcaacaagttttctcttcgagtgagcttccagttggcattaacgataccaatattgttcttattccaaaaaaaaataagaaccctatgaagatgggggacttaaggccaatctctttgtgtaatgtggtctacaagattgaatctaaggtgatggccaatccttacatgtaagagttaccttcaaagctataagaactacatccaacaacattaaacaatctataagtatcaaaaaccacgaaagtaacaaaattcttcaaatatatagtagaagaaaaaaagttcattgaccctaatttgattactaaaacattagagaggaaagaattaaaccgaatatagaattgggtacgtgcagtagctactgcagtgatccattgaaattacactcatggaaaaaaagcatttttactaatggacccaaaacgagcaataaagtcaaatttttagaacagaaaaaacaaattaccaaataacaaagtgaaagttgaggctagactatcttatattgattatatttctcatttttttttattgaaactgggaataagtccctattttatacattggtctgaactgtcttttatgcgaataacgattatgtttgaccctaaaaaatctcataatgccaagaatgtagaaactattattttggcatagcttggtagaccaaaaggaggttactttactaaactcatcggcatatgtgatgggtgtgaatagggctatcattacgatgaaaaaccctgaggacgaccttagcacattctgaattggaaacaaaaaacttctttaaataaacctttaatatcaaatgcatcatacccatgtaatgggtcaagactcaagaccaaccttcttcctcagctcctatccactatgtcttaacctttcttaaattgattgagtgattgttttattaaagcaagaatagatttccttcaaaccctacaatagcaaaaagttatatatttttttaaattctacaaaatggaggaaaattgaaattgaagaattactcaaagtatgaaaaactaaatactatataaaagctagttagtaaggaatatagaaaaacccatttttgagtccaatactggactcttcgtgttgatattgtaaggaatgccttcatatttgatctcacttttggaagtcaaactttttaagctccttatatatgaatcaattgtttctcgatcgagaagcaatctcggtacccataccttgcgagctaagaactcagagcatggatatacaaaataatagagagaggagaaggggaagattataaaaataaaattttgattcccttttacactattcacccaatgggagtgttagggaacctagtctagaaagtctaactatcatctaagcttactttaagtttgttatgtgttggatagttagttacgatcctaactaactttctgttataaggctttatgtctctttgtctatatatatatatatatatacatatgtagttggctttagtttgttaatttctcaacaaaaaatcaataatacaaactctttctctctctctaaagtttctacatggtatcagagttgatttcatttagcaatgacgttcgctcatgaccttagaggttcgtctcaagctgttaaaaacacaaatcctctcttccaaaaaacctctcctactatcttctcatattctctctcagttagattatatgaacacagtcaccttccatggaaacatcgtctttgcaacgatcaaaggagcatagttgcaacaatttcttgattcaacacaactcctgtgaaattcaatacaaaagcagatcgtcttgccaatcgattgagtcatgaatacgaagattgagatcaacaagacagtgttcttgtctcctggctcctctcatcaatgtaagagaaaatcttaacttgaatggttggttgcaacaatacagctcagatttggaatacattgcatgagtactactctgctcttaattgtgaaaacatcagccaatatagaactttgcttcgaaatgccaagatagagggatcactaagtgactatctcctcaagttcaagagattagttgatcttcttgctttgattggttaccaaatcacacctgcagagcatatagaagctattttcaacaacttgacaagtgattacaatgtctttatcacatctgctaacaccagaattgaagcctactctgttgctaaaatcaaagctctcttaatggctcaagaggtttgacttaagaaggctactcaagatttggacattgccaagccaaaagccaatcttgcacatacaaaaccttttactggtggacggggtactttctcctcaccgtactatccatcatctactcactccaatgtttcacctatgtccaaagggtctatcccaatcctggacaatattcggttccacatgctccaccaggttttagaccacctactcaaggtcgtggaactccctatgtgcgtgggaatccatcaaattctagaggtgtctactcccatggatggggacaatacactgtctggggtcaaaaggtgcaatgtcagttatgccacaagttgggacatacagtaaaacaatgattctacaggtttgataaaacttatcaagggcctgaattttctcaatcattttctggtagtgctagtcttgcagaagctcaacacacatatgcatatcctgaagttattagagacaattgttagtatcctgattctggagcaacacatcacctaacacctcatgctcggaatctcagccgttttactgatctcaatggtgatcagcaaattctcatgggagatgcttcaagtttgcccatcaaaaccattggtcacacttctttcctttctcccattcactcacagtccttaaccttaaataatcttctgtatgttccattaattaccaagaatctcatgagtgtttctcagtttgccactgataataatgtctcattttaatttttccttaactcttgttgtgtcgaggatttggctaccaagaagatcttgctggttgggaggcttgacaatggcctgtacaagtttgattctctatctttgcaatctctctgccaacagccagcctcaacacatcaaaacaacggttctagtgtttcctattgtattccagcatgtaatacacattctttacatgttcatagtgctcaattttcactttggctcaacaagttaggacatcctattgctagaatagttcaaagtgccttacaatattgtaatataaccataagcaataaaactcaatctggattttttgatctatgtgttgcatgttgtttgggaaaaacatcataagcttattttttcaaattcaactaccatttacattgaatctcttcaattattgcactctgatttatggggtcctacccctatcaactcatcaagtggttataaatattatataagttttgtagatgcttactctagacacacatggatttacatgctacgcactaagtgtgaggcactttcaacctttaacactttcaaaacacaaactgcaattgggactcaagattaaaattattcaaacagactgggggtgaatatcaagcttttactaatttgcttcaacaaagtggaattatccataaagtctcatgccttcatacacatgaacaaaatggagtggctgagcgtaagcacaaacacatagttgagatcatggtgccacattttagtttggtcaagatcatggtttgatgaaatagtgttgacacaaccagaaacagtttcaccaatcatgatatagagaccatttctaaatttccctttaataactattttagaattctttaagaccttaagaaacttgtcatcaatttcaactttacagcatatttcaatcaatacaccaatagataataagtttcttttgagctctggtacatacctaacattttgaatgttcctcttgaatccatcatgcattttgagcacaattcttcaagatctttgaacagttctttgattggacacatatgaaatgagcatcctaaatcaagaacacattcatgaccagaatctgcatttgaggccaccaacacatttgcagattcatagccatctgctacaacactagcttctcctttctccttgttcttcttactatccctcttaagtttggctttcaaagccaagcattcatctcgaaaatggccttcctttttacagtaaaaacacttcttgtctgtaatttcccttgagtcatcctttgacttggttttctggtttcccttgtagcctcctttctggttcttgaaatctttcttttgtgtctttcctctagcaaacaaaccttctccattgtcaccttgattgtcctctgttttcttctgaatttctttagaattcagagcagctttaacttcagacattgtaagagtttctttgccatagagcattgtatcaacaaagtgctcataggatcttggcaaagaactcaacagtataattgttagatcatcttcctctagtttcactccaatgttgctaagatcaagagtgattttgttgaactcatctaagtgattcctcaaatctttcccttcatccattatgagagtgtacattctcttcttcaaataaagcttattggtcgggacttttccatttatattgtactaagtttgttccataaacctaaagccttgtcttcactagacacctttcttaggacttaatcacctaaactgagaagaatggcactatgtgtcttagttttgatctccttcttcttcttctcatctttaatttcattgagactctcttcatcaattgcttctgaaatttcattgtggataagcaatgccttcatcttaatcctccataacccgacgtcattagttccattgaacttgtcaatttcaaatcttgctgcatccatcttcttgatgattcttggagccttcgaatttaaattttgattgagctaaaaccttgctctgataccacttgttaagatcgatcgtcacccttttacaatcaagaatgatgctcaaagagcaaaacacaagaacaacagcagcaacaagaatgttgtagcaatggtccagcaaactagtaacaaaccagtaataaaccagcaagaaaaagacttagaaaccagcaagatcaaactgaattaattgtgttgttttatttatgagtggagtaattacattgagagagagataagaaactgtacaaggctatgctacgaagaattaaactctaactatttatacaattatgattagagacaaaaacagaaaaaaaaaaaacaaaactaacttgtaactacctaggacagttaacatgaataactatcaactaatcctaacaacttgaaaccgactttggcatgagatggatcattatacaataatgttgctattttttctaatatatagaatgcctacttcaaacttgcatacaaatctcctcttgaaattttatttcacaataaacctgatcacacctcacttagagtttttggatgcttgtgctatccaaattttagaccatacaatcggtttaaacttcattatagatcacttcatcacgtttcctttgagcaacaacttgctgatggcttcactaagccaatctttagcaataggtctcatttattcgagacaaactcagtgtttcgtatctctccacactgagtttgaagggggctgttagggaacctagtctagaaggtccaactgtcacttaagcttactctaagtttgttcagtgttggctagttagttacgatcttagctaactttctatttttaggctttatgcctctttggctagtttgttcagtgttggctagttagttacgatcttagctaactttctatttttaggctttagtttgtaatttctcaatagaaaatcaataatgcaaactatttctctctctaaagtttctacaggaaggccaccacattgacctaatcttggacttattggtcttttcagtaaggaacggtaacctctgtccatcttccccttctctgtctatcgtatctcaacattccaatatagtttgttgatctcttcatcaacgaatcatagagaagaacgaagaattacattaaatggggatcaaaaatcataaagaatgatctttgatttcatgcatgcagggattgaaaatcacaatataagtttaagagaaaagaaaaaggaatcttttccttttgggtttcagtagcaatattgggttttgaatcacaatatattatttttagatttggaaaaagagaagaacaagtcaatcacaatttagtttttaatgataataataataagttaatgacgttaatgataatgttaaaaaaatcgttaaaccaaagattgttgttacatagtcacttttattatatctgtagttaaagatatatatatataaatatgtatatggaacaattacccaattatagttactaaaaatttaactataaatattaattttaaaactattaaattattagattttaattcaatgacaaatactaaaagaaaattttaaatttctatacttaatctagttatttatttcaaaaatatataaaataatatatctttttacattatttctatttatataaaaaaaatatataaatatataactcaaattctctcttttttttttttattgaataactgtttttttattaattcttctagtccaatagaataatacaagaaatttttacacctataaatacaaaatgcattctttattactgaaataccctcacacggttattgttacttttttactcatcaagtttattttattacaattttaccactttgcacacacattttcatgcatcacacttgttgcttacacgtcaggggtctaggattgacttctatcaatcaa

SEQ ID NO: 379656 - DNA, 997 bp, Cannabis indica
tctctctctctctctcgtctctttgtggtggacctcgccgcctaggatctcgctagagccgaacccaggcaatcgccaaagctccctctttctcttgagccattgccctctttctctctcaatattctcttctcttcctctctgaagctctctctttctctcactctcgatcttgagccatctgcccttgctgaagctccacgtctcttctcactttctctctcgatcttccctctctttctctctctcgatttgtcctctctttctctctctcgatcctctccctcccagaccctctctttttctctctcatctcttctctctctttgtggtggacttcatcggagtcaaagtaccacagctccaattgagccatctctagaacccattgagccaatcaaagctcggttttgtttccctctagttgaaaattttcaaattctaatctcatttaggaaaagagagactaggtaggcagaatgaaagagaagcaattagggtttcaacaccctttttacattatttttttaaaaaaaattaaaaattataaaaaatgagtatattaaatatctcattttgttatgttttctaggtgttaattagatccttcgataaatataatatatatttgttaaatttttatttcttacgtccattatggttttttattttttattttttatttttatggaagtatataattaggtttattctaaaagattacaagaaacaattttactttaaaaaaaatacaaaaatatattaatggatatatatatagcagtgattatctatagactatatagagattataataaatactacttacaatcataaaatcttcttgatgaatatatgtttttcaatttgcaacttatacgtaactaggaaacttcaccgcgcgttgcgcggttgtttttagaaattttgatttttttacattttttatttagagatttataaaaatataattaattatgatattatattttaatat

SEQ ID NO: 379657 - DNA, 3319 bp, Cannabis indica
tagtaataatatatatatatatatatattattaattaatttatttttttaattttttttaattttttttaaaaaaatttaaattaattgcataagtcatacaaaagtatttaatttaatattaattttctaatcttaagaaaataacgtaaaaagtacttaaactcttaaattttatacttccattaatcttcaattcaactgatccattaattcatcctaataataccacatattgatatcttattggttcaattactaaaattttaaatttaaaaagtaaaattaaaataaaaaaaactaaacaaattatcttaaaaatcaattaatattttttatcttctttttttgcttttttttattaccttttttccttctttattttttttctccataccagattcatttactgatttttctctttaaatttttcttcattattcctcatctcatctgtgagatattctttcatctaattacactactaccacgactaccgcaaccactacgataaacaaagcctcaaatctgagatcaaactcttcttttccatcccagatctaagttttaagctctaaattccaaactccatttaagaggcacccaaatccaacacttaaacaactaatagcccctgtttttcagttccaaaatacaataaaaatcaataatcactgaaatatttagtcaagaatcaattgtccaatcaaaaaactccataatttatcaagaaatctgtgaagaacttagatctgtagcaaaagaagagtgcaatctccacgcccaaagtcctccttcatcgtcgtccatctcgaccctctttgtcatccaaacttgtagcagatgaagtttttttccctagtttggtgctggtttcaagtatgcggtggagagaaagaaaaagatagatgtggatatggtggtttcggagtggagggatttttttagaaacgaggactaacagaattacaaaaattaggagcttgagtatttttaccgctattgtttaaggttaatgatttatttgtatcaaaatgaactttttgaggacttatgtcgcaatcattccttttttaaattagaaaagtgatttttttctttaaaatcatgttttataaaaatatttttattttcaattttttaattgaaaattaaaaaaaaatcactttcaatttaaatttttttccctaatttataatttggactctcacctcaacctagaccttggaacccgaaccccgaccccgtacccaaacttcgacccgaacccaaacctagatcacgacttggaccccggacccagacccgaagcctgacccagacctcagacccaaaccccgacccggacttgaatcacgacccaaactccaaacctagacctgaagcccgacccggactcgaattccaacccaacctagacttcagaacccagacaccgaccttgaccctgacccagacctaaacctaggaacccgaaccccggccctaacccaatcctaaactgcaacccaaactcaaaccctaaacccgcatcccgacccggcccccaaactcaaaccctggacccagacccgaaccctgactccgtagccaaaccccagccccaaactcggacctcggaccccgaacccaagcctgacctcaaacctagacctcgacccgaaccccaaaccctggacctccagccgaaccctagatccgaccccaaacctcgacccgaaccccggacgttggaccctgaaccggtacgcagactcggacccaagccctggacccaagaccccgacccaaccccaatctagaccttggaactcggactccgaccttgacccaacctagaccttagaacccaaaccccgactccgacccatacctaaaccgtgacccggactcaaaaccccaaactcagatctcgacccaaacttgaacctcagacccagacccgaaccctgacttggatcccggcccgaccccgaccccaaactcagacctcgagccctgaacccaactctaccctcagacctagacctcgacccaaaccccaaaccttgaacctttagtcggaccctggatccgaccagaacctcgacccgaagctcgaacctcgaacccgaacgcaaactcagacccccgaactccagacttaagacctggaccctaacatggacctcgaaaacggacccaaacttggactcgaactcggaccctggccctagacccagacttggacccggacacagccacagtcccgaccttagaccctggccacagtcttggacccatactcagacccaaactcggaccccaaccctaaacgtggacctagatcaggacccaaccacgatcctgaactggaccacggtcccaccccaaaccctggccatggtcccgacctcgaaccctggccacagtcccgacctcgaaccccaaccatggtcctaaccgcagaccccagccacgatcccacccaaaacctcggccatggtcccaacctcgaacactgaccacggtctcgatccctgattggcctcagccttggacccaatgtggttgtaaaatacatttttatttttcataaacaaatttttagaaataaaaacttttattttggtgattaaaaaattcaaaaataaaaatgttaccaaacgccacatttttaattattttttggtttttaaaattagaaaagtgaaaatattttccaaaatcacattctataaaactgtttttcaatatagtataattttcaaattgagagtcaaaatttagaaacaaaaaaaaatcactttcgaaatttttttaaacaattttttttcttagttaatattttggactccgaccccaaccttgaccttggaacccagacccaaccctggacccaaacccatcccaaaatcgaaccagcatcccaaaccctaaccctaaccccgactcggaccccggaccctgactcggaccttgaccccggcctcgatccgaaccccaaacttggccgtggacccgtaccccagcgctgaacctgcacttggactccggacctagcccttgaccctggactcgtacctaaccccaaaacttggacccgaatccaaatcccgacccaaatcctggactctagacctagacttcaaactcgaatcctggacccgaaccctagacctgggcccgaacgcaaccctgacccaagacccaaacctgacctcgaaccctgccccggtcccaaccttagactcgaacctgactaaaataaaatcaatagataaaaataaaaataaaatttacagaacacacttttgcctatttttgttttttaaaaataa

SEQ ID NO: 379658 - DNA, 1174 bp, Cannabis indica
gacataatggtaagtttatgataaattttccaatgttaatattggtccagtctgatgtatgcccaatacatctgatactagtatactttactaatgccctagaaaagacattccacataacactgtccaagtaaactttatcggtgaatatcatgtcagtataaatctagtgtattgataaatcatgtgactaagtactttgaaatatataaacacaattactttccactgtgatgacatcactataattgtgaacaactatatgttttgaatttaatagaatttatatattaaaaatataatcatgaaagtaatcatgtgaaccatgcaacataaaatgatatctaatcttttattaattagtaaatatgattatattaaaattgattttatttagggcataaaatcccaataattttctcactagtggtcaagtaaacatcaattagagttatttcttccttatttgcagaatttgatcttgaggtggatcaaatggatgtaagaactacattcttacatggaaatttagaagaaatgatctacatggagattctagaaggctatgagaatgataatccagacaaggttttccttttaaccaaatctctatatggaacctaaagtttgatgaattcatgatgaaattcggctatacctgaagcaacaatgacacttatgtgtattttaacaattatatttacctcttattgtatgtagatgacatactcattattggtgaatataggaccagcattgataagcttaagtctcaactcaagagtgagttaagatgaaggatctaggtgaggccaagaagattttggggattgaaataaagaggaacagaccccatacaatcatgttaagtcaaggcagctacctcaagaaagtaaatgagaaatttatgatgactgatgctaaaccaactgcaactcctctagcttaacactttaaattgttcgaagtgcaatctcctaagattgagacaaaagaagaaagatggatgatgtgccttatttaagtcgagtaggcagtctctgttggaaattatttctctatcactaagagggttcgaaatattcaatgaagaagaagaaaggagagtggcagctaggttagagtgaagcctcaggtttttctctaaaggaatcaacatgcaaaagtcactttt

SEQ ID NO: 379659 - DNA, 4788 bp, Cannabis indica
atcaaaaaaaaaaatattgaaattatcaagtgcgtaattagatatccaattgaaagaccgatccaatccaattagtaattgaattggatcggatcagattaaacatacgacaaaaggaacaaccaaaattatctaggatcacccgggaaaaattgagattgtattacttacattcctttaattttgtactctgtaacacagaaaaaacccagaaaataataatgactccaaaactatatagatttaactacaaaactacataaatatcttgtgccactctacttattattatctattaacacttagtagtaattactgaagtttttcttttaagttacaaaaatgcctcatttattgataacgaaattctaagttaataatttggtgaaaaaaatctagaaaaagagcatctcctaagaaaaacaaaagctttttcctaatggaaaacacccagcaagataagaatatcaagcaagaagacatggctcatcgcctagggaaggaacctaaggagctcaaacccatgacagaccaaattaaagaagggaccctactgaagaggattccaaaagggatgttaatgaggaagagattctacacagaaggagttcagatgcatatgaccccacaagatatgtcacaattgtggagttagaaaattaccagctttggcgaagggtcgcatagccaaacaaaagaaatgaggaattacaatgagtagttgctaaccattccaaatgaggcaccgtctatttaggagaaacatcctattagacgactgcgaggaagaccatgtgggtcgcaaacaaaaaggggacaaggaggaatggaagatataatatgtatacatatctaagcaaggatcaagtttccaatgtatttgaaagacaaagaacaactcgagatgaacctcgtgagtctcaatcaaacaaggacaaaagtgggtcaaggaggagccaagggcaaagtcaatcctccaaattactcacatggaaaatccaccgccaggagaaagaactccttgtcttgaatatcgcgataaataataaagcgtcagcaactttcaaagttatcaataagaaaatatttcactaagtcggtcagtgagtaattataattaaaaaagggcaagagaaaccccacagtgcgtgcgatagacttggcctttgaaggaaattgaatcgaagacaccttaaattgtgcgaacaattaaacaggaatgctctagatctctaagaaagactaaactaaaatgctccacgagcgtgtgaacaagtcaatcaaatagatgctgatttaatacatcaaagggtcattcaattagaagatgagttcagaaggtactaggacagggaacatggaaattttcctggatatgactctaacgaggaactcgaactttttcatccagacatattaaattcccatttctctaagagatttatgaatcctcatgtcctgccgtatgatgggactactgatctagtggcacacttcaacaattttaatactataatgcaagccagcaatgtagggaataatttacggtgcattttgttcccaacccctttaaggaggcggagagcagttggttcgatagattctcccaaaactcctttacttcttgggaatgattattgcagaactttaaaaaaaattctcattcgcaagagataggaggcccgaagcttcttccgtgacaaacatcaagcaacaacataatgaattactaaagacatttctaagtcgttttaacacggttgtagccaaagttcggaatttgaacgatatcatccagctaactgcaatgcaagccaggattgtggtaggggagagctatgggatgacatacaagggtttcctgtgagaataataaatgagttcaacaatagatcattgatatatgtccaaaaaagaggaggctcagtcagaacttaggttgttaaaagacggcaaagaaaattcaccaagcttgagcaacgcaggagtcagtatcgcaacaacaaaaacaaacttgagcaaagaaagtgagtccaatgaaaagagaaaagatgaatccaaagatttagctaaagaaaagaagaagcaaaagaaaaaggaaaaatatgtacaagtatacttcgtttatatagagttgaatgaaactcatgaaaatatatttctcacaaacaaaaagagggtcgctttttgaagaccaaaacccatgagaaacgtgaggagcaaacattattaaaataaatattactgattctataaagacatcagtcatactactgaagagttttgacaactcaaggatgagattgaaagcctcatttcttgaggttacttctgacaatatgtgggaaatagggaaaattaacaaaatcaacccaataacttaaaccaaaacaagaacatccaacaaccaccagttgatggcaaggatattctagtaatttctagaggttctcatctttcaagaaccagtaataatacccaaaagaggtacattcaccacataaagaattagagctcgatatttactactgaactgcttaaacgtgcaaaacctaaagaacctactattattttcactaagaaagatgcatcagatgtccaattctcacatacgaatccacttgtaataatagtatacctcacaaaaaaaaaagaataaaacaagttttgttgataatagaagctcaatcaatatcatgtataaagaaatattgagaaaaatgggatagagagtgttaagttaaagccgtgcatagaaagtttgtgtgaattcacaggaaatagtgtcgcgagcttgggaataatagaatttccattaacaatgggagagccacctttcttaataacagaaatgcaatagtttttagtgatctaccttcattatgtaacatgacaatgggatcatctactttgactgggatgggggaaataagctctataaaacatttatctttgaaattcccaaatcggtctggaataggcgctgtcaaaggggatcagttaacagtgagacaatgctacattgtagagttgaaggaaagagcaatgactcatcaagaaatagtggttataactgaggagattgataacaagaaagttgaagatttagattcaaggattatttattaagaatctcaacttgggcctgtggaagaattggaagaggtgatgttagatctcagtgactctacgaagattattaaggacgaaccaagatcaattttcttggagccacttagacatggtcgggattgactcgaatgtcatatgtcatcacctcaatattgatccattttatcctccaatgcagcagaagagacacctcctcgactcaaaaatacaaaattccttaaaggaagagattaatgaacttttaaccaaaaacttcataagacaggcattttaccctctatgggtttccaatctagtgttggtcccaaagccaaacagcacatgaagagcttgtatagacttctctcacttgaataaagtatgcccaaaatattatttctacttgcccatgattgatcagcttgtcgatgccacagccgggcacgaactcatgttttttattgatgcatattctggaaatagccagattagaatgcatgttgctgattaggagcatacaagctttattattaacatggagctctattgttataaagtcatgccatttggattaaaaaatgcaggagctacttagcagcgtcctataaaatgggatgttcgaacatcaaattggtcaaatatgaaagtttatgtggatgatatgttggtaaaatctataaaaagcaaagaccatgttatcgatctcatcgagtgtttctcaattctaagaaaatataatatgaagttgaatccaaaaaagtatttgtttggggtatcttttagaaaattcttaggttttatagtgaatacaagaggaattgaagcaaatcccgaaaagataaaagcttcgctcgatatgcctttcccaaagaaacttaaaaaagtttaatcattaaatggaaaaatggttgcactaaacaaattcatcttgaagttgatagataagtgattacaatttttcaacgtgttgtgaggcatcaaaaaatttgaatagacgaaagagtgcaaagaggcatttcagaacattaagagacacttatatacccaacatgtacaatcaaaaccagtagctagcgagatcttatcagtatcagaaaatgcaattagcacagtatagtgcgagaatagggaaaagcccagttaccagtatattacctgaacaagtatttactggaggtagaatctagattttcacccttaaaaatctcgcactaagttttgagtcatgcctcgaagaaactgagattatattttaaaccatacccaattcatgttttaacaaatcaaccattaagttgggtcctcacaaaacctgatgcctcagggagcttgataaaatggtcgattaaattgggacagtttgatatatcttatcatccgtgagcacccatcaaaggacatgccttgtcaaatttcttgattgtagggataaacattaagaaaatatagaagagattttaaatctataaatctgcaaataatttgtcgatggctcatctaatgacaatagcttgggggcaggcataatactaacatcacttgaaaactacatgttttattatgcactaaggtttcagcttcctgtttctagcaatgaggcagaatatgagtgttgggttttatgccctaaataaaactccatttcaatgtaatctattttattcaacatcaataaag

SEQ ID NO: 379660 - DNA, 2986 bp, Cannabis indica
ttggagggtaatgaaatagaatggaatagaaatgaattaattttcattttaatttttttgtttggttgtatttttaaagaattagattgtcattccaataatttgattctaccattttggtggaataactattctaatgcataatgagaaatatatatatacattttcttaaatgtatattaaattaataattttgtatgtaaattaaattttattttactttattcaattttctttatttcatatggccgggtttgggctaaagcaaactaggcccatacctagagccacccaatccaaggatctaaaaaatattttttcctttaaaaatatacatattttttagtaactttcaaaaatactaaaatttttttaataaaaagcccaataattttatttttttaaagccgacttaatctcagagtcggcctctcattccttccaaccaaaagtagcctaagttcatgagtaagctcaaaactcataaatggcataatacaaataacaaagaaatcaatcatcaaatccaaactaactcaatctccttctttcaatatcctacttgtcattttctaaccaaaaaccaagttaatcaaacatcaaagacacaaataaagaaagaacaaagaaatcaatcaataaatccaaaccaactcaatctccttccttcaatgtttccactaattcattttcacactaaccaaacaatcaaaaagattcaaaaacacaaacaatcaaggaaaagaaaaaacaaacctgtcacttcttgctctaagtctcttcaagaacttttcattatcctcttcaacaactctcaatatactctccatcaacaacttcttatcttgactaccaagcttagtaacatcaacctcttcactcctcatcttaccattactcatcacttgactcaacatccctcttctcatcctatcataagtaggcaaccgctctatcgcggcccaccgcagctcctcctcgtcttcctcaaccgtcatttgtctcgcgctcctctgaaagacatccggggcattccacatttctctcacactaccggacctccaacttctccggctacttgtttgccgggataagtcatctccggccaaagaagctgccatgtttaacaaaaccccacctttcaaaatcaactcaaactctataaaaactaaaactttagtccaaattggatcaaaaccaaactatcccacttcaaagtttggtgctttctttccttacagctaggaaaaactcatcatccccacttttactatttgtttttgtcctgttcttgaaaatgtgggatgagaacagagaacagagaagaaatgaaaaagctttaaatacttttgagtggggaagcttggaaaataaagtgactttgtctaaagtctgaacttaactgtttttcaaatattttagttactttttttttctttttgtaaatttataattaaataataaaatatattttattttgaagtctttggtcaaaatcagactacatagaccttcctccactgcggcctaatttttttggtttcaccttcacgtttcaaaatgagttataatcacctacttggaatcctttcccatctattgtacaagtggattttctaagccgttggatttggtgttagagtgattgtaattagatccaacggttggatttgaggattggtgaaaaatcactttttcttggagcaccagaaatgtcatttagcattgaagttttccttgaccaataaaagctctagaaggaataccaaaacctagtttacttgctaagtctctaatcatccatggttgaatggtaaaagtgcctagtcgggtaaattcgttgtgtatatataaattttttgtacaaagtacctaaaggctaaaataatattgtttttacattttaagaactatgatttattttggctatttagaatttttatctccaaattataatttatgtattatagcactatcaaatttttttagggcgttaaaaataatcctcaaactatttataatattataaaatgtttttattatattttgttataggtggattggtggctaatcgaatgctaacatgactgtttagtttattgtcgcgtgcccaattaggctagtgtccaataaggcatgaaatatgttcatctcccctcgttgttgtatctaaggtgcatgcgagttggagagtctatttctcattgtcttgtgaggtgtttgtttgtttttgcttgctagaggatggtgggtatttcggtaatagaaattggtgacaactatttggagggatgactttatgatagatttcaatgttgggattctgggatgaaacatagagatgttatgctttgatgggcattgtggtttgtgcacaataacaatgtgtggaatggtaagaataagactgttaaagaggtggtttcgttggctaagggtagttttgatcaatagagttgtgttcaagataacattttgattcctctttgttttctttacaagacggcgaagggcaagagcagtggattgcaccggttggtaatacaatcaaaatcaatgtcgatgcaactatctttagcaataagaatatgtatgggtatgatttggtggcgcaaaactcttctggtcagattattatcgctcaagcagtaagttgggggtggttgatgacattcttgttgaagctatcacggttaaagaggtattgagttggttgaaagaaacaaggcaacatgacatggtagtagagtcggacaatttggtcacgatccaaattatctaaaattcgttaaatatgacttttgttaaaatagtctattctaaaaaaaatctttatatataaaaagtgcatatctaacggcgattgttggtttaacgattttttttaacgattaacttaacagactgttaacgtttacgttaacaaataaataaacccaataagtaaaccaaaaaattaaacaatcttttaaaacccaataattaa

SEQ ID NO: 379661 - DNA, 3584 bp, Cannabis indica
acactattttccaagatcgtctgtacaacttcaatggcacaaaaaaagctggatccaactaataggactcactgttggtacaaatctttgaagtcaaagtgtcctcagaaaccaaaccccgccaactacggttttcttggaccaaactccggggagttccatggttgtggacaaggcattcttcaaccaacttgtgaagaagagaggagttctaaagattgaccaagatttggctattgataaacaaaccaaaaatgttgtaacacaattggctaatggcaatgcctatgactttgcccaaaaatttggacaagctatggttaagttgggaagagttgaggtcatcactgataaaactaagggtgaaattagaagatcatgcagagtaacaaattaattaagaaataattaagaaccctttcttaatttcaataattgatgatgataatgatgattgtgtttcaatgattgttttatttacttctcatttattatttgattttcttcttttttgaagattttgttgcttttttaatttcaaattgtaagttgagtgtaataatatactatccaacttaaactaaatactaaaatcatcttgtcatagtatattctgcatatttactattttttattatttttattctttaacaaaatagttatctagaggggaatgagctcaatttgctacatctaaacaactttgaaaatatagcacactactataatgtataatataaaatcaataactacaactttggaccaatatgctttaacactaatcacatgataaaaatatagctcaaaattttgaattttacaacggcttatgccaaaacaattttactttttttttttttgtaaagaaaaacaattttacttaactcacataactctttctatttttgttaagacatttcctgaatctattcatactaaaaattattttcaagttggttatattaaaaaagaaatgttaaaaattaagccaaagggtactattttgtaccattttgaaaaatacagagtctattttatcatttaacaaaacaaagaattcgatcgataatttttgcaaaatacagagtctaaaatagtattaaccctataatatacaacacattccaattaagatttggcaacttgaaaagatcttccaaacattcaacgtttagttttcctataaatcgataattggagtttctactgacttgttctcaagccattgttattaagaaacaacctctgcattaactggtgtagtttcctttcggttgctttgtttcttcttttcactctggtgcaacaccttatttaaagactaatcaaccttagagacgattttggacacattaaaacttgagacttcaaaatactttgatctttgaggaattaatgaattgcaaagaacaacatcaaaggtaccccctaaatttctggtgggatgcctttgtgtcagctgcatacactatcaccatatcaacaaatcaccatttgaagctctgttcaatcaacaaccaaactatcatttctttaaagtctttggttgctcttgcttttcactgttaaggagatgtaaacagcaaaaggtggctttcaagtcctctgaatgtctatagatgtcttcaccctagtggtagaatctatgttgctcgagttgtgaactttaataagactaatttctcatacaaacacttgtttatctcaacatagtcaaaccagcaaaatcatagaaaattcctcaatatcgttttcttgttccaactaattttaccaatatctctctaaacaatttagctccaacaccccaccctgccacaacaagctcatcaactccaaacaacagcaacccaacacctattacctctccaagaattaccacaaaccttagacattctcctcctttagaacaagttataccacccacactcaatacaacagtcccaaccataaccgttgaactagaaataatcattgccccataactcaacagatccctcacccacccagttatccaaacaacatcttaacaagtatctccaagtggatcccttagattctcaatgttctgtgagtcatcatcccatgatcacaagatcaaaggaaaacatacaaaaaccaaggactttccttgccacaacatcatttccagttcatatggaaccggttacaactgctgattctctaaaagaccccttatggaatcaagcaatgtcaactgaattctatgctctcatcaagaacaaaacatgggttctagttccttactcacctaatatggcagtggtgtctaacaagtggatctttcaaatcaaatataaggcagatggaagtatagaaaggcacaaggcgcgtttagttgccaaaagctttcaaaaaacttcaggcattgattactttgaaacctatagccatgttgtcaagacatcgacaattcgtataatattcactcttgcaacctctcaaaattggcaaattcaacaagttgatattaataatgtgtttctgaatggtgaactcaaagaaactgtcttcatagcacaaccagcagactttaaagatcctaagtaccctactcatgcttacaaacttcataaggccatctatggtttaaaacaagccccttgtgtctggtttactaatcttaagcattcattgctcgcttggggccttcagaactcagtcatagacctacatcatcaattttccttgaaaaacttggaccaatcaactatttttttgggttttaaggtatttcaagactcaacaggaatttaccttacataagtcaagtacatcaaagatctcttaaacaaaactaatgatggttgcttcttctactcccactccaatgtgccaaggtgtaaagctctcattagaaggtactcctttatcagatccctccatctatagaagtataattggagctctacaatatttgacaatgactaggctggacatctcttttgttgtgaacaagctatctcagtttctaaaagcccctacaattgactattgggcagcccacaagagagttctacattatctaactgatactcaatcctttggtcttgatttcaactccaactcctcattggacatagttgcctaatctaatgctgactggactcgtcgttccacatcaggatgttgtgttttcttagattaaatccatcttcaaagagattggcatacactcttactcacactcctgttttatggtgtgacaacatcaacacctcttctcttgcaatcaatccagtattccatgctcgcattaagcacattgaagtgaatttacacttcttacgagattagaatgctaaacaagaaattagcttgtttggaacgtcgtattaagtcgtattgtattgtattttattgtattatattaaattgtattttgtgcaatatttttatgtaaaactacatgtggtattaatttttatagacacctaaatatataatattttagtataaattaaaggttaacatagtattaatataaaaaatatgatatataatcaaattcaatataatacaatacaatacaatacgacctaatatgacgttccaaacgagct

SEQ ID NO: 379662 - DNA, 2305 bp, Cannabis indica
tttgttttaggcctctaaatttggtaaattacactgaggttctttttattcttttgcagccatgtcgctggtagtagttatcagtcttttaacgatcggtgttgtgctgatacgtgtcatttacgtgatatgccaaagtggtaagcctttgaaaggaaaacgcagtgaaccagtcagtaccctgattgtcttaggttcaggtgagctcaaaattaggtgatgtttttgaaatctggttctgacaatggtaactttctttcatggatgtggggtattcaatcaaagtttgggattttatttttcataggaggtcacactgctgagatgctgaaccttttagctgtgttgcaaaaggaaaggttctatccaagatactatattgcggctgctactgacaatatgagtctccaaaaagctcgctcatttgagtcctccttagttaacgaggttgattcctaaacactatattctttacaatttattttggtgtatgattgtttctttaccattcgtgtggttgtggaaagtttttatactaatgcttactattgctgtttgctgcacatatgtaaaggtgaccttaactttgcctaggtgggtaggaatccttgtggatgtctgtgctccttttctgcttctctgtcattgaaatgttttcttattaatagtgtgtcatatttacctgcaatattagcagtagatcagtactacactagtattatggtcaattgttaagttctgtgatgctatctaaaaaagaacttttccctattcgcttgaagcggaatcagttgtcaggagggattgaaatcgtatttgaggattctaccctttaatgtgtcaatgttaggtactaaatttcttttatgtgggtgataagtttttcgtttgttaatcattgtaatgattctttgtttaacaactggatcattcttgctcttaagagctgggaagttgggttttccttttcttcttctttattctttcggtctttttgtttgttatagagatgtgatttcttttcttttctttttttttatctgatagaggtttgcatattcttgtaaagtgcataaatatttgggcttcactttatttgtctggcattgagagttggagtggctgtgcttcttttatatctgttggtttattggtgtaagttttttctgagacttgtttatttattgcagactagacataaggtggcagaaacttctcagtttatgcaaatctatcgaagtagggaagtcggccaatcatatataacttctatttggacaactttactagcaatggttcatgcactctggctaatgattaagattagacctgaagtggtactacttctaatcactcttcgaaatttctcaacaattttcagtactgcaattctaacttaaaccaatcactaataacgttttggtaatcatagatcctctgcaatggtcccgggacttgcattcctctttgcgtaatcgcctacttattcaaggtctagagatactctttttcacctttttctttctttattatacacagtaaaccttgaaattcacctattgagttgatattaaagtttctttttatttaaaaactcttgtgtgcagattattgggattagatggtcatctattttttatgttgaaagtatagcaagagtgcaaaggctatctcttagtggcttgattctttacaagttaaacatttctgatcagttctttgtgcaatggccacagttgcaaataaaataccctcgagctcactatgttggatgtctaatgtagtgtgatcaaaattttgagtttgctaagctactcaaaggttttcaagttctttctctcacataagatttttggctcccattgagaagcatttatttctcgcatgaagtaaatacaaatagactatgacatgtatgtatgtacaacagaaattaacaaaagaattatctgtgttatgctaagatatgaaaaggaggaccattatgaaattgatgggtgaattagagaaaagggtcttaataactctagttcgttgatagaattaaagcattttttcttgggagagttggctgtctctcgaatacaagccattgtggagagtcggcgatctcttgaacaccagccattttcttactgtaatgttcttgtagtttcttcagtaaaacactttttcatcatcttctgtagtttgttcttatattttctgtacaagtctaatggatccaatcatttgtgtcattgaaaaaatgtaaaacagtattgttattgtaccgtctatttttttttaatttaattatatatat

SEQ ID NO: 379663 - DNA, 4316 bp, Cannabis indica
ttatatccacgtgtcattttcttgttggtaaatttgaactatttttttaaataataaaaatttaatgacttggaccaatcagggattgtcacgtgacacaatttatttaaccaggtaccaacaaaaaatttcaaaattataacttaagtattattactgccaaaaattaaactttaagtatttatttgcaacgggaagttaaacttagatatttatgccgcaaattactctaaaactaaaaataaaaatataagttattatataataataaaaaaagttttactttaatattcattaacattaaaaaagtgaaaggtatttaatttacatctatttatcaactatcatctatcacttgacttatttcacgataagattaaatataatatgacaacaaaactgtgttactgtaaaagttatatttcaaagtatatttttaacgaatcgtatactatgagacacaacttggtagtgtaagaaattcaaaaaacaaaaatgctaattattctatttattattattattattaaataggtaccggtggaaccggggaaaaagtgggacaggaacagagtcatccccgcgcctgtcccaatcccgccccacttacatctctgcctccttcttcctctgcattatcttgagtttcacaataaaacctgcaaacaacacaaagaaaaaggtagctttgttaggccctgtactctaactgtacttggaattcattcatgggcttattaaactctattgcccaaatgttcatgccatcaatacaatagactcaatggtccaacagttgccctttacaggtgaacattcacccatgtggccaaggcctacactggtccccattccttgaatagcttcacaccagcctttgggacattatgtttttcacatcagttataccaagtgaagtgaaaacaaagttaacaaagacaaagattgatgcaagaatttaagtttatcaaacaacaaactaattagattaactatgaacagtttaacataaataaattatgaaatgaacccttaacaaatgtatcaactatttgactacatgaagagcctaacaataagcaattttttttttcttttaccccaaagataatattaacaagccatcttaaataacacttggtttaggcccctcctatgtaccctgcttaccttaaaccttgaaaagaaaaagaaaaacaattctttcttttgtttgattttgtatgtacaaatagacatgaaatctaaacagcaaatgcagtggtgggttgatgatggtaaattagtagagacaaaagcattgtcattatgatcattatgatgatcatgattttgctttgcttagctaactgagatcaatgtcaacacgttctggattccctctttcagtttggttgccgacgagctctattcctagctgccctttgtccccagctccaaatgcatagagcttccctgattcagtgagtgcaaatgtgtgagcattccaatatatggagttggtgaggctgatctgcaccactcgttcattattctttcagtgatgttacaatttgtggggtcaagacatttgtgtgccttggtccctgcaaagatgaattcattcaaaacaatcagaagttaattcaagacttctaaagaggatgacacattattaggaatatgtaagtttaggccagacctctccttcggcggctccagcagcagcagcagcaacagcattgttgttattatgtccaagactagctgattctccacaaccgaaagagtacacatcaccatcttcagacaccacaaaggttgtgtaatctcctgtggcaacatgaactgcttttatcttgctcaatgactccacaatctttggagcttgtgcacaatcttcatccccatgacccaagcatccataacggccccaaccccaagtgcacacccgcccatctcgacccactactgcagcatgccaagcaccagctgcaactaccataggctgaagattcagaacctgaaattgttcgattagtcgcgggtacttttcatcactccttgaaccgtgtccgagttttccacccaagccacacccaacagagtatacagacctgtcaagtatgttccaagtatgagatcactaccaaattacagctacaaatcatagtagtcaatgcaaatacaacaacatataaaccttactataatgattatgtaaaggattgaaaacaatgtgacttacattccactaggctgacaagccagagcaagaaggtagcaatatccagcagcaatttgtacaacaggtatattttctaaggcccccaataaaggatgaggttccacatcagttggctcagtttggtgaccaagttttccatcactgccccaagaaaaagtatagaccctgccttctcttgacaatacagctgtgaagaaatttccaatggcagcttgcaccacaaatatgtttttcaaagactcaaccaactgtggagttttcacaactttaattccttgacccccgaattctgtttcaccgaatgagtccttgccaaaggcgtaaacacggcctgcatcactaatcagcattgtcctgccagagccagcagttgcttgaataattcgaatgccttgcaatgatctgcaacaaacaacagagttccattaattatccataatacataagtcactcaactaattccttttccatgtcaaagaagtgaaaagcaacctgattggccgaggccgccactcttcttcagtggaaccatgtccaagctggcctgagctgttagaaccaaaagagtaaacagctccttttgatgtcacagcaatgctgtggccaggccctgctattgcctgtgatttctccctcctggaacatgcttctccagctagcataaacctcagcaccagtttccatgaacccccacatctctgcttcaattcttgacgttcttcattgttcattggcttaaatatagctctcttttgacaaatatccaaggcagcaagctccggtaaggataattcgaaatcaggagcaaagtttgcaggctgcctaaaaaaggaacatgttgcctgcaatacaatacaatacaacacaaacaatgtcgattttcaaatgtttaaaactcgggtttttaccatcaaaaaagcagacaagtaagaggacttgcctctagttttgcaaggtcttgagggtccaaattacatgtggttagaacatgaagaacaatggaaggattggcagccaaggggaattctccaggggtggagtccccatagcaatggcgttgccgcctttcaaaggtttgtacaggagtggcaactatagtggtaattggctgatcagtaatgttatgatattgtatagttggggttccgctcgctgtggcatccatgggcactgctagctttggcagtgcccaaactttggcaaaaatagagaggtgttctaaatttctggaaattatgaagaaaaaaaaaacatggacaatgaaaattactattactaacttgttctttttcaatgtcccaatattattattagtttcaattcaaactctaaatccttaaacatatcttgcctaagatttatatggttaatactagaggataaggtacctttgaaactatgtaactgatcaacaaacttcaggtctcaaaacctacaaataaaccaatgcttataatatatcatggcaagtaaagaatgatattaacaaagaaagaaaaaaaaaatgcaaattatgtccagcttttgtgtcacaatgaactatgtcagatacaatctctgttgagctcctaggaattgggtcttttggaatatgttttatttaaacaaagattttaaaaaaaatgaaaaaacaaaagagtttatgagtttgatcagcgatcaatctaaggaataacggccaattgagaccacacaaatggagattggccaaataaggaaacccagaaccgaaaaatggtataaaatatggatcaaaagtaagaaactctgtataccaagacaaggaaactttgaagagaagaatactattcttccatggtggatattccacacccctcaaaagacaccaaaaaaggaaagaatttttgtatgtgaggaaacttcttttcaggtaaaatccatcacagcaatctagaataattagtttaactcgatcaaagttaaccaaacatgcaagaacaaactccatgattcaaaaaccaaacggtagtatccataaccaaattcacatagaattgaccacaaaactacaaagtttttgacatgcccagatggtataaacatcagaaaaaaatcaaaccatagttag

SEQ ID NO: 379664 - DNA, 1960 bp, Cannabis indica
ttttttctcttgaaaaatgtctgtgtacctatatcaaagtttcaatagaatttttgcttgcaaaaaaaaccaaaaaaagtttcaatagaatttttccttttaaaaataatagtttcaatagaattatctaaaaggaagcacataaagaattttaataataagtatgtttcttttttatcatcaataaataaagcactataagatcgttttttttaatataaaataataatatataccactccattacacagaagaaaaaaaattccaatcatatatatctttttgtatgttgtcataattatatgagacaaatcaccattggggttacacttaatgaacatgaaaatgaatatgtgcactaaaaaaaacaccaaacaattaatttgtagatgtatatttgcatatgtatggtacttctataaagttacaaggatgaaattaagggaataaatgtgtttggcaaagaataatgaattgtgagatatgtatttgttgaagaaaaagtagtacaaaaaatggaatagttctagaaaaaatgctaagaataccactagtaggtctgttatcatcaggaggtgttagtgtataattagctttaaataggtttttttttctttctaattttaatatgtatcaaatcatattttaaaattttttagaccattaaaaattcttcttaaattattaagaatgttggattaagttttttgtctaattttactaacgaatgcctgacatgaatgaaagtttagaagacacgatttagtacatattaaagtagtttaaggttgatacatatcaaagttcgaaaagcttaatttagtatatgaaaaattaatacattagtaaaattaaataaagtttggacaaatatctttgcatacaataatcttaatagttttaaggaaaaaattcttaattagtataacaattattagagtaattagtgacatacatacttagtttaactcctgataggcatatcaaaaagatccatttaattggatcgggtcggagctccgatccgacggatcacttctaatccgaaacattcggatacttattgggtctcgcatcagatctgttctgcccccattttttttggatcggatctgatccgatcgagtttcaatatattaaaaaaaagctcaattcaagacttggaccccagacccggacctggacctggaccagactcgaacctggacttagacttggaccaagacccgaactcagatccacacctaaacccaaacttggacccgaactcaaacctgggctagacctgagacccgagacacgaatacaaacccggaccaagatcaagactgggacccaaacccagacccggacttggaacaggactcgggatccagacccgaatccgggacccagacctagacccggacccgaggctcagactaggacccggactcggacttagacccgagactcagacccggacatggacccaaactcggtcccggatccgggccccgacctggacccggacccgagcccaaaaccaaacccggacccagactcaggacctggacatagacccgagacccgggaccaagacctacacacggacccgagactcgggacccagacccggactcgagacccgaccccgacctcgaactcggacccgaacccgagacttggacccgacctggacctgggacccaaacccggactcggggcctggacatgggacttgggaccgaggacccggatccagacacgggacccggacctcggatcgggacctgggacctgagacccaaattcggacttagacccagacttggacccagacccggactcagactcggaccccgaacccgggacccgaacccatagttggtgttgggtcaagtttgttgaaaatatattatctttacacaatctattaatacatatcaataccaaacatagtcttgtattaaataatact

SEQ ID NO: 379665 - DNA, 2242 bp, Cannabis indica
aaaaaagaaaaaaagaaaactatctaacaatttagtacttattttatcacttcaggcttgaggtagcttcagaaagaaatgaaatgttcaagttctgtttaccaaccttgtagatagtaaattttttctgttgtttctttctggtgaagcagtggctatgccatcacttttgtacagattcttgctcgacctcacttaaatgataaaagactgttgtccttgtctctctttctctctttttcgttatttttgattttctgtgtttctttcttctgtgtattgtttccacttaccaatggcgcgagggatgttttaagcatcgcatgttacaattttgtctctgcccatcattattgctaatgccgtctctccagggatgcaatcatggtgcgatactgtttccttatttcctgttttattgcaacaacggatgagttcagggctatttacatacacacacctgtttctttgctttgctttgcatgagttgtggatttttattatttgatcaagttgcttatacttcggtttgcctttgtcatttacaggttttgaaattgcaggagcaaacagtaatttagatcccaagtctgagtaaaaggagtgtattactaattgaacatgatgatactagtaaaaaggggttatactatcctggatttctgcatacatggactgcctaaaggtgaccccgaatttgaaactgatgtagtgcctgcttggtatttggtgccattgtgctatatttgagaaagtacagctgagccatttcactaaagattttcatgttttcctgttaggaattccttttttgtggtggctgatggcattgtgctatattattattgttattgttattgttattgttattgttattgttatgtttatctaaatgattgtcttgctatatgaatgaacagaacaattttaaaccagaaaccgtggatcctcctactgtgttagttaatagtttgtgctgtgttaacaaattcttaaattttcagctgatgatgcagcatcgccgtaaccataaaaggcagggggagccaagccgagccgtccatccccttaaatttaagtttgtgagaaggaaatctcaggggaggtttcaggctcaggaaagaaaaacaaatgagaatcgtgtacgtttctgagttacaatctggcggggcacttggctcattcatgcattgtgattggaggggtcggtgggactgactactcattcaaatcaaatgtttgattgttttatatttttaccttataaaagtgcaagtgtatgcaattctatattaaaacattttctacttgataatcaagcgaggaagagaagtataatttggctagaagcatagatgacgttccattttttaataatattaataaggttaattaggttttttatttctcgaattttaatacgtactaaatcatgtttcttgaacttttaaaattgttaaaatttccttgaattattaatattgttggatttaatgatttttgtttaattttatcaatgaaagtctaataaaagtttaagagatatgatttgacacatattaaagtttgagaggtataattatagttatcgaattactaaatttgaatgaaattggataaaaaaatttaagtctatcaattttaatagttcaaaaagaatttttaacgatcagggggacataatttggtaaatgttaaagtttgaagggtatgatttaatagatatcaaagtttgaggagtataatttagtacataaacaatatcaaattagtaaatgaaattgaacaaaaaaatttaaattaaatataaaattcacggaggataatttgttacatgtcaaaagtttagagagtaaaatttgtaattagtatagtaataataataatgagtgaataaaagataaaactagtaaaagaagagtgccattttatagaaagaaagatgaaagaaggtgaaagttagtgttggtgcatattcgtttgggatgagggtgatgccatgacattgatatgtgtggcagcagcatatgttgtgtgtctcattctagttatctaattcattttttctttgtgcacatgtggacttttagtaccacatttaaaatatattagtaggttgtgtgtgtagcggtgtgattctttacgcatctatctaattattatataaaaaaatcatgctttctttcaactaagtttttaccaaaaaaaatcctttataaataaaagataaaagataaaagat

SEQ ID NO: 379666 - DNA, 6619 bp, Cannabis indica
ttgtgtcttctaacacaagaaaatatgaaacaaaaaagtgttttttacaattgggtatggaccattttgtagtcttagaagcaaaacagcatatgttactttgattatcaataagtcatcagatagcaaataatacagaattatcttgcagaggggactaagtagccatttgataagtcaggaggctcaatttcaagaaagcttgtcagtaaagtttttcgtgaagattgcgctttggaaccactaggagatagttttgagtttccatcgacgcctttctcaatcttgatggcgtcttgtatggcgagaattatttcctgcattctcggtctgttaacaccatgttgttcaacacattggatggcaacttctgctattctccacattgattcaattttaacattctctgctagaaatggatccacaatgcttatcacatcgcctttgcgaactaaggatcttgcctgcaaagcaaaagagattaaagttcttaaaactctgaattattaactaaatcacatcagcagttgctagatatgagctaagaattatctagtttttatgtctttttatattaccttatcaatattccatcaaagctttacataacaagtcaaagaaaggatattctgatgattcaataattaaactactttgtgacaagttccaactaaaactcagcctttaatgctttgtccatggtttattgtattttatttttgttttaagaaagattctaattaaataaagaacaaagataacaaacaacaaacaagcttagacccacttacaactcagaaggagtgggatatggggccaaccctattagttagaaagatgggactttaggaggcagagccaaatgatctgttttctcttatttgtttggtgttatcttaaattttgaggtatatgaaaaacaataaaacccacttatcttatgcagtgttctggctctaattgctgtctagaatttattcatgtcttcttgtgggtgactttcatactagcactgcatttataggttctacaattcaaaggtatgcactcagaaaaactgataaagcaaagaacaacaggcttctaatactcatctcttcaacctgcttaggcttggactcagttactttctcaaccagtcaaacatcctatttctcattaagatgcctttatgttcaagttcacctagttttccactgaatttcttaaaacaaagttttagcattattttgcttagcttatgttgatataactaaagcaaatattggtaatatatgagagaaagctactactatccatacccagtgactactatccatacccagtgaacaatgttcagttcggctccatagtcttcttgtgagacaggtttttttcctgatatgagttcaagtagaacaacaccaaaactatacacatcactcttttctgtcaattgctgacaagcatagtacctggagaattgacataataagcttaagaaaatgcagaagagagatggtgtagcttaacactcgattaaataacttactcgggatctagatagcctacagttcctcttgccacacttgatatgtgagttaaatcttcctcagcttgccttgacaatccaaaatctgaaactttcgccctcatgttgatgtctaacagaatattgcttgttttcacatctcggtggatgatactggggttgcatccggtgtgtaaatactcaagacctacagatatctaaatttttctttaatagaatcacttggaaaaagatgcatgaaaaggttagtcagaaagttgtatgttaaacctttagctgcatcttctgctatccgaaggcgaagtagccagtctaagcgcttctggccagtagtacctgaaacaaaattattacacagaagttgattaaactgttttgttgctgttaaacaggaaaatgcaaagaaaatttatgaaataggaagatggagaatagaaccatgtatgtgatcccttaaggttccattgtgcatatactcatacaccagaatactttgatgctcttcttcacaatatccaattaaaggaaccaaattcctgtgatgaattcttgacaaaagggcaacctgcaagtgtgttttttatcattaatgctgagtttttatcttatccatagttgttatttcagatatcataagatattaagatcatttagttcatagccaataattacaatcacatgtcaatatgaactatgagacattacatggattgagtaatggtattacctcagttacaaattgctggtctccatggctagacggctcagacatgagcttcactgctatctcttttccatctttcattcttccataataaacagatccaaagcttcctttcccaattttctttgaaaagttatttgtggcttcttcaagatcagagagtgtaatgtagcaagctatgccttcatccatcagatgactacctcgggaaactgaaaagaatgtagaaggcttggtgcttgcacgtagagaataacctaacaagcacaaaagatattttagattgcagccagaaattaagaccatactgaattgagtcaacagaaacctggtttacagacctttttcatcactctttgactgagatgccttccaacggcgatttcgtataaacaataaacctcccaagaatagaattaatgcaagggcaaatgctccaactgaaattccaattatcaactttgagtggttcttctcctctgcctcttggtgtaatccaggattatcttggtatctacacaattcaacattgtaaaggctaaaagaaaatatttattgattttaaactattgaaagataagtcactctctttagagctaaattggtgtctgtaggaaatttctaaacttacttgaaatttatttttcgactaaatattccgggagggatgtccccagtgaaggtgttgttctgtatatacctgtcatgtacacatttgaagttcaaaagaatcactacacatttcttctaaccatgtaactaagtaaaaaggattattttgaatttgatctttcataaaagtatattgatacatacagttcctctaaacctggcaagctccccagataagaaggtaatggaccagtcaatcggttattctctagatgcctacacttcaccattaaaagtggataagagaaagaagtataattggagatatattctctctaaaaataaaattaaattcacaaaaatgaacaagaagtcttacagaatttttaaattgataagattactcatgtcagggaaatttcctgtgagagaattgtcactcaaccacctaagagagaaaaaagaaattacttgtggaaaaagatgtagatgaaagaaaacaaaactattgtttagttcaaaagaacactcacagctctgctagttcagtcaagtggtttagctcagttgggatttcccccttcacattctttcctgagaggttactgtaaaacaggttagagaattgaattctatgcatgttgcaaccgattaaagttgaaggctttagatttcctttataccacaacaaattaaaaacttcagaagttttatcaaaaatgcaatgcttgtgcagaagaacttattcttggtatgtaagtagtaaataatatgagcaacttacattgttgttattctcggcggtgcactagagctgcagttcacccattcccagtgtgttggagcacaaggatcaccttcattagtagatgcaacttcagaagacatcaagcgaagggtgttgataacattccctagaagttgcaagaaaaaacagcaaacagctgatcaatagtggcaaagtgcattacttatgcctcaaaatttaggcaaaaagacaatattgttaacacttaaaaatgatgctacagtggctaataatagttctaatcaaagaaggtgaggagtaaagattgtggacttacaatcttgcctatcagtctttgcagcaatttgaacatatttactgatctcaatagcatttagaagcggccctcgagtagaatccggggtcttaaggaatgaaaatgagaaaacaaagtctaggctcacattcatgtagctgggttcataaaggttgtagcttccattggcattctcagcaatatttaccactgcattgttatagtcaagtaatttaggttcatccaatttgaattttctagtctcatttggacccaagtcttcaatttcagcaaaataagcatatgctcgagcagttccagggaatccttctaaatttaatctgtaacttaaccttccttctgtgccaacaactgccgtttgcattactttagcaggtgggtactctcttgtccttgcatctatatcccttaatgtttgtattcttttagtaccagaagccaccccaactaaataattttgcctcttttccagatctgaatcccaaattctgtcataagggtcatctgggtacctgtaaaaagacaattcttttgcatttaacaccacccttttgccaataaaaacaaaagttcactccttttcaagttgctacaacttaccttaaggggtctttggtcaaggcaccaaagttcactctagttgagaccctcaagtagaaatcatcctcaaaatcagtggcatacatggaaagattcagaggcctcagttcaagggtggagatgaatggagaaccagtagtggcacaacaaatgcaaacatcaatagaatcagacggtgcccttataatcatttcattcacatagactcttgaagcatcaaaaatggtgacagtagaccactcagtagtatccaagtaaagcttaaacttggggtatgtatcttcatttttaatactgccataatgaaaagtagctcgtactaaataccttctcctctcttgggttctcaaagtgtagcagtattttctgttgtctatagggaactctcgtcgtgtttggagctgggttatgttcttttctgggttttctactactactgatgtgccaaggctcatcattccattgtctgaaatccatcctagtcctgtacttgggtcagtgtagtttttggtaccaccacagtctatgctgataaaatcttcaaattcaaaaaagaaaaaagaaaaaacacacttcaaaataagtttcatattctatgccatctataagtactcaacagaaagaaagaaagaacatacctttaacttggcacagaacagttgggacaagaaagataaaaataagcaagtagtgatgaatataaaaacccattgatgatggtgatgatggaagttcaagaaaacaaccctctgtctttgatgttttcaagatttagcattttagtgaactagtgtattacaaagactcatgctttttactaatggcttaagattgaacatttcagaaaaaataaaaaattgaactttttctctttgattggtgagtaataatgttcattcacgtttgtgtctttttgaggttttggaatataaaaagaaaaagttaaagaaatataataaaaagatctttacttcatttctggttggcatttcccttaatcagtgtgaccccccatataccttaatcttgaaataattaaattaagataaaaacaaaaccaaaaaaatacaagtaatgctagttatttaatacattattaaaattatattaattgttatgtttcatgggaatttagggaaagatctaaaggccatgcccatgcataaaaaaataaaataataaaaagcatctaaataataaagcaaaagctaaatctttagcagtatcagaattttataagactttttttaatggaatggaattttattctgcatttaaattataaatatccattctactttaattgcctttggcttatttttattgcacacaacaaaatctcttttggaccaacttgtttagtagctttacactttgaaaaagtatgcatatgatgctccctttttatcttggacaccatatattggtcccccatctatatcatctcatcaatccatggttattataatcaccacacttaatatctcaattggtgtgaacgacagtaaaatagtaaaatgattttttattttaaagaggagtgttaattataatctcttaattaatttttatactgaaaattaggagtgtttacggattagtttagtccgaatttttatagtttttgaactaaaccagtataacagtttttttgaatcttagaaaccaaaccagaccaataaatttcttaaaccaaactaaaccattaagaacggtttggtttggttcgaaaccacggtttaaatgaaatttataattatttatattttttaagtaattgtactatttttactaagtgtttaattttatttttcaaaatatatttttaaacatgataagtaataggattctcaactagggtttcacccctagggttataaaaatcgtaactgaccagtcggttataaatttgataagctccgagttactcgcaacgggtcccgccaggctctgaaaaatgattatcaccatcataggctaatttttaccgttggattatcatctacggtcaaaaatatctaattttcattttttttcctatttttgtgggtctccttcacctataaa

SEQ ID NO: 379667 - DNA, 3728 bp, Cannabis indica
ttccgttttatcaactatgctgggcatattgtgcgattagaccttgtttcggtcgcacattctcgcaagtttatatcatgcgaggttagctctactgaagctatttgtcgacaatcatccttttccatcaaggaatgagttcacgtgtcaactttccatgagattagactttaaacatttctaaggaaaaaattatcacacatacatccccccagtttcacgttggcatttgcatgtgtcacgcgatgaaactatctcgaaggacatgctagttaacttgtcatgttcctgtgacgtttgggtatcttatctaggcttttaaaatgacagttgtaattatagttttgccttcctaatatgtcatgtcattgaaccctacgaggtctgtgtaagctcaacttgtagtaactgttggattaagcatctcttgattttaactgccatgtgtaatgatctcaacaagtgactttaagaacttaaaaaccctcacagtacgaaaatgggatttttcattttctctctcattctcaaacgctcttaagttttctcatcaaaaaacctttggattctagaaaaattttgattcaaactttccctaaaccttcgaaatctgttcgaaaatttctactgctcaatcgtataggaccacgcctcaagttttgttgagaaatcacagtttttggataaaggtttgttttttccaaattcttcggttattttctatatgaacttttgcattatggagtacattctggatttcaaggatcgaaaatgtacagaaatgataagctactttttggacagtataaaaaatagactaaaaaggcacttttttctagaaattttacctattcttttgaataattgcatcttcttcataacatgaatactcccatatttctcgctagaacactttgaatgctcgcacatatatataggttttcacttaaagcgtgaagacttgtttgaatagtcgtggtgtttacccagaataccttagtatattttccttgatgaaatttacactagtgaggatactcctcttctttcgcatgcataacacgatgaaaagatcttctatctttcagatgagcgatctcttgaacaaccaggagtatcagtctcaaggtgaagccttcgcacatgaaacccagaaagatgatagttttatacttgcgtcaatgtccaatgacacaagtccagtacttccagtttgccaaacttcattctccatagaagaaatcttttacatggttagggaactagaagaagcagcgatactgatggaaatgcgaggaagtgaatatgttgtctctgctcgaggcagttgcgtaaatttggagggtttgtcagacagtgaagtggaggaagtcgatcaggattttgagctgccggcacatggagaagaggatgtgggcgaggaggaagaagaaggagtatctgatgaagacacacgtttggatgagcctttttcctgcgtggacctcatctcaaagataaggcagccagacttggtttcttttcagaaacttaatttaattctaactcgtcgcacaaagttagtgccaagacaacgaccacaccttcccttcattaatcctgacataaaaaatcgaggacgtggttgtcttgaatcctattctttgctgagaaatcgcggttcctttccaccacttcgtcaaatctattctgactcattatgagatcgcgccattttaaataactccagacaactatagaatcattatcggattctttgcgatgtataaggagtatgaccaaggaaagctcacaatcgaggactttagctatttctacaacattaagaatgtcggtaacgacaatggcttttactgcttcagcaaatgggctaatacgaagacaacaaagtatttgtatcaataaatgctacttttcttgaacatgactatatgaaaggtcacaaaccatgaagtcaagtggttatcgaggaaatcagaaatgatagatttctgaattatcaacttcagtaccattaattgaatgaccaacaactgtcaccactattattgaaaaggaaaccctggcacatcgtcgtagtgagagggttgtgagatagcctatccgctatgaacatgaagcacatgttcttgtttcacacataaacaaggacaatacaatgacttacaaggaagcaatagaagaccctaactcagacaagtagaacaataccatggatcaagaaatatattccaagcgcaccaacaaagtctagaaacatgaaactctacttgaggatattacactcatagggtgtaagtaggttttcaagaagaatagaaatgttgaagggaaggtagcgacctttaaagctaggcttgtaaccaaagactacacacagcgagaagacataattatgacgaaagtttctctcctgtggcatgcttaaatctattcgcattcttttttcatacatgccatttatgattataagatatggcaaatgaagtcaagacctttctaaatggcaatcttgatgaaattatttatatggaacaaaccaaagggtatgtgctatcaagggaagatcgaaaggtatgcaaattgcttaaatctatttatagattgaagcaagcctctagatcttgaaatatcactttcaataaaactattaaagaatatgactttgaacaaaatgaaaatgaaatctgtgtatacaaatacattaaaagtaatgtagtggtattcttaattatttatgttgatgacgttctactcattaataacaaaaaacgtttaagaataaatcaaataacagttttgaccgttcttgattaatttcctaattgtatgcgacttgctaagtcatcattgactacctatattctgaacacatgatctcgcaagccctttggtgttttatttgcatattagaccttcgggcctataaccacggttagataattgaatgcttgtgattactttgatcacgtatttgggctttcatgtgttgaaaacctagaacttacgagttcctaatgagcagtctaacacattagtcttggaataaatatatgtaaagatgtggtctttacgtgacgcgggagagatatacttactcatcgcatataatcaataataataagtgttatattgtgagacaaaaattaagatgacataatatgatatttatatatataagtagaaaagaaaaaagtttattgaaacagtggattttttcgtgtgtgtttgtgttcttttttattattatatattatcaaaacaatgtcatacatttttacatattttcaaattgtatttttttcctttaataaaacaataaaagtttagtttcaaattaataaaaaaatattgttattaagtattagtagtgtccaatatcgttttataatttgttatttttaaagttattttattaagttatattgaattcaatatttaattacatcattaataatataactgagaaaaatattatgtcttttagcaattttcccaaatattgtatttagggtttctctaataggacactaaaatcttaaaaatagtgtaatttggacacaaaattgctccaatataacactaaaagctatcctatatatgtgggagtctatagactatactaaattttctttttctttttataatattaaaataatatgtttatgattaaatttttatatttatatacgtattatagtgtgaaataatttaataaaataatataa

SEQ ID NO: 379668 - DNA, 2861 bp, Cannabis indica
aatcttggttaagctttttattctttcaacaaagaaaatcttggttaagcttttcaaagtgtagaagaatagcacctaaacaaaaagagacaagatgattgtaaactcttgctctcgattagaaaacagtcccatttatgtttatagcggacgcctcttgaataaacatcttaaaggaatgcgagaaacccttctatctagcttggagaggcgatcctatgagggttaacgccatcgtgaatgcattttcctcttaagatctatttatcaaactcccatataacacctccatcctctgcaaaaccaaatacaacataaagtaggaaagaatgttataagcttcagcttcaaaccaaaatggtcaacagagaaagcaatcaagagatatcatgcataagttctcatatacgagaaacgcttaaaacaacctactatttcttatatgtcagccaaatggacaaaactttagtagaaaggatgatctcatagtaatacacttccatcaagaattatcataaggaaactcatcttccatttaaccaatcgctggggatcaaatctggatatctaccaacaatgacagtgaatatttttcagaccattgtccttttactttacttggccacaatctcccctataaaaaagtcagaattgcagcttaccattgggtgggtataaaggttaagtgtgtttagtaggataggagggaaaggtcaaataaacgagaaagtttgagaatcgtaagttagggcagagcaggtttatttggtaggaagcattttaaaagaaactaagcaaccaattgtaatccttcaatttaatcaattttcaactttttaaaaattagagacactttagaagagagttcacaggtagacacttttaattcacttggagaggattttgattttctcttcatgtcatagttaacacacactatattgactctttttagtccccttccctaaccaatctgcctctcatttcctatattcatctctcctttttgaacatagcctaagctaacaaaacgaataaacatttgaacaagtaaaacaaattcacttttctacaaatatatggtatacatacgttcagtttctactctaaagaactgaaaaagaaaagatggaaaagaagaaaggtcaaacctgcaatttttttattaatccaaatctcaagtagcatccccgcaccaattcctccagcaatacaagctccataaaagccaatggctgaaggtaatgatctccgaggaaggaagtaacattctggaatttgcctcatcttttttgggagccgcttctttataactggtttactacctgggtccttctgtatatcagtaccgacagctttccaatccacccctctaaaagggtctcttgcttcttcacttcccataactcttaaaccacaattcacacctataaactttgcatctgaagtttgatacaagaaccctacgttgataataaacccataaataattctttgttcgaaatgaaagattcgagtgtttgcaaggcttcaaaaaattattgaaattgcataaactcaatccaacgttatagaggcaaatggttgatgatagcaaatatcacaaaatatttaacgtctctagagaattttagaaccagtttttagtttatttttgttgatatcctttccccaatttgagataagaacattgaattataattcagaataaaaataaataaatcaacagaaaatagagagaggtcgacttgccgagaggtaaatgatcgaaggagaaaattagagtaagaaaattacagcattttctttttctctgctggaatcggtttttgtctttcctaggtgaatcgaaatcaagatagagaagtaagagaataaattaaagaatagaaacataccctctatgaagtaacgattggcagagagggattgaccaccggaggttttgaaggaaggaactcacgggagaagagagaccacagaccaccgaaggctggagccggagacgattaggtagggatttagatttttttttcttttcctttctgaaagagtgagccgattacctgttggctgttgtgtaccagatgagttggtttagacccgacccgcactaatcaataccgggcgaggtgtggacggggctccaaaagtagaccttacgtgaggagagaaaaaactaaggaaaatataggaaaaaaaatagagaataaaaaaacattagtacatatttaacattataactaaaaaactgttttgaaaacaacaaaatattattttctgttttaaaaaccaattcacttttagttaatattgttttaaaaaaacactaatcaaacatgacttgtttttaaaaatttcaaaaactattttttgttctcatttctaaaaacaactttttgaaaacaaaaaacagaaaacaatatcaaacatgctcttaactttttatgtttgctatgaaaaattttggtaaatcaaactttttccatataatttggcatttcattctaaatattaattttttttttataaaactttttattattttttttagtaaaaaactgttattataatttttttttattttctcaactttttatttatccaccaaatttcaatttccaaacttaacctaaaaaatatcaatcaaagatataattggaaaaactagaccaacgaatagaatttgacaaaataacttacaaaaatattaggatttgggttaacttttacaaaaatactgtcacacggaaatcttttcaaaaatactgtgtttttataaaacaccagtaaaacacaaaacagaacaactcaaaacaacagtagaacaccagtaaaacaccagtagaacacaagtgaaa

SEQ ID NO: 379669 - DNA, 1094 bp, Cannabis indica
tcaccagagagactgaacatggcagatttaatctcatcaatagtgaaatcctcagcaagataatcagattgggcaagagaaagggtagtggtgacaccttggagaatagaagacattgcagaggaggaggtaccatgggatgaaaagaggtcagtgtagaaggaaagaaactgggtgaatatagtttgggaatcatgagtgagggaaccatcaggaagggttaagcctcgaatatggttattgcgcttacggttagaggctttttgatgaaaaaatctagtgtttttatccccagccctaagccaattgacccgagatcgttgcttccaaaaggtttcttcttttaagagaagactgttaagctcagattggaggtgagtgatacggtgagaggaatcagaagttggtagattatcatttaacaagtgattaagctcagcctgagttcgagcaatttggagtttaagggaaggctgcgaggcttgccagcttttaatgttggtaagagaggtggattgtttgttgagaaaatgatgtaagggggaaagagatgaggaggaaggaaggcaccaagaatcacggaccagggttggaaaagaagggtcgttaataagaaagttctccacgtgaaatcgagagggtttgttgtgtgtggaagaagtgtcctctaattggagtttcaaggctctatggtcagatccataaaaccccaaatgagtgagggaagcatgagggaaaaggtttttccaagaggaggaaatagtgcaccagtctagacgctcaaaaattgtaccatggcgccaagtgaacttatttccggagtgagaaagaggggtcatatttcgtgtatgcagaaaattatgaaagtgatgcatagcatgggagggaggagaagaagtggaatttcgatcattaagggataaataatcattaaaatcaccaataaccaaccaaggcaaaagtggagcagtgtcatataaacgatttagaagggtccaagtaaaaacttttgaatcaatatacggagaaccataataaccagtaaagtgccagtttttgtcattaaaattatttataaaacagtccacatgatt

SEQ ID NO: 379670 - DNA, 6285 bp, Cannabis indica
atttcattacctccaaccgaacggcgccttacacagacattgtaaataacccgtatctaccatgatatgaaaacttaaaagcaagacaaatcagtcaactgaatttcctattcatttcttctaatggaagaactaagaaaattctatggctgtttcaaaagaaatttagtttcaaagaactatgaataggggaaaataagaattacctcgcctcggataaggtcattgatttttaaaaacccttcctttggtacacgaaatctataggtatatggggttccctttgccagctcctcttctacttcttcatctgttgcattggcccattttccagagtatactggaggtaggttctttagttttgcaatctccttcattttttctagttcctggaagtaaagtattaaaattaacatcaacaaaaacaatgcacatatatgaaattgcaaaattacaagagaattacctcactggaacaaaagcagcgataaacatcaccagtttccattaacttctctgcatattgcttgtacaacaaatttctttctgattgcctatatggaccataatctccaccaataccaggtcctgaaattttcaccttataatattactaaaaattcatagcaatcgaaaaattgtgggaaagatcaatactgactcattaagccaactccatcttcaattcaactgacatcattcgaatgcttcctaaatcctaacctaaactttactaaatcatttggggctaagcctaaatcagttcctccaaaacagaaatggccaagttttggtcttgttccttgcactattacttagtacttgttcataaaagcaatttggctcataatgattttcttaagaaacagaaggaaaattgagaaatgattttcaagcaaaagataattatcagaagaagaagaaccttcatcccaatcaagaccaagccaagaaaggtctcgtagcacagcttcctcagactctttagtagatctttctaagtcagtgtcttcaattcttagaacaaatttccctcctttggacctgaaattacatcaaaacaaccttgaaactcgaacaaaactctgataaaatcataatttgaagttggggagagagaaagagagagaacctggcgaaaaggtaattgaaaagagcagttcttgcaccaccaacatgtagatttccagtaggtgaaggagcaaaacgaacgcgtacaaccccttcagcagcaatatttccattatcgggaatcgaagatgccgagactgaaaaattccttatcctgcagaaatttgaaactctccggttcgtgaagtacaatgaagaatggcgtagaaatggaggtgcaacctccggaaaaaccctaatcctcatccacggcgctcctgttaatgccgccatgtttggatttctctcaaagctgagaaacgagaaagatagaatcagaaattcaattcatcagataaaaacagaatctatctattgcgttagctaaacgacatgtcgttagtgaacccccacaaaacaaacgaccttaacaaatatgtcgttttctacactttaacatctccgaacatggttcttcttcttctcgtggaaaccaagtctgaaacttgagctaccatgagttcattgtcgtactctgcaactgaagcacttacactcatcaactctctacctcactccttcaccaaattccaaattcccaggaaaagaagattaatggtgacgatgagagaccggagcaacaacccccgtccattacagaaaggtagaaacctcagcatcgaagcgattcagactgtccaagctcttaagagagctcaaaaagaccatcacagtttggaacaagcattcgatttcaaattcagacgattgttgaagctcgatatggtggccgtactccgcgaacttcttcgccagaatgaatgcctcttggctctcaaggttagagaaaaaaaaaaaaaacaatttcttttctttcttattgtttagaaattgagactgattttgtgccattgttgttgggttaggtttttgaggatgttcgaagagaaatctggtacaaacctcgggtttccttgtatggtgatgtgattggagtattgggtaacaatggattattacattaatgaagttgaacttgttcattcttatttgaaaagagaagatgatttacagcctgaaattgagggtttcaatgctctgttgaaaactttggtaagtttgaacatggcagagctagcaatggagtgttataatttgatgaaacaggttggttgtgatccagatagaataacttttagaatactgataaatggtttagaatcaatgggagagactggctcttcaaatattttgaggctggatgctaaaaaattctatggtgaatctctgaactttttggaagaagaagaagaattgacactcagacattagggaatagtgaaaatatacatgactatattggtctcatcaatgaggagatttctcaaatctttctctttgtgttgaatatgtaagctgaaacttagttgaaatgaaattgagtataccactatgattattgtcttagctatctaaccattaaaaattgaatctttctctttgtttagtaaatgttttgtttgcttgattagtaccatgttaggcttgatcatatttggttagtattgtgcttctaggttaaatagcgatacaattagaagtactcaaaattttaagtttgtaaatggcataaacttatacttatttttaacaacataagtatctaatatttataaaactgtaatttttctctagttctatcagtacgaattctgttttaaactgatgttacatatttgcttaacctagaatctgtactgatgaaattagagaacaattacagttttatatatattaggtacttatactgctaaaataaacattaatttatgtcacttacaaacttaaaactttaaatatttagaaaaaataaaagagagcatagtaatgaaagcagaatagagtgaataacacaaggtaaggatcttcccacacaacaatactttttcctctaattacagattccatccacatatagttttacttttaaaacaatatatataaagatacaaaactgggacctcgtattcctattattttcaactttctactactactttctcccttctttttgactacaacctgatcttttcgggatagatggagatttggaatgacattatctagtgatgaactcatgaataggatttgaaagttcttaactttaaaatccttgttttacagaaatgagattttgataatgatgataatagttttgtatccaagtttatgagcttctgatattagaattgcttcccttcataggtctgaccgaattgccagcctgccggagcaacattgtaagatgcaagtgttcttccggtgctagccgtcacctcgaaagatataggctgccctttgaggttgatattgctttgccagttctgtccccagtttcttgccattggtatccaacctgttcttgaacccttcactttcacagctaccacttctccatccaacccaacattagtgatcaacacttggtaaaagtgagagtttccactcatagtgaatctcactccacctcttctatcacatttcaccctacatccaaaacacaaaggttttcactcacaagttcaacataagaacagagaaagttaaagatttacaattttagtgtgttacctcctatactgaacaggaacaatatctgcttttttctctgcaatttgagagaatgctgcctctgacatctcaaaatgtttcttggggaaattacaccaaccaccatattcagctgaaagcccataatttggaggacagaaatctgtagctgtgagaataatagatggacttccttgcaggcaccacaagatgtggtcaacacatcttaactcatagcaagctccacaggtactacctctgttaaacaaaatgctgcttagacctgcactatactccccataagtgatttttttgtgaagatctccatacccacaagctccttctgtaacatgaaaaaccagaagttagtgtaagaaaaaagaatgaatgcaagtagtagaagcaaaaacacttaccatcaatgatggaactatctgaatccatagtataggttgcagttgcagttttccactgtcctttctgggcaacagcagtgacccatatttgaagtagaatcaagcacagaagagtggtatagaaggcagccatggcagatagatacattattaatatgaaagctcctatctttactcttttttcttttcttttgatgcaatgtgaagaaagccctccttttcttttttttcttctgagacaaatgacctaaatcatgtagctttagctgagtgagagatgaaggaagaagactttgagggctggaatgaaactggacccttaagtctgtagtaaagttggtaactttgtcaaaaacccaatagtagtgtgagtagtgtcccatataaaccatagttcacatttgtggggggagctggcacattctgcgaggagaagaaagagaaatgagggtgtgttggtccacaactgcacactatggaatacagtaatgtttcctctcttttcattctaacttagcttctttttctagcgagaaactaagtcactaaatataagagcacttagttttcttctttattaaaattcaattttatctattttagttcacatttttacattacatcttacatcaattttttttttttataaatttctttacaacattataatattatattgtaaatatttttttattaattttaaaaaataaacaaacaattaatgttgaaataaaaatagaaaaatcaataaaaaattaaagaaaaatatttgaagaagctcaacaacttaaaaaattatctctgcatgtaaaatagtactattttatcatttttcagttaaaaatttaaagatgaattatttgaactacactaaaaaaaaattactatttagctttgtaaggtgtctaacactatcctaatatggtatcttttgattaattaatggttcttcatgttatttatcaaatcaaaatgaataggacatgatattgatatgcatcaaaaacaatataatacctcttttgatattgggcacctcttaaagtgccccttacaaagtgtgaattttttataaaataagagagtatctagtatgtgtggaatagatagagtcttctattgtatagtgggaatccgatacggtatatgattgaatcgttttatcctgagaatgactggcaattttcgactacttacacatagtgttacgaacgtgttaaagaaagtgacgtagttcgtgactcaattcaaaattttcattcaataatattgttcttcttttattttaataacagtatataaaacacctactaatgatacagtattttcaaccacgagtacattttagatgaaacctactcttgtaaaatacattgaaatcattgaaatattatatatttcgatatataatttgggtgcttactctttgattatgtttatgaaaaataactatcatagtaaaaggtgttcataacaaacacactgatatctaataacaatactatttaactatatctcactcttaagagttgtgagtatgagacttctttttgggatggtggcagacaaacaaagcggaaagccctagaacaagtaatgaagaaactagcttttaatatttgcatatggattgtttatattgagatatgtttggttggtgttgatgaaaaggtcgtttttgtttgtgctcttcttttgataaagtagagttagagacttgagagtagtgttagtgtatcaaccactaattaatctattatagagtgcccattagttttataaatcacattctcttttcagcttagcttagttgagaaattaattaattacctcatcatatagagactatagttttattgcattgggatctaaaccaaacctttctttctttcaatggatggtgaaggaaggtatatgatgaacttcattcaacacgtgcaagaaaataagctctctcaattttaatctccaaaaaaataatggattaatggattaaagtaaaatgatataaaattacagataatatgaagcaaaacaatgtggaaaaaataaataaataccattttaaattctgtgtttgaaaatgttagtgcatgtttggcatcataactaaaaaactgttttttgtttttaaaaacagaaaattgtt

SEQ ID NO: 379671 - DNA, 4015 bp, Cannabis indica
tttttttaaaaaaaaattgacttttaatggttagcaatgaacatatttctaacttttctaaacttaatttttaattttttttaatacctattaaatttgacatttctcatgaaattaaacccaattttttttatgtagttattagaattactaatgaattaacggtatgtagactccctcaaacagataacaaattgtctaaccaaaaaatatgcttaaccaaataaattaattaataaaccatcaccatttcttttataataaaccatagataattttaaaaaatatatatatttgaataatttataaggtaaatacttaaagttacaaataaatatttaaattaagtttttgtcggtaataatacttaaattatattgttaaatgacaagtgtgttattttcttattagtatatttaaattatttttaaataaaaaataaaaatttaatgacatgaactaatcaggaaatgttacgtgaccattgacttaatacttaatgatcaattacctaccgaatttctaaaaccataatttaactattattaccgttaaaaatgaaactttaattactttttttttaataaaattgagaatttacctttgggcctatctggtgtaaatagcttcttaatagcaatatcatcaataatgggcccacaagttgggtcatcctccataccctgattagtaaagaccaaagtcaactcatccgagtcagcttcaaaagccacagcatatgggtcccacccttccacgttgtacaaagtctgaagatctattgtctgcgacgcaggtggcacggacacattaagtgactccagctgtgcacacgtgcgagccgcactaaaagtaaccgaatagattgatcctttctccacctttagatcttgtctgatctcagcatcgttaccaagtctcactgcgtgtctaccttgtggtacgatgaggatcatcccaccctgtttttgccctgattctaccatctcaacggtgccgtttgatctccaatttgggatcgttgtgggcccatcaactaccgattcgccacttgggaaaccacctgttgggatcgtctcgaagtctccgtttggtattgggcctggtggtatcataaacaggcccatttaaaataccactttataatttgattttacaaaaatactacttttattagaaaataataaattttattgtaaatagagtttatttttcttaaacataatgtcaaaatttataataatacaaagagataattacgtcataaacacttaaaattttgaatttataaccagtataaactcgatgagtttttttagtagcataaatacctaatatttaaaaaactataatttttgtcattacaaattccgtttgtaaatttattaattggaaaataactgatactacatgttttcgtttagtgaccttacatgtgtcctgtttaagacaaaatctgtaacgacgaaactaaataaaaattataattttactacattcaataattaattatgtggctaaaaaaattagtgtattctcttttaacccacaattattttatttatttttccaaattaaaaaaagtaaaattttgagtttttattcactcaaaatatttgtaagaaaaaagatagacatatatgatttcataaaggcaaacaatgagacaatatgacccactaaaattgaaattttttatagagaatagagatcatggcaacacttcactatcgataccaacaccacttttattttcttaatgaattgtttcatttcatgtagaaaataataatttaatttttacaatttcaatttataatatttttaaaatatcatgtacatataattaatacaaacctaaatttgtaagaagttcacatgtcaaaaataattgtaatttataacacaaaatcccacatttttcatcttgacaacccatcatgtttacataagtacttttcagaaaataaagtgcatttattcgaaatatataaaaaataatttaacataaacatttaattttcattattaatgaatgcattttttttcttaaaaaaaaataaagttgaatgtcgagttgtcacacaaaaaatacattattaaaatttcaaaccatatcaattccttccattaataaatactatatcgttaaattcttagacttagtactatgtatcactttcattaataataataataataaaaaaaattatattggcacactactcaatatcacacgtgaatcccacaaaaatcatcacttccaatatgattttataattaatttcgagcttcttagtaattaaaaaaaatctaaattccaaataaaaatcaaccaataatgatccaaaatataaatatataaattttaggcctcacaaaattgcaagaaaaagttataagaacaacttgtatatagataaagaaccttatccatgtagtgacctcaaatgaaaaaaaaaatatatagctaaaattaaaaataaataaataaataatgtaatactaaacaatatttactctttttgcaaaaggacaaaaaaagagatatcaaaagaagatgggtctaatctaaataaaacatgacccagaggcccagttctccgtgtgggcccaattccaccgaattagtgggcccaattcttttagtcttcccaagtttgactaatgtgaagaaaaaagtagaaagaaaaaaaaagtggattttatttttattttactagtggtgctttttttagggattctagctggaaattgggatggtaaccaagaaataaaaaaggttcaattataagtctattttaagggctactgtcctttgtgggaaaaggactgtgcccttttgttaaaatagagaaaaaagaagaaaaataaaaaaaagtaataatatgactatttgatctggcgggaaaattgtttgtttcccactaataagtacatttttttttacctaatcataaaataatagaataggggaaaagaaaaagggtaccaaagctagtatgtatggacccaaaatttctactttgtttattgtatttgagaaaaagcacacactttactcattttgaagaagaaataggaaaagggtcattggcatttatctctaaataatagaaaacaccatttattggttgagtcaattatcaagtgaattagccctaattaagcatacccttaaatagatagcttctatttacgattagttaacaatattttttaaaagttattttattattataagagatctaatacttaattactacaataatagtaatatatgcaccaatttataataaatataatttttattaaaataaaataagtaaaattcgatattaaattacaaccataataatattacacttcataataaaaagtgttcacaagtaccctcacgattacccttattatttctctaccaataaacatatgtctcatttaattttttttttttcaataatgtagaaaatcagatttcatagacccacaatagaagaagctttcctatattacaagtaaatttaattcacaccattattattttcattaaaaaaaaaacacattaatgttcaaacaagattagcatgaaccactcaattgtagtgggtccatatagccttgaagaataaagagaattcatcattgtcttttttttccaaaatgaattttaattatagtcacattaaatttaacaaaccttaaaattttgggcatttctttttacacttgtatattttttttcttatcatattttgtaccaatattaagcaaaatcaatacccatatcaatgttggaaaattaaaaccaaaatacaaataaaaacataataataaaagagattttctcacatgggtttgagttgacacgtgttaatctaaatttctttaataataataataaaagaatattggaaatttgtatatcagatctcaaatatttggcaaaaatcaacaattttaaaagtaataataataataataaaaagagagaaagaagaagaagaagagaaca

SEQ ID NO: 379672 - DNA, 2311 bp, Cannabis indica
aatgtaatactttagtttgagtcctctaaaagagcaactggcaagtttctagcatttttgcgagatgcataaataaatgctgtagattagagtttaccagctatatcactttttccgttttgagttttaatctaacaatttgtctttaataattttcaacaggttcaagttgttgcatggaattatcatgcaccacaagttctcctcagtggatcttttgatcattctgtggttatggtaaattctttcttgggcgctaaattactagttaaaacttatattgtgcgctttgttctgtaggtatatatgtagtgttttgtgatgtaaagattataatttatgagttcttatgggtcttctttattttcaatggttacgaattgcagaaggatgggaggataccatcacattctggttacaagtggttagtcgattctgatgttgaaagcttagcatgggatccgcacactgagcacacatttgtggttcgtgcttctgcttcttttattggtttattttaatagaactttgaatagataacacgtgagccatgatacttttaagatctgattttacattcatatttatattaaaaaaatgtttgataagagactgcagtcactaattattctctgttatttgttgatttaattaggttagtcttgaagatggtactgtgaagggttttgatattcggactgcgacgtccaccacatctcccgagtcaaaaccaagttttactcttcatgctcatgacaaagctgtttgctcagtctcatataattcagcggctcctaatgtacattctttttctccttgctcgttgtgtgggttgattttatttatttataaccttcaaattgtaatttgttctttacggggttttgcagctacttgccacaggatccacagataaaatggtaaatgaaagttttcctctctctgtcgcgttagcttattattagaggcagattctgattgttctttttcttttcccccttgactctgtctattatttcattcaggtaaagctctgggatttatccaacaaccaaccctcttgcattgcatctaagaatcctaaagcagtaagtggtttggtaactggtctttctgtttgattaatactaggttgatgcttactctattttaaatgttactagggagctgtgttttctattgcgttctcagaagacagtccttttttgctggctataggaggctctaagggtagaatggaagtgagttttcatgttaccaaattttataaaattaaaattgacatttttgcttgcataattattgatataaaatgggatatttgcagatatgggacacattatcagatgctgcagtctctaaaaaattcgggaatcacagcaaggtgaatagtcagcctgtggcctaatgcgatcgaccgataaacgaataaggttttcaactacgatgactagaccttgtgtttttcttggaatgagcgagcatttctttgcgtgtagctttctgaatcgtcgcatgatcttggattgtcttcctataggaatccttgatgccttgtatgcttgtgtaataagtacaagaattttcaggtacaaggaaatgtctttgagaagacagtggatggtttttaaagatcacttatttcatagcttcggttccaagatccatcatgctagaagttttaaagatttgagctcttttttttctttttctcaagggataagtaggactgttgggaagtatataaatttttcactgttattctatcttcttttggctgtaaaatgtttatcactacatgttacagacttggatatgctgaagtaaagcactaacaattttgtcctgttagatttttttttttcctgggaaaggctgttaggtcctgcatggtatgttatattgtattgtattggattgattttattatttttattcaatattatgtttgatttcaactgtattaggatgtattaattatactattttttgatgaataacagagttactatactgttttactataagtgatgttaggatcaggattggtgcaagataaaggctcgggtgatgatcaaaaggttgagaaagagactggtagtggtggctaggtcagaattgggtttgaacttggatggggtttggctttctaatatgctagggcagctaagctaggtcaagaataaggttgagagtaattataagtgcaccttcaaatatatgggtcactattcaatggttacatttttattgtaaccataatagcagtttactaataggtaaacattctttttttataattaattaatta

SEQ ID NO: 379673 - DNA, 2131 bp, Cannabis indica
tagctcatcgtctaaccgcagaaggacatactttaccaaactatagactgcaggatagcataagaatgttccttttcaaagatgttctatgctaagagcaatgtgattagtggccactgtatcaacatactagtcttgatctattgcatagtcaagtaccatggaggatgaataagcttgaaacttttcaaattcattaaattctatcaataatgcacgagaatcaccaaatttaggtgtaacaaatcctttatcaaatctgtagtggcacacggtaacagtgtggccaagtttgtgacacacttggcaaatgaaccttggtgtgttggaagcacctcgaccagattatttgggtggagcaagagtgccatagctttgtgtgaagcctttaccaaaaccaggatatcgattgggagcattagaaccagatcttgaaggtcaaccagagagatttgttgatattttgttgctagtatcagtaagattgtagtgtctttccaatcttctctcatgagttagtaataaggattgaattgactcaaaagaaagatcatctacaagacttgtgacatgaacaacaattagatcaaactcaggacctaatccattaaaaatatgcatgattaaatcattttcttccatagggtgaccaacaatagagagagtcaacaagaatctttaccttgtcaaggtaatctgagattgaaagatttcctttctaaattgtggaaagctaagatttgatttgctgaattctacctttggacctccgttcaagagcacgtgaagcagagtacgagttttgaaactgtgccaaagatttaagaaccgtctctgacattgaggatcgaagtcagctgaggagaagttgatcttttttttttttccagttggtgaacttaggattggtctagcctgtaaccaatcgttcaggtggagacactccttcgagaagaatgtcgtcgagtccatggccaatgactgctggaatgacttgagatttctaagccagaaaattggatcgatccaatttgactgtaaggagtgaattaagagagttcttgaacgaattccatggtggattgaccggagcagtggctgcggtggtgaaagcttgagctatagaacgaggtgggttttcagggtgacgaggatccatggaagacgttagtcaaggactatctgataccatgaaagagcttattaatggaaaaaggtctgcatataatttatgagattgtaattcaagacttgcaaaagctccaaaaccttggaacaaggattcatttatatagggaatgatacaacaaagaagaaagaaaaaagaagtaacagaaaacaaacagagttagtttgttggatactgttacaacaactattacaacaactactttaacgaactaacagaaagttcagcaatagcagtagctgtatcagtgaacccattgagacaaatcatcctcctgaaatttaaacaataaaactataacatcctcaaacagtaccctagctcattaaaaatacccatcctttgttgatagttgtcaccagagaaagcaagtctgaaaaaacctcactaattgggaatctatagtatgagcccaattgagtcctaccaaaagagtgaaagttccaacttataatactaaaatactacctgaaacatgataaaataacacaaaatacaacaaatattgaaaaaggcaatctttgaactaaaaaataataagctaaatttaaattcaaacacacaactaaattaaactaaaacttaacaaaactaaataaaacaaaactcagctaaaatttaggacatctagcccaagacgttattctttggctagtagcaacatccaaaatactaaattgagattcaagagaacttatatattgttatcacctaattcttttcaacaataattatacaaaagtaacaacaaaataagatagataaaaagcaaattaactagtataattagcctaacacaattatttaaataagacaaatgggtcttcagagttaggggttgttcatgtgagggagggttgggtccagtatatcgtacccactactaatggcccactaactctcacacaatgcccaaagaagaggaatttaacttttcattaa

SEQ ID NO: 379674 - DNA, 4238 bp, Cannabis indica
tgaagaaactctacaacaaagtttatagctctttatccatgttttatacaattaattaattttactcttcttcactttcagctgtgctcatttaactgctcttcgtagagattcaattggtatgaacccttctatttttatctttatcttgcttaataaaaaatgcaacttcttcttcttctgttctacatgactaattataaattttgttcatttatttctttcaaacttttacaggagaatattccgccgatgatgcttgggaattcaaagatttggaagaagcaattaccaaaaactatttctagttgcttattgaagtcattatatgcaagtctctgcaatttttcaccctatataacaaaccacagaaaaggttacaccttttttttatcttaaattttgttattataatgtaaattatttatttttataccaggttaaattattctttctgaaaattcgttaatttttccaatgagttacactaaacttcatgaactacaaacaaaattttcgagaaaaaggtgtttttagatgataggaatggtgagagaggatagcatgattgaggagattgtgcaacaaaaattgctgaaagtccattgaaacaaaactttcatcaaaaacgaagattctggtgatcgagcttttgcttcgacggacatgacagcgttgaagaccatttgaggatgtttgatgcaaaattttgagtgtgtgctttttacttgtcataaatttaggaatttgtgaataattgtgttatgaatttaacacaatgccctaaagagctttttgaggtgttttgaaacaaaattatttcgtgatattagaggtgggaattagtaaaaaaaagccgattttttatattttttattattgattaatttacgatataaatattttagtttaatttgttactataataatatttaagttatatttttgaaacttcaatagacacttggctgttgtgttaagtcaatgaccatataacaatacttgattagtctatttcattaaatttttatttttatttaaaatttaatttaaatataccattaaaaagatgatacgtgaataatatcttaccacttatcgattaggcacatataaaagtttcaaaaaatataacttaattattatttaaacttaaatatttatctgcaattgtgaaataaacttaaatgtttacgctgtattatttattatttaaaaataaaaattgttagattcagataatttggtgccatcccttcacctctaaaatggcttgaatagcatatatgaacttccaataatagcataacgacacaaggaggtgagtggtgagtgtagttctgatgaagcatgtgaaagaaatgggcattacttttcttttttagttctatgccattgtcaacaatattaacccagctaaacaatataatggaatttcatcaagagaaagaaaaaatttaataaaataatacagactggattttctggcgaaaataaaaatccaggaagaggagcacaatgttacagctaaaacatttctgggtatacatgactagatttaagtacaatatgcctggtaagtatcaactctctctctctctctctctctctcatgatacaaatccatttccccccaacaaatctaacgaactgttgagtttggtggatcaattcccactgaatcaaaatatgctttctccgcattggatatccgatcttgaaacattctccattcctttctacacctctccctcacctgatacacaaatacacaagtttatataactttctaacttgttcattttgttactttcttttgagctcaagtttgtctacttcatgttttcacaaactaatctaatgatacataatcgataaaatatttgttacataccccttcccatggttgtttcccagcttctgatttcccctgcagattaaggagagagacagagagagagaaaggcattcatattttattcgacataaaccgaacaaatcaatagtaaaataagctaggaataagactcacttgggaaccaagtgaaggaacactttgatgaacaatccactgtgaatctacaactcctatcttctcatgagcaggctgtttatgcaaaaaaggtattaagttgaaaaaataatccagttttataatcacaaacaaggaacaaataattttaagtttttgcctacctcgacacattttcgaagggcaaagtccagaccccatccatgtaccagatcattctgcaagaagaggaacaaagtatttgacatgttagatataggggataagatgcaataggttatatcagattagtacaaattataaacctgaatcatatgccaaacgcatcgccatgcatcacgtgagaacacagttgccataatctcaacaaatctgcacaatacatgtaacttattagcaactacttttacagctttcacaaggccatggaagaaatagagtgcacttgctaagtaactaaatatgtaatctaatatttttgcatacgctgcacatggtggcaaatgtggatcagtacaccaaccaggcttctcctctgtatccctgtacaaaggatagaagagaaatgataaaagagcaactcaaatgaaactatcaaaattgaatatgcatggtcaagctaaattgagtggaaaatgttgtcactcttacttgtgaacttcactataacctctccttttagtcatctgccatgttaatcccttatttggttccaatcccggctgcgaaatctccaaaccatgtttcttcactaattttatgtatctgaatcaaagcagattttaaaggcatatgataacagatagtacacacaagtgttttactaaatgcaacacattcaatagataaaactcactcctctgcattaaagtgctccacaccgagatcctcgtcccacaaaaagatgtaatcataagctgcaacgatgtcaggatgcaaaaagcgttttgcataccacctaaaaccgaaattcaggaattttatatgagcataactcttatatgacttgaaaaatctgtaacgggcaaccatttaaatgctaaccatttagtttgcttcggaacgctcacatggattgccctttttgaccactcaaactcttcccattcacttgttcgaccatcatagtgaaacaacagaatggtgaaattctctgaaaactgtacatgtatgtcagtttgagaaatgtagagagagaaaacaaacagcagttgaacactgacctttttaacagcagcatcgatatttttttctggctataaccaactgtaaaagtgacaagatattttggtgtgacggttaaatcctgcaaattccatcaccacagtaaaagtttagatagtatacaactgatcatcatttcacttatgtaaatcactaagtaattactaatcataaaagtcctgcaatttatttctaaatatagaatattaaatttttatattttgctagggcatttaaagcttactattttatagtaagtctattggcaaatgaaaaccagaagcaatcagatcaataaatgctttaaaaagctttattagtaagttctgcattcattcttaatgatacttggccatctattaatttctaatctggtagaatttactagtaataaaatcttcttcaggactcaaattttctgtcttctctatttagttttcaataagcaatcaatgaatcaatttacatttgatgaatatttactcatagcttctttaaatacagtcataaagcacaattcttacaattttgcatgcataatagttgctgacattataagggagcaaaacttaatcagaggatgacagatgcacacctcactgggcagaccccacaatcggcgaagatagaaatctgattcggaagcaattatgccaggcggtagtctttcagccccgcgaggatttgttggaacccagatctgcagtataagtagaggtttattagctatcctaacacattagagaagaaggatactctcctgcaaatttacaattaaagaatacaatacactaggagcagatcactgtaaaatctcattcatgggcacagtacaatacacttattatctcactgtactcagcccatgcaacaagaaaatctttgcaacacttaaaccgaagaagaataacgacataaacacaacaaaagtgcattttagctctccccacataaaaagacgatgaaaatgtgaactttaaaa

SEQ ID NO: 379675 - DNA, 1554 bp, Cannabis indica
gcatacgatcgtggtcgttaggaaaggaaaaaggttagggtataggtaacccggcagttttggaagggcggtgggaggaggtggcggagttcgtgggggctggtagcttggtccagctgttggtggataacttggtccagctgctggtggataacttggtccagctgctggagggtaactcggcctggtttctggtgggtaactcggtctgactgcagatgagttggagtagtttgtaggcaatgccattgggtgtgtataaggggagttagttcttgcttgattctctggtctggggaatgaagctaagggaatttctgttggaaaagcttgtgcagaaccatctccaatagccaaggtgatagaattaccgtcctttatatgtccttcctttcctcctacacacaaactttgacgttaataatgttctatagtttctcctagtaaaggaccatgttgccataaatagggataagaaagattaaagcttgcatatgaacagaaacaaacaaacgatgaaagaaaaaagttttgaaggatttaacataccaatatatgaatatggctcttctctgtcttcagaaatacgtatagaaacatcaacaaatccttgaggtttgttggagtttcttttgcgcaactgataactaccaacttcatcagttccaggccttgaaacctcagaattcttgtcatcatgcttagctaggaactctttcaaaagtatagttgctgtcccttgaagtctttctctcaggaaaattggctccctactgtaaacttcaacatgtagagccagatcgttgaagttggattctgaaacatctatgcaaacagcaaactttgttctccaaactgggttagcattccctgaggcatcgatcttggagcagtacttgttatttggatcaatccagccaactgcaaaccattggagcttccatagggaggaagaacgcctaagcccacgagcagaaatgaggcatacttcgacccagagttttcccatgacaagcaaaatgagaagaaaaaaaggagagaataatataacccccaaactttcttgtatagggtggttctttggataaagttgaaatgtgggtaaaaagaaaggaagtctgttctgtataatcaagaaggctactttacttttagtggcataatttatataccaaagcatcattatggggtaatctctttcttgcaaaaagtgcatcacaggtgggcaagaatcgatttctgaaaggatagcgtacagtaaaccgcagcattattaaatagacattcggattgaaatagtaaaataaggaaaaaaaaatgtcaattgtaaatgtgaacatgatattgactttctgatacactctttaattaggcctgtttggaatatgagtgcatttattattcagtatatattattactatattagtgttgtgattgtttagaatattgctattttgtgttgcaagatagtataaaatgtgtaaaccattttctaaaatagaatgaatgaaaatagaattgtcatttctctctgtttcttcaaattcctcttc

SEQ ID NO: 379676 - DNA, 1422 bp, Cannabis indica
ataaaatttcatgtgcagattaagacttgctaaatcaagcaaacctaaaattatttatctcaacaaaaatagtattattataataagtataagattttgtatatatagttaactacaatgagactaataattagtaaataaaataatgtgaattttttttttccatatatatatgtatcactctcatgctacaaaccaaaaacttatcacatctggtagttagatgtaaaggattatatgtttataatatgtgactatttggccaaatcaagttaacttcagagcttagatttatataacaagagtactagtgaggtgattaaaaacttttcccttaatttgaagaagacgaagaagaaagaaacattatccattactgtaacccagattaaaaccaaagcaaaacttacatgaactcttatactcttcacttgctgtgattctgaaattagctagagatggcagcttaaaatggtggtttccgaaattgcaccgaagagaagcaaggatatagggttttctaatttacacactagtgatgatgatatgtatgcagttgacctctaattttggtataaaatgatcagcaaactcatgaaccattggaactcccaattggggttcttatttaagtctggattttgtgtttcagttctacaaccaatttgaattctgaaagaataaactgtttgaaagaagcatggttgagaaaaggaaaagatgccggaattcaaccgaccatgctctccatcgaaagataaagcaaaggccactacgcctccacgtggcatatctctcactttcgtctcaaatataattaatacatatgtatttacacacatagctgctatggaatatgcataaatatttatatatataattatatatgtaaaatgttaggttgggtgtgtttaataatttatattttatctatgagcttaccagatacattttctttaaaaaaaaattatgaatggtttattgtactgatgattaaatttaacacgtgttattcgcgtctgctttattttgtttttaatataattattttgaaattagttttcaataatataaattgtttagaatttctagaaaataggtgaattatttaccatatatatagaaggttacataaaagatattaacaaataattttttaggtgctaaaactagagcatgcctctactctacaaatagaagttattatactcatccttctaaaaagaaactcaataattatatattttattattataattttactcctacaaataaataaggctaattagtaattttttctcccgaacttggacatgtactaaatcgtgtcctgaacttttttggccgttgaatattcttccagtagtgagattgttaaatttaaggactttttatctaattttagtacaaaaattctaacat

SEQ ID NO: 379677 - DNA, 1222 bp, Cannabis indica
agagagagggagagaacagcaacaacacacagagacagaattagagtgatattacagatatcaccagtcaaatactcgacagcagagaataagaaatgactcaaagcaaagacaaggaggttctaagtatgcaagtttaagaatgatgaatagagaaagcacctgatctgatttggtgaataaggaagctaaattgtgaagctggttcttgctaacattgaaacacttgtgcgagattgatgtgttatcctggcacgtggtcagaatcttcactttctcctccaaagtcttgtaatccaaactcaacaaaaaccaaatgctcccaatcgctacgaacccaaaaagccagaaaaacaaaagctttctggtccattttctcaaacaatttggccccaacaaagtctcctttgccttcttcacccttaaattagctggtaatctaccattcaggccagaaagcttgcaattaagagacatactaaccaaaacccacctatttatctttacaaatattctcgaaagcttaaagaacgttcctttttcagcagagcaactcatcaaaatttgacccccaagagcaaacccaactgagaaaaatcaacaatgaactgggattgaatagaacatggcaaaaaatctgagcaaacccagttcatcgaactcaaacaaaatcaatgcttatctgcaaacaagaccaacttaatcattgaagaagaagaagaagtctaagagaaaaagtaaatgggatatcttttatctttctacacttgactaaagttcccttctttgaagctagtttgaactcaccaaacttcactttcatgttagcctttaaccaaggccaaacactaaatatcaatggaagccagaacaagaaaaagctgaacccaacccttgttttatctcagtatcctctgagcgaatcattaatgagatatgaggaaaactgaccctttcctatatctgactgcttcttctctcccacaaagaactgtacaattaaaaagtggtctcaaaggagtaacatttttttcattcatgggcaaccaatatcaggaaaaaaaaaaaaaaattggttgttttgatgtacgaccccagttttgttctttgcagagaggtactctcctactctagacccagttggtttctctagaattccaactggaatcaatgataaggtaaaaacaaaaataattaaattaaaataatatatatttaaaag

SEQ ID NO: 379678 - DNA, 6246 bp, Cannabis indica
gagtgctggtgtattatcttttagttatttcatgtcttgttgttcattgaattggttatgacaatgttgcagtttaaatccacggcttgttcgccgaaggctaagacatattgcccaaaggtaaattcttcccgattcgtataaagttagataattttcaggttatacaaacttactttattgacattatacaaaccatatgaatacaggggaactattattcacaagaaatacttttatggctcggtatcgctgcttccattgacaagtgctttcactgtaagtatgttcaaacttcaaagtcctggttgcctcttcttattcttttcttttttctcttctattttcaattgtatacttttggaagcatctgctcttgtatgctgaattttcttcaaacacttagtgaaattaagtatattctgattcttacttagtgctatctctgatcttcttgcagatcttaccactacctaacgttccattcttctgggttttgttccgcacttactctcattggcgtgcactccaggtatttaatgttattagacatggaaaaacatgaagcatgtttagttgagattttttcctaagctatagaatgttactactgcttcttgtaaaatgctattcaagagttctatattcatctatagtttgaatcatgtgcggaatgaggattgatgttatctgttatataatgtcattagggtattataatctatgtgagatatcatacaagtgtgatcctctgtttatgttgtacccttacttaactgttttggttagctttgcccccaatcattgatgtatgtatcatacatgccattgggcttttcctagtaatgtttggcggcctttccatgcactaaaactcgcctatttaattttctgtttggtttgtctatattgatgttacagggaagtgaacagctccttcagttagtctcagatagatctcagatgttgagtatcacctctgttgatggagaggacaagtctaatgagcatgctacaaaatggtcacataactctccatgggtcagttgctctttttatgatccctaatgtttacaactgaatcatattcgcttagtatttcaagactgaaaaggggacaaacctattgaaactttccacaaaaggagcccttgaaattgaaacagatcgatgcacgctcacttgactttgatatcatttcttatgttatggattaatttggggttgcacattaatgcttggtttcttaaatttattaggtgttgcggccatcaaaggaacttgaagaacttgttcaacgtgattatggtgatgatgggctaagtaaatctgctatttcaaatatttgcatcaagtttgatttgaatccaaatgatgttctaaagtacagggattcaatgtagtttacttcgttgccattttaaatgttcattttctttttctcttttcttataaagacttgtggataattgtgatatggatggttagtacgtagtgtttaaaaaataataagaaggtaactaagggtcaaaagaccgaagttggagatggagaaacttttgtggtttgatgtttaaatttgggctgaggtaaagagagagttggaaacgatttggtgatttctggtcgtttgattcggaccaacgataataatttgatcaagagtgaaaaccaaacggagaatagctagagtaaaatttcccactcaaattcactatctttttaatccatgtttgtggtttaacttaatctaacttgataaagaaggtgtaagattgatgatctaaatcaggttttttaacaggatcttcatctgagtcaggttttgccttaaaagaaaaaaaaaccccttcagaatgaaacgacaaactttttcttggaggggataacaagaaataaaggacttacattcagaaaatatgtatattcattgaaatgtctaaagttatgaatattatgactaaattgatgagttgaattgaggctgaagtctacctaacaaacttaaatgtggcattgtggctagctaggtgagtaagtaattcctaaataatttattgagttagatcattgagtatgaatttgggcgtcccattgtaggtggatgacccacctcaaacgattttggcgaacatttttgggcagtgttggagtggtcattcatagttacaccggagagaagagttacatctagtagcactcttattttattctatatttctgatcagaaaacaaaactccataattatatttgaaagttaaattttagtgagaagaaaaaattaagaaaaataaagcgaacaaaaagtgtaaagaacaaaaaaaatattaattttttgtgtttgatataaaaatatttgttgaatcaaatctttttgtgttagaatttaagtgtataattgaggtgcatgagattctatctcaaaactaattacttatgagataagtaatttatgcatcttatttattctattttatttccacacattagtaatgtgacactctataacactcccaaaatggtagctattctttgttcaccattttagacagctcgattacaagttgttcttttttatctcactattcgcgaattaccagtgactcttttggctctatttttcagatcgttttttctgtttatctttttgactcactatccccgaatcacaagtgatttttttgactatattttttgtatcaattttttagatttttggtggcttttttttggctcactttttttttttaatcggatcgttagaggtttttgtttttattctaataccatgttacaatttaaaagtgtatacttaaggtgcatgtgatttcatctcaaaatcaaatagtttaggatgaagctagaaataaaatcaataactatttatgggacgttgccttatagttatactaaatatcattatcatgttgtataatagcaatgcttatttttatattacgtaaatttcaacatttaaaataatacataattatattcaaataacttttagtttaataacattttacattaattgctagatttaaattctaacagtcatgcaaaaaaataaaagtataaagttttaaacttgtgactactttaaattttaaatataattttatcactacacaaaataataatataattttaaatataaacttcaaataacttagaattgagtaaaattttaaataaagtgattgccctatttcaatttcatgtagcttcgtccattcctccaaaaaaaaaaaaaaactatgaaaatgcaaccttcccgtaaatatgttgtttaattggaattgggatgatttaaattgaaataaaaacgatataaaataataatacaaacgacagagtaaccttatagcaaagagaggaacgacatcgtttcgttatctatataaagggcgagagtaagcaatgcagaagtaaaataagctactttcctcacatagttttctttagtaagaagaaaaggcaagtgaaccagatattcgatggcgcctgaaccagaagacgacttcaaggacgagaagaaccctaggcctctcgatgaggatgatatcgctctcctcaagacctatgtaaggcttctcctccgcccattctttccaacttcctcttttattcccattttttttttctttctagggtttcgtttcatttaatttaatttttgatttccatttccctcttaatattgccaacggaaacactataatcagttggataccagtagattacctatataatttatggacctaggtttctattgcgtttttgccccagttcttggatctgaattgttattaatataatttcaagttgtttgcgtgattggaaatgaaatggtgattaggtcaagcactagaaagatgatctgttttgcttcgtgaaaattgcgattatgttgtattgcattttaaaccttttcaatttatctctatggttacgaggtttttcccgttggtctgtggtatctagttgctgcgcttcactgtaattttatgtaatttctaagattttgtcgggctatcttaacttggttcctgttgctgattaaggtttccctttgctacttttaattgctattagtagttgatttagtgttttggaatacgagatgaactttgatagattctacaaatcatcgttctttattttccatgaactgtgtacatggaatgaataaaatttatgctatcactttcctccaatttgagcttcatcttgtgcacatggcatggataaaaatttatgctatcactttcgatgttcaccatcaagaggggttgcagcattccctgcattgatttgtgatccgattagatatcagtgcactttttcttcctgttatatattatatgccttttcttttcgcctgacaacaattatcatgacccttatcttcttcttagctcgctatctaatttcattgactgtgcagggtttaggaccttactcgacacttatcaagaaagcagaaaaggagataaaagatatggctaagaaggtcaatgatttatgtggtgagtactatattcttgtaacttgtatctgcagtttatgaagtgatttctaatatttttctatgcatatgcttccttattactactacatctgaatgaccactgtttggccatgaaagctactttctgttgtttcattttagcatcaatgctcatgctatactttctcagttaagggtttaattatggctctattctcattacagggattaaagaatctgatactggcttagctgcacctagccagtgggatcttgtttctgataagcaaatgatgcaggaggagcaaccccttcaggtgctgtttttacgcatatatgtattttcagtgtatgtgattgtttgtataatggattctaagaatttgttgggatatcaatcaggtggcaagatgtacaaagataattaatccgaacaccgaagacgcaaaatatgtcataaatgttaagcaaattgcaaaggtacattgtttctctcaactgttatttgtaatttttattcaggcccttcttttttgagacttagtgcaaatccattaatctaagaggagtgttgatttctttcaaaatagtttcatttttgttccaaggactttagcatttggtatagtaacttgtttagtaatttgtattggtgtgcctgtttctgctgcattttattcatggtatatttcagaaccatctgaacaaaaatgtggattatattgggcgtgtctgttaattaaataactgccgatcttgttaagttctctgaggagttgattgattttggttaagtgttctcatagacagttcttgtctggttcaccatcatttgtaagatttgtttatatttaatatgtatttctattttcaaaattacagtttgttgttggtcttggtgacaaagtctccccaactgatatagaagaaggcatgcgtgttgggtaggttactttatttggtacaacagtaatatatttcatgcaacttctattgttattgtgtcaaacttttgacattgtgtccttactgcagagttgatcgaaacaaatatcagattcagattcccttgccgccaaaaattgatcccagtgtgaccatgatgactgttgaagagaagccagatgtgacttacaatgatgttggtggatgtaaggagcaaattgaaaaaatgagagaagtacgtctgccttatattaaatatgacccttatccatatttgttttccacatttttgagtgtgtgcgcgcttatttgttttcttttttatgctgtcatgttcaagatatatttagttgtctgtttgtaaagatagaatggaatatgtggtttccacattgctgattccagtttgtgttgtattaaatcaagcttatgcgtggttctttgtggaataaagaaacatggtatgtggttcctacagtgctgattccagttttttttaataggttgttgaactccctatgcttcatccagagaaatttgtgaagcttggaattgatcctcctaaaggtgttctctgttatggtccaccagggacgggtaaaacacttctagctagagctgtggctaatagaactgatgcttgtttcattcgtgtcattgggagtgaactagttcagaagtacgtcggagaaggagctcgaatggttcgtgagttatttcaggtcagaaagttgcaacatacagtcaatcagaagttgttttgcaattttttattttttacatttgtata

SEQ ID NO: 379679 - DNA, 1044 bp, Cannabis indica
ttatttttgtgtgttaaaatttgggaaacccgaaacctctcttttatctgttcatgtgtcttgggctcaattattgattcttcgtaagagtattcttaatgatattaataaggtgtgtagatcttttctttggagtggtttagcggctatatgtgactttgggcagaggtttgtaagcctaaatctcaaggaggtttaggcattagaaatataatttttatttggaacaccgctacaattgagaagcacgtttgtcatatggccaaagaaaacataacttttgggtgaagtgggtgcactcggtgtattttgttacgattattgtgcaagttaacgtatcaagtagtactcacataggtaatgtcgaactcaaataaattgaaattgattactactaaactataattatttttccatttagttgaaaaataatctttgagtgcaaataatcaagattcacataaaattaatgaaaacgattttgtttaaatatagatgaaaaattaaagatatgaatcgagttgtttcatttaccccattgtaaatgatattgactattcttcttcttcctatataatgacagattataaaaataatttaattttattttcagatcataacgttataaactatatatcatctattgaatctttgaggtagaagaacatataatttgtattgagtaataatctaaaaagtcacgcatactatgtgaatattctcgtttcacatcaaaatttgtgtttcttcaattagatcattcctaatattcaattctcaaatttcgtattaggatcatgaatcatgcataaggtgatcaagcttaaacatgtattatatattaaaacaaatgtgaacaaaccacaaacaaatatgaactgaaatgaacagaaaccgaccatcaaaccgaccagactgtaaccgaattttcggttccacgtcatcactaaatttggcggtcggtttcggtttaggtttttttgacatggcggtcggtttcggtttttgaaataaaaaaatagtttaaccaaaaaaccgtcaaaa

SEQ ID NO: 379680 - DNA, 2283 bp, Cannabis indica
atttttttaatataatttatattatttacggttttctcatcaaataaatcccactctcccatttcttttttacttcattttcttcttcttttttttagatggttattgtgtttagtgggcggttttaattttttttttccaaatttgtttacttttttggttttgaatcataagttttcctttaatttttcccatttttttgttgttcttctcctataaatattgcttttcatcattaagtatggttgttacccgattaacatcttcttctctagttgtaaaaaatcccctaaaaatacaaaccatgatcatcaatgggcacgaacaatttgaagggtcatcctcctagccctaattccccagttcctactaaaagaaaattagttgctggaacttcgaagaacaggaaatctaaacacccttgacctgttttggaaaattctaactctgattttgagttggagccagagtttttaaagtctcccaaagggtataaggtaatatctattgattttctattgttttagggttttttttttacaggttaattatattacagatttctctgtgtgtgatttatttattttttgcacgtttctttttgttaatcctcctattttttggttttgtgtttgtttgactgttgtcttgttgttgttgttgttgttttgtgaactcataggggaagggtaaatcccaagtgaagaatgttcaatcaaatgatatgtttgaggagatcattgggaaaagggttattgaggtgtgttgtttcattattttagttttagtgtttttaatgcttgatttgttattctttatgtttttgttttgttttagttttattttagtagttttttttattgtgtttttataggactgggaatgcaagtacagccgtttgaaatatgatcattctagagttataacctctggctattattctattattaatgatattaaaactattctcactgaaacccaattacaatgttttcaaaaactatgtttggtcgttttctccatattctagagcataatatctattttcaactcattcatgctttgctgttgagggaggttgaacgggcaaatgagttggaattttggatttctctgtaaggaaaatttctgaggtttagtgtcgagaaatttttgttaattaccagtttagattgtcatattggctctgacattttccactacaagcaggatgataatatgcttgttacacactgtttaaagggccataaaaattaccaagaatgctatccaaattgcttttatttttgacaattttaagaataatgatgatattgcagtcaagttggttgtgttatattttattcagtgctatttgttgggtggtcctcctgggaaggttgtttctttgaggaaatcgatgttgttaatagtggttgttacaacaattatgggtggggaaatgagtgttttgatatgataattcaataattgaagggtcagattgattctggtcttaggaaggttaagtggaaggaagaagatggtgcgtattataggttattgggttttctgttggcgttgcaattttgattttttgagtgttgtccctatgttattgggaaacttacattgtattcaaatattagcattctaaggcttcttaaatggcctgaaatgccaaagcaaaaactaccccagttgaagatggataatgtgaacaacctcgtctttaaccggtcgttgaaggaggtacttgtttatttttttttacaatttttctattgttgttttagagttatttttcctttagttaaattttttattcattttcatttttattttattcagtttcttcagtttgtctataatttttgtttttttttttgtagttaaaactgagaaacatttttccaatattgctggagagagtaagttcgaacttgcatgactatttcttgggtgacacgactttgaactttattgaggttaaaggtaaagacacacatggtccagaatctaagtcaatccccaagtcttatttgcaagctgaatatctgggtccatcttaatcaaatgctaatgagcatgtcacccgtgttgagtatgaggaattaaagaaagatatgtccgttgttattatccaacaacagattcttatgaatgcttttactgaaatgaacaagaaattggtcattcttattgaggtaatctttatgttttttttttgttttttatattgtttttggtagttttttttttttatattattttgattttcttacgaattttaattttattttt

SEQ ID NO: 379681 - DNA, 4610 bp, Cannabis indica
aaaaatatggcttctctttatggtcatattcttgacaaaataatagcgccattgttgtagtttagtttaatgaaatttaatcattttaaaaaaaaaaaaaacacttttttaaaaaataaaattattaataatttctaaaaaaacttgacaaaataatagcgccattgttggatttgtaaacagagagttcgttggaaagagcagctactgtgagaatggagaaaatggcagctctcactctcatcatactactcttctcctcttcttctttttctatttccatggccgaaaaaagtgaccatgtacaaggacaacaactgtattcttcctcaaatcccaattggcaaatccaaaatcaacgagtcatagatgtgaaaggaggcccagattctgtggtttgggtgattcagctctctgatctccacttcagtgttcaccacccagatagaggtctcgacttcaagaaatttgtgggtcctgctctttccatgatcaacccttctctggttctcatcactggtgatctcacaggtttctctttctttctttctttttttttttattgatctttcatgttttggctgatatagctttgtgggttgttcaattagttggtactctgatatggggtttcatctttcatgtcatagattaaggaattagattcttcttatgtctgactttatctggtgaaattttcatttttttcttaagaagcataacacagattactagtgtttttttgggcagagattaacctttcttaaggagttattcattcggttttggattgtgtgtttttttctgtttttttggagaaatttatgcttttttatatgctctcaactgatatatatgcataattggatttgacatttgaaagtaggtggcaattcatgttagcgtgtcagtgttgaattcttaaatttatcgaataactgcctacattacacaaacacaacccatgaaaagaaaattttataaaacacgaatacgattcggataaatttagtgttgtgttgtaagctaaaatgttgtttttattgtttcgtgtcattggagttcttaaatttattagatgactgacacaaacacgatctttgacactaaaaaataataaaacacggacatgaacacgattttctcataaatttcgtgtcgtgtaaaacccacaaaatgttgtattgtgacccagattgccacccctatttgagaggtgtttgtacatataacaggtcaacttatttggcttatgttttcattgctggatagagtactgttgcttgcttttccttatccttgtatagaaattataagcagtgtgttttgtatcgatatactcagtataaattagattatgattcccactagtctgtgatttgttaaaatatttggacttgtcctatcaaacattgtctaacttgttgttatttattatcttcactagatggcaagagcaaggattttttaacaatgaagctaaatgaggcggagtgggtggagtaccgggatgtaatggaagacgttgtgaaaaggagtaaacttgagaaaaacgtcttctttgacctcagagggaatcatgataactttggtgtacctatggctggtggttctttcgatttcttttcaaaatacagcattaatggacagctaggccggaagaaaaatgtcaacagtgtcaccctccaggaggtgagtttttgtctaaaatttctgattattttaaggtgcatttagtaaaccagtgcctctagtttctaaaactcaatgctgtcaatatttgtctttggtttttgcgaaaaggttaacagggtttactaggccagctcgaaaccaatgttttatgatgcaaaaagaaggatgctgtcaatatttgtcactaaattgttatacatctaaaaaaagtcttaaaatcaaagggtttgaagaatcactaactataaccacaacaattaatctgaattatttgctttcttattgcagatgggtttaaagtaatgatccaagtttgatagttgattttgattcatattttttgtaactgtacttgttttctcgatcgtacaggctgcagggcgaaaatatctctttgttggggtagacagcacgctgtcggttggtttacgaggtccaaccaatcttttcgggcatccaacagatgaactactaactgaattagatatggaactttctcaatgggattctcaatcaacaagaccggtaacaaaggttacctttgggcattttcctatttcattctcagcgttatctaattccgggaagagccttaaagatgtattcttgaatcattctgtatcagcttatatatgtggtcatctccatacagggtttggtaaaaatttgaagcgaaatcatcaatcgaatcaccattatttatcctcacataagttttttcagtttaacccacaccaagtatcttttgatagagtcagaaattgttcaattggagcctcgcccgtcaaagaattctgggagtgggagatgggtgactggaggaagagtagagccatgagaattttggccattgatagaggtcatgtttcttatcttgatattgactttaaatctggaagcaaagaaactattattttgccaacttttcctttagattcacgtttcatgtcaacatcttcgtcgcatcaaaactatgaatgcaaagctatcgtcccttcttcttacgagacagttagagcgcttgtgttttctgtttctccgattgtttcagttgtggctaagatatatgactcaagatctggaaatcttaatctgatcatggaaacaaatatgagcaagattgttgataacacttccaggggggatctttatattgccccatggaactatagagctttcgaggacccatctccggatagatattggttgcaaatagaggcaattgatctcaagggaaagtcaactttgactgatctcaggccattttctataaatggtcttaatgctaagatctcatggacttggttggaatttaaagtcatgggatgtcaatggactctcctgtatttcccattactgtggtctgctctgtgtttcatgctctccattctcattatcccgaaatctttgcttatcttttcaaataagcgtttcacttataagaaatttgtttctgataaaagcttcaaaaattgtataggatgggttctgcaggaactttcaatggttcatggagtatggtttggcatgttaggatacttattttaccttgtattgttcccatggttggttggaaaagtttttacagatgatgatattaggggatacatgacttacatgggttgggcagttaaatctgtcaatgggagtgagaaacatgaatatattggatttccagatgtaatggttgtagttattccccatattgtatttgtggtttttccttctattttggtcactggatttttggttgctgagaaagatatctatagggaacattatttatctgtaacaggaaagaaagatgacaatgatggtgaagaaaaatcaaaatcttgtgttggaatgcggtggctccgaaaatttcttttcgttgtttgcttggtaatcttatggatgcattttaaggtaaagcctcacctactaatctatacattatgtttacaatttttctgaaatgtgtggtttaatagagcatgttgttcaagtagttgtatatgttgatcgtaattattgtttcacttccaagtttgaataaattgacttctgataactttggtaggatttagtatgattaatagctatggtcttatctgtcattatatggttttccaaatgtagatatgttctatttcaatatttgtgcgatcgattcttaatttttatgaagattttggattttaatttttggttgcagagctgcatggcgcttgttaaagcgtatgagatgaatccaatccttcattttccagtatattgcttcataatccctctactgttgacttatgttgtctacaaaactagaaatgtatagcaacactaagtgtataagagcatgtgatcaagtacaattgtctgaaaaaaatcatataaccttacatgatattagtatttagatattattaaaattcttgtcttacccataagaattctttaagatatggtcattttgtcataagaattcttgagatatgttttgtttgtcattgaagtgtacatgacttatgtaaaagaattctcattaggtatgtatgaactaataatgatgtataaatattatgcagttatgtatgatacattagttttgggaaaaattcaacttttacaggattacacaatttaaatttatagtaacacaatgtgggactacaaagggttcacatttggtaggttttggcaaacacaatgaaaggtgttttggggctttatttttgagacacaaaacacttttgttcttgggcggttgatcactgataatatcatggtgactttgaaaatcatgaattatttgaagtagaagatgttggggaaaacggggcaaatggttgtgaaacttgatatgagtaaagcgtaagatgtattgccagcagagaaatcagctccaacaaaactaacaacagccgcaacaacaaagt

SEQ ID NO: 379682 - DNA, 5050 bp, Cannabis indica
gaaatttggaagttgtatatctgaagggtctatcacaggaatagccatatcaatatcttctgtcgagaacggaatgctgcaatgagaaaagtagaaaatttgtgttataaattcgccctttaattcagatattctagttgaagagtgcttaactactatacaaacgacaatttccgatctatcttacagtctaatttcacgaacgattcccaaagtcactctaattgcccaaaggttttctcagcattttaacaagttttaattcaattttctcagttaactgtattgttgtgaacattttgcgtaaaaattaagagtattctagcatcactcttccagacattatatttgcaactcctaaataaattgttgatagggccaaaaaaatttaccttaaatcatcgtcaagcaagaatgaattggaggtcagattctgattgtccttgtttaaaatctctctcatttcagcaaccacctggagaaataagacgattaatcttcaaaccaaaaaggaaaaactcaaatgaccaaatattgcaaaagaaaggaattgaaaatgcaacatgcctcatttgatacgctctgagttccatatttgtcatcccaatacatcgtacttatccgatagatttgtcgaactgtcagtttctgcatattcagaattcaatattaaagtctccaaataaataaattatacacaaaaatcaatgaaaagattaagtaccggacaaagatcctgtctaatctcatccaaagattttttcctcttctggtgtattacctacaagatgcaataaaaaagaccttaaccaatcatataaatatatatatatatatatttatatatatacatgaacaaaagaaaataaaaaggaagtgaatgcctttatataccagaaaaccaacagcttgtctaatatagttgagctcatgccacgaggttcctgcgaactaaacatagcaaaaacaaaatagagtaaatgtttcagatatctgttgggacatgccgagagaagtgcttttgaagtttacctcgtcccctgcattaactatccatttctctagttctgctagacccgactttacatattccccatttgaaaacgtacaacattctcgtcgcagcaacaaactatgaaaaaagagtttcactcagtatggtaatgctcttaatatataagagttaaagaaattgaaaggtataaaggaattggtataaaggaattgaactcttacctgttgaatagtgatatattaatgaaagagaaaacctgagtaaccagcttgcggatgaaaaaggaaggtacctgtatgacacaagttgttttgactcgtaaatacaaaaacataacaaggctcaaacattattattattaatcctctgactagcaaatctatattcatctgacaagtaacaagttttcttcctacatttcaaaaacaaattaatgaaaaacatgtatgaaaacactagaagaacaaagaaccaaaacagctcagaaaccttaaattctgatgatcattttagtcaccatttttaataaatatatgaaaagagtaataacactacaaacattacaactaacaaagtaaactgtaattactaggcatctttcggatcatcaataacatctaccgatgcagacattattaaataaaaagcaaatattagttgttacgtacgtgatttttacgtaattgatccataagagaatcaagaaacttgatgatgttgtcccactgattaccaggtgctgctgctggctgaggaccaccactactaggtgatttggatgactttccatgtactcgtgaattttttggcgccttaacaagtatcacaaaaacacaataatatcccatatcaagcttatatataatgaataaaaacaaagcagtaatttatcctactattccataaagaaaaaaaggaaataaagatagcattaaagtacaataaaaccaaattcctggcagttattatgtaaattatactgagcaagaaaacatacctgaatgcaaaagcccaacagtggagacaattctttcttcaaattgtcacgaattaagccaaaaatcttctctacgcaagcagtcaattgttgtttgaacagtatagctggataccttgcttcaaggtgtgttacaccatcgtcaaacccaaaatatttagaagaagattttaatccctgcaaaagtgaaactactaataagactggatacagatttcaaaaataacctcacaattacagagaaacaaccaaacaatgtcacaattgtgaagattttatctttctgactgatgagtaggaaaagagtataatctagtaaacgcaagagtaaattcactgtattacaacatttagagtaacagctttggtaactcacatgtccaatcctggccgccaacccagtagacccagcagaacgctgaggagttgccgtcaagaaaccatttgattttaaattcctttgaaggaggcatagaagtgcagatgcattggacagccaatagggcaacacagcgttctcatcaccaacctgttacagaagtgaaaagaaaaatttctagtaccccataatccaaattattgaaataaacttttaagtatatcaaaaactatttctcaaatctttttcatctctcactagctctgcataacatcttttttgaaggaaaaagaaaaaagaagatatttggttaccttcagagcctcatttattccttcaattatatagtcaaaaatggctgttcgttcagactcgaaggaacgccagtgaagaagacttttgtatatgatacaggctgccagtggctttccatctacaaaacccatatcttctttgatacaccttgaaaggaatatacaattctcctgcatattacatacattatagccgagggtgaacaatatttaatatgctcatcatattaaaatcaccaggtgctatcttcctaaggataatactataccaagaaaataggagagaaaaacaaaaaacactacagagaatattcaccagaccctgtaccaatattgtttcggcaaagtaatacgtaatatatatgactattttaggtgttaaatttgtttagagttgagttgtaattcatgactttgaatgttcttttatattaatataagatgcagaaaatagctttaaagttggataccatgggatgtttctctattctcattcaaaccaaagaaacaagaaaaaaaatcctttgaaatcaggaacaatacaatctcataaaatcctgaaaagcaaataaatagagaaaataaaagcctaactaacagatacattcagtttcaatgtgctagttttaaaatagtgaaagaaacaagaaaaaagacctgatgcttctcagcagctaattttggtcggcgtgattctgacaagctatgttgaagaggaacaataaccttcgtaggggtaggagactcctgcacacaatatattatattttataacgagaagaaacattttgggaactatgctcagctgtgaaaaaggaaaaaggctacaactcacaaatagtagcttccgatcagagtttgaaagagcaagtgcattagagtttttctggaaccaattcaaaaaagaaaacaaaacaaatcagaactgcagaatgttatgagtcattagcttttcaccatatgccaaaaccatagatgatattgaatcaacatacaaactaccttagtatccacatgcaaatgaaacccaaaattcataatcctaaattttcattagcaatgtttatcacaacttacctcagaatatgtccttgcaaaaccaggacgaatgctctttggagtggccaacgctttttgtcgcataatgtgattctcgccttctaaaagtgagactttctcttcaagactaacatttaaagagtagattattagatagttggttttctttttcacaatacattctgaattggaaaaaatcaaagtgcatttaaattttacattatagaatttttttaataagccagtttgttggttcagataattacgagtttaattcaagcttcttattgttttgctaatatctagtgcaatcgaattcaaattgaaaatgaaatacttcaataatttattcatttgatggcagaataccttttaacattctgctgaagctgtgagcacttctcttcgaactccttcaacttctgaatcatgtcactattgtccttttgcaccctgtgaagctcggtctccatatctgaattcttcttttccagagaattcaatgaactctgcacaaaacaatcagattagcatactcggcgctccccaccacttatccctctaaccaaaaagaaatgctattgatacaaaccctaaatagacaaaccataaataaatataaaataataatgaaaaacaaaatattgtacaaaagaaaatgacgcaccctcaataatgaattttcttttcttaattcggacattgttatgagttccctctccaatgcagatttctcctttgaagacaattctaactgattttggagcaccgcatttttgttgcactcattaattgtcgctaattttgctgcatctaactcaaggttcaaagtttccaccatcttctgaagtttcgaattttctattgacttggcatcttcattagaaacctgtccataaaacaattaccaaaacgaatgaaatttcataaaaagtttaaaagaaaaaaaaaattgcagagggcgataacactatatgtgcttgaattaaaaaaacgtcataacgccagctaaaattttgatacacaacattagtgtattggattcagtaaatgaaatagatagaaaatagtagggaacttttattgaaatagcaaaataacacgaacactcccaggatgtttgagagtcctagtacctctctcccaagcctaagcttaactacaataatccagacctaattatcccttccctttcctctccttaaatccctccaaactttcccgatataaacaaaatagaaatagaaaatacctcaaaacagaaacaaaataaatgaataatatca

SEQ ID NO: 379683 - DNA, 2699 bp, Cannabis indica
tttatttatacctttatatatttttactttattctcataaaatttatatattttttaatcctactaaatttgtattttttttttattttattactcacatatttttatttttatctcgatccatacaaattatatttttcattaaaactcttttcttaagaaaaaattgcccccaccaaaaagtgtggctagccccgccataactcctcaagtttggtggccatgtttactttctggtttactgctataaggttaatttgttataattttgagtaatttgcagcataaatatttaagtttaatttttcagttgtaaataaatatctaagtttaatttttagcggcaataattaataagttatatttctagaactctgtaggcacctagttgttaaatgtgaagtaaattactacgcgacaatccctgatatgacttgacatttaacggtctggtacctacagagtcttaaaaatataacttaagtattattaccataaaaaattaaacataagtatttatttataacaaaaaattattaaattcaaatatttatgctgcaaattactctataatctttaaatttctttagctttgtgcttattctaatagactttttttgtaaagactgtttagttttaatttgacattattaattatgaaattagattaataattatgatttatcattttatggagatttatttgaattcagtgtgtattatatttgctatatataaaattttatattttttttatgttttcgcatattgtgtgctcgacaatattagaacgcggtgtttgactattagattcacattttagtattttaatagtaccggggcaatatagataaacattgggaatattgagaatattcaaggtattaggtttgactaaaatacccctaaatggctatgagacttttggtgtgagtaagggggtaaaatggtcgtttttcctagaattcttttgtcctttagtggattttattaagttagaatattcagttttatcttaagtaatttagtagataaacatttaagatttatcattgatttaaaatagaaattagacaaaaaaacgtcattttccctctctaagtctttctctttctcgacctcccttgcaaccagttgaagctggggtttttcggcttcaattcatggtgttttagctggtgttgttaggatttttaattcaattcaaggcaaccaagttccctctcttttctctttagatttttaaggttttaagcttaggttttcatgcatttttgaagattagggtactgatgttgtaagctttgtttaataatgtttttatgggtattttacggttaattaagctgatctaagtggttgttgtcgtgtttgagcaaagtttaaatttaaagctcaaattgctttaatggtgtttttagtttctaaatttattgattgatgttattgcttgaacttgttgttgtctgtttaggaggtctagaaagtttggagacgtttggggttgatttgaattgtttagaaggaattttatgttttctgcactgaactggtcgaccggttcagtgggacctgtaagaaccggtcaacttgttggtccctaggaaaccccacagagctgaaattctggtttgggaatcgatctaccggttagggtattttagagaaccccaatttttcccgtttttgcaatatttaggatattgtcatgttattcatcgataggaaaacttttagtttcaagtttaagttcccaaaaagtgatttagcgtgtcactcaccagttttacaaataatgtgatttaggggcctgtaaatcgtcgagcagctgtttcactcaggttggccgtcacacctgaattcggaaacaagataagattattataatgatatgcatatgtgtttacatgtttagcgtacatgttagttaagcttgttagattacattataatagcaatatcaatatatttagtattatattgaatatcgataaatgtatattggcttatgtactactcgacagtatcacatcggtacgactagagtacgactagtgtaccaagtataggctgatattatggtcgatagtaccgtactacttgacaacatcacatggatacgactagagtatgactagcgtattgagtataggctgatattatggtcaatagtactattgtttgaacgttcttgactcagtatcgtgtaggacgcggggaggagttacggttaggagtatgggcacctaatcttaatcttgtttacatctatgttatgattatacttttcttactgagtctatcgactcacagatattatttgtatgtgtaggtaagggcaagactaaggttgagcagccatgagggtgagcggatgaagattgtacatgtcgaaacggttagacttggagcgtatgatctttgggacagcaggctgtattttaaaggttgctaggcgacaacttttgtattgaatatttggtaacccaattgtaaatattttaaatacgggattcctggttgtgtaaaagatatttatttgaggaatgctaattacaacctcttagtcaatctccacgtctgaaattacatgccaaaatatttttttttcatagtggtatttgttatagttacagtataatccttgtaaatttttgaacaatttcgaatagtttacagtttaccacgcgcgttcaaaa

SEQ ID NO: 379684 - DNA, 4082 bp, Cannabis indica
atacattgaaacacaatactaaaatttgatataagtctactacaaatctattttttataccaaatataacacaatttttacagcgaaattcatattttgaaagacgagttggtgcacatttacagagttagtgttgctcctatattggcagtattgaaataaatgttgaaagggttttgataattggatatgtggtaatttggtgtgtgattaaatgtataaaacaaaaaagaataaaataaatgttgttcaattgttacctaagttaatttagtagatacagattgtaaatactacatattttgcctttatgtctcatgttaaagtcattgtttttaatacacaaagaaaaaaaggaagaatatttacacatgctttgttttattctcatctcaacaaaacaaaacaacatactaactgctttgtctaatctcccaaatatttcttgatggaactctcctcatatttgtacctgtattaataaacaaaaatagaccaacataaataatgaaatgaaatgagtcaaaatgaaacaataataacaaaacttgctatgaaatacttcaatgaaaacataaatatgagcattcaacagaaccacaatcattatgagctatggaaacctaatccaaataagcttgtgaatgtttactaatgtaatgataaatttcttcatccatagaatgaatgttatatcatagaaaatgaaagaaaatatgaagctgatgatatacttccgtgaattgtgttgtactaatgaagaaacttcacaattatcctcccacatctatcctaactaaaaaatcgttaaagcaaagaagaaaattgaaaattacattaacacattattgagcaagcagcagctattactatgggcttgtttggagaatgtttttttgaaaagctctttcctaaaaagctacccgaagtagcttcatcccaatgagctttcttaattgaaaaactaaattatgaagacacctacccaatactgtggagttttttagcttttaaaagccgaaaactacttgtaaaagccgtagtatgtaattcctaacaatctatcctatcctatcctgtatctcagctaccatatgcgatatcagcaactacacaataatccatgttgcccttttataacacgggtctggcatgcttattaagggcatattaaattgataatctagaacaaattaatagactgtttgttgtgtattcaaagatagttaagaatgtccagcaatagcttaccagtgttccaaggggagtgtgtaatattttccggtacttggttccactgcaattaggctttgaagtcgagtcactgttaagctatccatatctagtttgttactgtcgagttcctattgatttgttatgcacagcaaggaaacactttaactttcaacaatcaacctcttctgcagtctcttctcttgattagaaaggtccttgtacaaattgcttagatgcttagctaacctgtattcatcacttcctgaatggacaaccttcaattcatctctacttccattgttccttttcctttcctgagataaaagtgagaggcttagtattgaagctcgaagagaatcattcactttcattgtttcggtcattacccatggcctcccacttaaagacacaataatatgatctggattactcagaaagttacataacttctcaaagtgactttgggtatccaacataatacagactcgagtacaaacatctgatgacaaactaggaaaaagaaacgcttgagatgcgaccgacaccttttcctttatgaactccatgatttcgatatgggtcaagtctttgtcaattatcaacaaaaatcaaatagtttttgactcctccaatgtcaatgtcttgcccactcttttcacaaggacgaccaatagcccatttggataacaaggtatcactcaaaatccactcggtgaactttgtttcctgctttaaatggtgagaaaaactaagattgtgtgaaattttcatcattgggggttccccatgattattgtgagtgacacctctggtgacttgatgattagatctgcaagaaccagttttgagtttcgccttcaccttacttaaaaaagaagctacaaccgaatctatttcgtccctatgatgaactctgcaaatttgttcaagtctttcagcagtaatgtatccagccaatggaccatgtagccaggatagaataaaagagcacaaacactcttcttctccatttgcaaaagaatgttcacaatgatccacctcttcaacaattgcgtcgtagaagcgaatgtcatcagtcttgaagtgatgtgaagcggacacaagcaaaccccgggcaaccaaggagcactcagagtcttgaagctgagaagatacgggtctaaacctagaagcgaagtctttaaaatgatcttggtccttgaactcagctgttcggaaaatgctgtccccatcatcagggaaattgcagtacttgattcttagaacgtcactgtaatccccttccaccagaacccgaacagtgtaccatgcatcatccgggtacgaccggaactccaaccgggcatcttcaacgtcagccattcttccattattgtcgagtttcttgtctggagtttcatttattgcgtccttcaactgtttttccccagtaaatccaatgcattatgatttgcaacaccaccataagtgtgaaaaaaaattccaaaaactttattattgaaaaagcatttacctctgtcagcttcctctttcttttatcaccacttctcattgaatctgaagtggatgccatcctccctattcaacaacaaattgaataaccaatttcaaccttatgactggtatgaatgtaaatttttttaagcaacattaactagtcaccaaattcttaaatatagattcgttgaaattagtatttatctacaatcgagcatacaaattcccctgcccccactacttagtgcttaacataaaattaccctcaatttttttagggcattaggcatttagttttacatcaaatttcatttaaattctcaaaaagggtataagtctaccaactcataatgatatatttatataagcatcctccatatgtggtgtttcccttactaaatattacccccatcccctccataaaacctagtaactagttatatcaacatacatttctttgacaacaaatcaagtaacgaagatcttcatgtagaatttccgttgttaattatatacataataatgaaacttataaaaattaccttcttccattagtagagcactttcttacaatccaccacgatccaaaattcttagccagccaaaaaaaaaaaaaaccagaacacaaatgagatgattaaataaagcaaagcgagagaagagtagtagttaataatgagaaaaccgaaacagaagacaaatatttttatatgaatttgagaaagagccctccctttgagagagattaaaacaagaaagacaaagaaagaagtggaaccaaccctaaatagagattggtatttttgaattagctgcggagcgaggcaggtgtgagcttttcgaacatcattcttgcttgttttgtttgagttttgttggattaggatattttttggtatcttgcttatgtgaggaaaggattctttgttgcttttgtttgttacgctatgtattgcctcctatttctcaatatatttatttgtgcgttgtgtaagattagtatttggagaccacctatgtttgtttacttatgctctttgttgtacatcgatcggtttggtcggattataatgtatttttattaactcaatatgaatatcggattgcaaatatttaattgtaacccgtccaataaaaaaataaaaaaaatacaacttgtccaatgattttgatcggattaacccgtttaaattgatttttattattttttttcattattattagtttttagtgttcaaataattgatttggaaaaataaatgtataatatacaccttttaagattaaaatagttatagtttaaattaatgttaaaaaataaatataaattgaataaacattgaagtatt

SEQ ID NO: 379685 - DNA, 4300 bp, Cannabis indica
aaaaaagttgaaaaagtgaaaaagataataagtggttattgaagtctcctattataatgactttgactatcctatacccttcattatggccaagttgtacattaaatttcagtaaatggcaaagcaaaaaggaaagaataaataataattccaaaaccatataattaatttgttttgtttttattcaacttctaattcaaatttgccaaaaagttttggtctgctcagtcaaatttctaaaaacgtggctaaaaatcattatcagaaaaacaagatgactagttttgaatcaataagaacaaagaaaacccctttttttaaaaaattaaaataaataaataataataattgtcattgcttctattttgagtaataattaatacaacaaagaaactggtcaaacaagatttctgccaccaaaccattttctgttttctaaccaatgtgaatgtcacaaagaaaaataaataaatagacaattggttaatttttatgttcaaaaatacatgttgaaatattatttttattttttttttcatgatcacggtgtttgttatagttacaacatcatctctataaatttttacaaaattttaaattatttacaatataaaaaataaactgaaatattctatttctgatactgtaaactattcaaaattttaaaaaaaattataaaaataatattataactataacaaatattactttaaaaaaattaaaaaaaaattgcaaaatttacagattataattagcacttaacacacatttattattatatttttaataaaaaatacaaaataatgattatatatgataacatgtgtacatagtacttaataaagacaatctttaatatgatacacaacttgtggtatgtcacatctccatttgttaaatatacataataaaagattttggggtcattcacaatgtgattacaactaacatatatagtatatatatataatataaaataagatataatcttgatttaattatacaaaaacacagcttgggtaacctaagttagccataatttgaaaatttacaatatattatgattacaatacaatttttgaccatttatctagattgtaaccataatgataaaataatcattagaatacaatcttgatgaatagtcacaaaacaagactaaaccaaaaaaacaaacaacttgggttggtggaaatggaagattggcttattgggttaattaaaaactcacataaaaattaagaaaaaaaaaagaagaagaagattagcaaaagattgaatttttcttcttcttttctttctttttttgtgtatgaaaataagaattgtgattatggatttggggtgaaagcaaagttgatgaacctgtctctgtggtgatttgttgtggccatagcaaaaggctcaaactctatatctacaaaaacaacatctctctctctctctctctcactcggtttcgaattcgaaggtggaaagaaccacatttcttctttctacttgttcttttttttgtgttccttcttatctttctatatattgtgttgaatcgcaaagaaacccgaaaaaaaaatttaaaataaactaaaaaatgcattcttttttatacacgatcgatcaaaatccctcgacactggtcctcctgacagttgacgacgatgatttcctactttcctgtcgatccagctcctctaacgagatggttgaggaacaagcgcgcggtggaagcgaagagggcaagatcaacctccttgtgggcgaaatagatggcctggctcgagaaggtggcgacggggagaaacttaatctgggagccggtgtaatgattccatttagacttggtgatttcgacattagttttccagcaaatgttaccggctcttgtaagggaaaccgataagagtacttgaggtcttgtattagcttgagatgatccactacagttctcatggttggtctttcggatggatctttctgaagacatctttgtgcaatgtctgctactgttcttgctgctttggaggggaaccggctttttagctgaggatccataatcaacgaaagacgatggtcgtcagctaagaaaggccgactccacttcactaagtttctttcctcctttggatgacggctatcatgattcctccgccctgtgagtaactccaaaaggacaattccaaaacaccaaacgttgcttttcggggtgagcattcctttctctaatgtctcaacagaaagatttgctacagcctgtatatgaaaacataagatgaaaatcaatcaatctttccaatttcgaaagcgatatgcattcattcaacctaatcagtaaagagagtataagaaaacttacaactgaattagtagaaatctcggtctcgggaatatgaccaacacaaccatatccagacagctttgcactaaaatctttgtcaatttgtatactaccagttgaaaattcattgtacattgcctgtagattcaacatgtatgattcatgttaagcaaagattgaaacttttttgcatagcttgaaattatcgagcggggtccataaagggttattatctcaataaagtaaagggaaatgctttaactttttttaacagtcaaccctaagaaatgcattatgaacaaacaacactcgattttcattcgtttcgtgagaaaaaatgcaacataaagttaaagttttttgattacctggaaaggcccttcttcgtgcaagaaagtaagaccttgtgcagcacataaagcaattttcattcttgtattccaatcaataggtggcccatctggtctaccatagagtaggcggtccaagcttccatggaaaagcctctcatagactagcattctttgatctgaaccctcacgtgcatgaaaaccgagcaatttgcagaggtttggatgttgcaaagatgaaagagtattcacctcgtttatgaactcctttaaaccctgaaaaaacacagagcaattgactacattgtaagacaccattaaaccagcatagcgaaaaatctatggtaatctcatttcggggaattagccaaactaaccgcattgaatttacactgtgcgaccaaacatgattattttgctaataaaaagtttcataatgactaactatgcctttctttaaattcaagcaatgtgtttagctacattttcactaatcatgatatcaaagattgtacaatgaaatgtgagttacctgaggtgaaggatgaagccgagtaaccgtagcttcaaatcgtttcgagctagaagcatcatcaccaaatgaagccttgtaaatgactgaagaaagaccttcagacatacatctatctgaagagaaattatgacaagcagataatatttcatcatactgaaaattcctaagtgttcccgttgctgcagttggaggcaatggcaacggtccactagcattcatcgatttgaaactcgagcttccaaagcttctcattgcagcaggagcagcagcagcagcctgtggcgatgggagcgggagaggttgaggactcggggagcgttgttgttgttgttctttagtggatccaatcctgtacttcaattcttcagcttcttcatactccattgcagctaaagcatcttgttcagctgcatcaagtgttgatggagcagacaatgctcgagctcgagtattggtgattctactaacagggtgaattggctttactcttgtcctaaaactagggggagcagactgtagagttcgggtttggacttttggttcaggtaatatagttggggcttgttctttaagattgtttggtttaatgtaaacaggctgttcatatctctttttcttactctttagaactgtgaaacaacccatgttttgattatgaaatctaataatatcaatctgcaaacaaatcaaaaacaacatagtatatgtattagttgatgaacttgtacaaatgatcactttaggaaaacaagaactgagaattgtgataattcaacatagtaaagaatcaaaatttctgcaaaacccaattggctaaaacaacaagaatcaaagtgaaataacattatatatttaatatcaaattaagaggtttaaattaaggaatattcatactaataacccaactagactagcaaccaaaccttagaacataatattatttattaaaaaatttaatcaattagcctaataaattgacttatatcactacaaaatggaaaaaataaaaattggataggtatggcaaccatataataaaaattatatatttatatgtaatcatttaattttttttttttt

SEQ ID NO: 379686 - DNA, 3460 bp, Cannabis indica
tttttttttttttattttgccaagtgattggtatatttagacagaaaacaaagcttttggagccatcaaattcacaagggtacagagtcttatttcctactattttccattctattgaacaagtcaaagactggttcctttgcttatgacactgcagattttatgaacttaaacaagagcactggttcctattatcaaatgtttagctagaatccataacaatataattctggtcagaatttcttaagtatctttcattaacctcaagaggttccttcaagaccatttcttgtacatttgatacttgcagaaatagtggataagctgatttatcatccgcagtaaattgagccatatttttcaaatcttttcctcaatttagacttaacaagaactcaacctcgactgagtttacacatgaaggattttagctctgatatctctacttagacttgttttgtagcaaaagagaatagtttgatctcctaacttgagattccttgccttagaacggcaagagtataatgtgtaccaagatgagacaccagcacaagacactaaaattgaactttgttaataagtcaacagtttcgtttctatgatgtttctaactttgtttcgggaccccaagagagaaacttttgtctatgtttgctctatattttaacttatgtaagattttttatcggaaaatattaggagggtaagtagttttctgttatgttatatatttaccaagttcttgatttgttttagacagtaaacttgactaaccttcaaatggtatagtctgattgtaaacctttccatacattgaactctggtttactctatttatagtattataatgattgtaacatagggaaagaaagaacagaataaaaacccttcaaattttccttttttactttgagcaaatacaactaatttccaagtgattaacaaacataattctattagactacaagttgattacattgaaattgcacatcccaaaagattactttgtccatctttggcacactgcatcataaacttctaatagaccatttaaccgattatactctgctatttaatcaatagagcaaaacccaaaagttcaatataaaaagtgtatatatataaatatttatatgaagacctccaatgagtaatgtgatcctaagttccacattgtcactttcttaattactgttgcggagggcagaaggtgatgacataacgagtagctctacacttattaaggctagtagaatcatcaaaagcataactataagcctttggacaaatagccttaaaaagatgagcaaagagtgttggcttgcaagtgtttggattggcatagtttccagtacaacagtacttagctgattgcatagccaagcaagcactcttacaccccacaacccttccaccactcctcacttccaaagcagaagggcaacaaacattcaaatccacttcacaagacgccactccacatccaaccccgccccctacaggcttcatcgaaacaggcaagttaaagccatccacaaggctgacatcatagaaatgaagtggtgaagatgaagaaccaagtgtcatttcaaccaccgtggcaggcggctccccaccactgcctcggcaatgcaattggtttgcacagtcaccagttatgcatgatcctttcccattgttgtcaaagttgcaaccctgcctaccccatatcctcccagaccatttctctgggacatcaagtactacttcctcaccacttcctaagtgaaaccctccatctttcggggtgggctgccccgcactgccaagcacaccaggccatatattctcattgcagttgtttactagaatcaattgtgctccatctgtaaaccacaagtaaatacaattaatgaatggttaaatcaaataaaaaaaaactcatagaagagttgtactgagaaaagaaactaacctgaaatgctcagagagattaacagaagaaaagggaagagaattgagtaagttgacattattgtgtcttattttcagacttgattgaatattaatgctgcatacttagtgatttcaaacacaactacaagccttttaagcaaatataattactattgagagtagccaaaagatgtattagattttgttattattattattattagtatccgtttctttatagtgatgtgataatttttacttttactttcatgacaaagggcatatatgctttccttctagtgcaggctttctttatatgagagcactaattaaacttcaatagaatcaatctttgaaaaaggactagaagataacaatattaaactgtaggtttgtccataaaaaggaaactaaagttactaaaaatcttttctgtatgaataaaagtggatatgcatatacaaataattatttgagtattgttgcaagtgggaagaaataggagtaggaggagtgagatgaaagaaatgatgtgattagaaacatgactttgtacctggaagtcatggtgtctaaaggtattcttgtggattagatttagtacaaactcattggagcttcacctggtaattttatgtgtatatatatttttttaattaatatctttttaatataatggagcgtgagtggtttaggaatattaatgattctagtttggctttaactgtctataaagttataagagtaatctagcttcataattgtacaagataaagttatttcagcaaacataatttttgtttgggtccctttgacacttagactcgactagactggataattttagtaaaaattggtaactaatccagttaataccagttttggattatttatttcatttagctgtgttggattatggatagaaaaaagaacattgttatagggtaccaagatgcttggcacttctaagacatgacgtcttataattggttagtgattgtttataatctttatgactttattaaattaaaataagtgagacgggatattgaattgtaccaacaacaacaataatcctcgggtactacacaccatgagtactctttataatctatgctgacattttttttttatttttaattttgtaaatatatttatttttaaaaggaatttaaatggaagaatgaaaacattatttatagatttattatcaaaatttcatttattaaaattaatgaaaatgtatattaagttataaactatcaaaattttaaaatgatattatttaaaaataaatacttttattataataaatataatatagtatcatagtatatttctttaaattattgcaaatattctatcaaaatattaataaaataatatttgtattaaattaataagatatttagggtggcgtttggtaacacttttttaatcagttttctgtttttaaaagtggaaaagtgaaaatatttttcaaaaacatgttctaaaaaattgtttttacttttcaattttataa

SEQ ID NO: 379687 - DNA, 3523 bp, Cannabis indica
aaaaaaataaaaaaaaaaatggcggcggctttgccttctttgggtcttggggttcacttcaataacagttgtagttccaggaactttactattcccctctcaactggggctctggcgaaggggtttggtactaatcactactacattattcctaagaagaggtatgctaatataatatgttgttgtgttgattttgtaaaaaaaaaaacataaattattgttctttcttgtgtttgtggaaaagggtttcattgaatttgttctgactttagtttgctgatttgggttcttttccatttaaattatttcctgtttggtctgtttcttgtggttgtcaaaatatcaataggttcttaagcttaattcattaatcttaaaggtggtggatgattttgatattatatagttaattatcttaactatatatagtttcttattgtattttatatgattgcccttttattgtatagtactttagtgtttatgatgaattcataagtaaatctgtgatgaaattaagtaaatctttggtaaatgatgttaatttactactagctccaaaatctgaccagagccatgatttgttggtgttgagaaaatgtgaaaaatctaatacggctatgagtacattctgttaagaaaaaaaaagtagttttactgatttgaagtcctattgatgccattctttttggtttaagttatttgtcatctttcacagacatttatcttcatcaacaatatttgttccaagagcatcatcttctgcagctcttgaggtagttctcaactctaattatgttactagtcatttttgctaatcatctttgagagtgattgggtcaaacttactgtctttatggctgtttgtatgcttggttggttggtttacattgaaaacaggatggaaatagtgacactgatacaattccaatccccaaagttataattgatcaagactctgatcctgatgcaactgtggtggagataacctttggtgatcggcttggggcgcttcttgatactgtataaaacacattactttacctctttcttttgtttccaatactttcctccattatggatattctcttttgtaattggatgctgtgaaaatcttttcttttacccctttttggtaatgtattcattattagcaagttctaatatagtactgttgtccacaaatgggttgcagatgagtgcactcaaaaatcttggcttgaatgttgccaaagccaatgtctttctggattcttctgggaaacacaatttgtttgccataacaaaagcgtgagtgacacttcatacttttaatggtgtttttttttttttatcttttaatttaatgttattctttgatatgaaatttttacgtttattcttatttgtctgcactgtgagttgttaattgtttctttcattcaacactcccttgaaaagttaaaggtttcttgtgcttctatggaaatttaaatatcgatttttgaatatctttcctatgcttgttttctttacaaggttgatttacctacttttcatagttgaattgtagctgttttgcttcacctactgatattcattgatgattataaggagaataacttcagagttagtttgctagttaaaatgggaagaccttatttcattgcacttttatgcgcttctttactgtaatagcggttcttggatttgattgacttggtggtggagcttgtttgcagtgatactggtagaaaagtagacgatcctgagatacttgaggcgattcgtttgaccattataaacaatctaattcagtatcacccggtatttgtttttaactcttgatcctcagatcatatttaattgagaacctccaccaggaatattttttttttttgtaagctttctcattggattgagttggtgaaccaggaatcaagttcccagttagcaatgggaacggcatttggggttgagccacctaaagaacaggtttttggacttctaattttccatttaaaacctattatcatcttcgatagtggattatctcttttacagaatcattttctttgaaagtttaagtagtcgacctgagactttttgtggactgagatttgattttatgtttacacttctgcctatcgtgtttttgtttggtaatgttgtgtgttcatatgtatttacgagctcaaatcacaacactttcgtataaattcaactgttcaagctagacatgttgttatctatcacattgatttgtagaaatatacgttgtttttccatcaatttacgaaaaaaatcctattccttttgtattcttcaagtgtaatgcattaaatcttgtttgtctacaaattgtagcagaatatttcatcttgtttgataatatttcacaagcgataatatggatgtatatatcaattgctgaaaggagcatgattatgttctattattgtctatactctaattaacaccttgtaattcctcagattgatgtggacatagcaactcacataagcatcagagatgacggcccaaaacgaaggtagtctttcccaatccttttattggtatgatgggggctcttgcaaccctacaccgtttcacaagacatcaataatgggtgtaatcttatttctaaatcataatacaccgatatcgcttcttataatataacgtcggtatctctgcagtttgctttacgtggagacagctgatcggcccggtctactggtggaccttgtaaggataataactgacatcaatgtttccgttgaatctggagaattcgacactgaggttctgtcctcgtctttctatgcagctcagattattctatgttttaccactcttaattttcatttcctaaactgtttttcacttgatgcagggattgttggcaaaggcatcttttcatgttagctacagggacaaggccttaattaagccactccaacaggtataattattaattagtaatagtgtttaatgacttatcagtttaaatcatttggattcaacaaattaaccccgttttgacacttttgacaggttcttgctaacagcttgagatacttcctaaggcgaccctcaaccgaagaggctagtttctaagctccctgcacacaacatttattaaacaccaaaagcttttaggtgggattttggtacttcccagaactaaaatgaggaaaaaggctgggaaagttgtttagaatgtttttccctgatagaataatgttatggaacttaaatttacttttaatcttcagtaacagtgtaaaatgatggcattattaaaattgttgtaataattaataaaccacccttacaataactaccattatctcttgccttgcctagaagagaagttaaagcaaaatatgtgcatgaacgaatcaaatgtctagtttgtacttttttatttttggtgtttaaatcgtacaccattgagttttcttcatatggtcatcaaactatgggtgattcagattaacacactttttatttagtacttcttaaagtttttttttttttt

SEQ ID NO: 379688 - DNA, 1145 bp, Cannabis indica
ttttcttttttttttattttctggtgcactttatagtttttagtagtttctgttaatggtttgatattttatttgtacttgggtactagaagtgaaaatggtttacatggaatatttgtatatatggaatatttctctttcatactctgccaaaagggtaataaaaagcaaccaatgcaatttgaccaatcatctactattgtttttttagactattaaggctgaagagctgttattttgacgtcttgtagaaattgtggattgaagtttatattagtttttactacaaaaggatgttttggttcctggtaagtttatgtcagtaaagttctgcttgagacatctgtttggttgattgggttaagaaatttcctcccaatgtgtattgtttggaaatttcacttattgatcccaatctcttaatgctcctttatgtctttcatttcatttgggaataaattattctgtttccgttacatcttttaatttgcagtttttgtgcttttacgttttgcttcttgttattttgttcctcctaaattttaatgatgtttacatacattgcctagatgatattgtcttatccattttactttaaaatgcacatttgtttttttagagtatttttattattattatttttatatgtatttctttattttcttgactgtatatttattttcttattacccactatctcgttaattactgctttatacttatttcttgtatttattttctttcttttattgcaggcttttgttctcaaataccttcttttcttcccagaagaaataggtaatgcagaacagaatctgtctgcttcaaggagattagctaatagtcaacttgttgcatcaaacgatttttcttctctttccgaagatgaaaaatcaaggtgattaaccttccatggttttctgtactgtatagctgttttaaatttagctaaatgtataataggtttaagaattatgttgcttcgctcatgcctgacgttttcaaccataattgatagaaatgttataaattgacattttcttttgtgtggatgtgtgtaataagatatattaatatctttcaaggacaaggaatgatttgtgtgtgtgtgtgtgtgtgtgtgtgtgtgtgtgtgtagtaaaaac

SEQ ID NO: 379689 - DNA, 2264 bp, Cannabis indica
actataccctcaattcccatattaatgaaaatttccctattgtaaatgtaactttaagtatttaatccgccagaagaaaaaacatgtagtatataagtgtatgaaattttaaacatcaagtatttatgccgcaaatactctatgtttgataggatttaacataaaagtagtgacggaagtaatgaaaatataacttaaggtatttaatccgtcgaaaacaaacctgtggtatttaagtgtataaaaccaaaaacttattatatttatgccgcaaatattcctactcacaataatatcattgttgattacaaatactaccattcaaaaaaaaaaaaaagaccatgtagtctactccaactccattaattatcattttttaatagtagtttcacaacttgcaattttaaaaccctattgccaatataaaataaattaataatcataataaaaacaacgtatctaaaagagatgaatttattatatatatactccaatacctcatgatatgtgccaaaaccaagaatcattttataatgagaaatttccgcataagcattaatacataaagtgatcgatcaaaagttttgtatgcctattgatgtacgtacgtaaagaaactagaataggaaatggcagagactttcttgacccctgttattgaaaaattacttgatctactaattactcaaccaatgattttgttgaaaggagtgcgcaaagaagtgaagagcttaaaagatgagctgaagatcattcagcctttcctaattgatgcagaaaagaaactttccaaaggagaacttggcgatgctgcaaaagaatggctcaaacagctgaaggaggtggctgaacgcgtagaagatgttgttgacgagtacctttaccattttgccaaacatgatcatcactacagtgaccgaggtttcctcacttccatccgaagagctggtgggtatgttagatccctcaaactacgccacgacttagcttctcagatccaagacattaacaagtctttgcaaaaagtcaaggagagaggtcaaagttatggtttgaggtcctccgatgaaggatcaagtagtagtaggagcataaatactaatgcatctgtcattgaccctcgattgggttctctgttcgttaacaaaaatgagcttgtgggaatggattcaatctccaccgaacttgtaaagagtttgattgatggcccgtcgacccgttcggtgatttcacttgtaggagaaggtggaattggtaagactactcttgctagaaatgtttacaatgctgagtacgtgagacaacactttgaatgctttgcttggataaccgtgtctcaatcgtacgacttggagaaggtcctatacaccatgaaaaatcagatatgcccaatgaaagaagagcatatagggagtatggaaggagtaatggatcttttgcgaaaacatttacaaacaatgagatacgtgattgtttttgatgatgtatgggattcagagttttggagctgtattaaacatgctctacctagttataacaataagggtgatagggtcattataacaactcgtaatactagaattgcgaatgatgctaatgatactccttttgatcaagttcaattcctcaaaacctggcctcctgagttggcttgggagttattttgtagaaaagcgttccgttttgagtttgaagcaagctgtccacaagagttagagcaattgtctcgtgagattataagcaaatgccatggtttgccacttgtcattgcggctgtagcaggtttattttccaaaaagcaaaagtcaaaattggaatgggaaagagtgcttgataatctcaattatgagttcgaaaaaaatcccaagcttacaaatgtgtcaaagattctatcgtttagttatgatgatctaccgtatcaccttaaatcttgttttttatactttggtatttttccacaagatagtattattttcgagaataaattatacaggctttggattgctgaagattttattaaatcaaggagagacaagacagaagaacaagttgctgaagaatacttaactgagctaatccatagaaatttggtttcatttgtggttgaaaatgggattaaaaggcgttgtcgagttcacgatttgatacatgatgttatcttaaccaaatacgaagagttgtgtttctgccaaataatcaatcaaagcaagtgttggaaatattgtgaatattttaacaaaatatataagtgtcttagtgtgtgt

SEQ ID NO: 379690 - DNA, 2773 bp, Cannabis indica
tttcttttagtgtttttaattgtttcctagttttaattttctctcaaattttatttagccatacagaagtaagaattttaattttaatgtacttaactacaatcctcatgcgatcgatctcactttttgtgagtattacttgttaaaacgacacgtatatttgagtgttgtaaattaccacaacaataatcgatttgagttatttcgtataatttgtttttatttattataacactgttatagaaccggttctattttaattataactagtttgagttatgtcgtgttatttatttttattcattatattacagaaccgtttatatctcaattataatcggtttgagttattttgtattgtttatttttattcattatgctatagaaccggttcctatcaattatattttgcttattttttaaaataatttatttatgtggctataaattatagatacaattagagtccaaaagtctatttaataactaacaatctaatttattaattattaaacaatattgttgtatatagattaaatgtaaaatactttatataagaagtcactctactcgtgactaattagtgttaaaatagaactctatgtttcttaacatgataaagacgagtagtttttttcagccttcggactccagagggggctgcatgtctttgtgtttcttttgaagtgatgagcgatgcagattgctaggtggcaggcagtcctgcgttgagcaagaaatgtgaattgtggaagactcgagagagactttttccatttatcttcttgttacagtatttagaccttaaacccaaactcaagttctcttcttgtttgattaagtgtatgttagtcgtggagacatctctttcgttgatgaagtagccaataatgctacaatgggtcaccttcggaatgatgtaattattcaatttaagggaagggtctctcctgtggtgcccatttctagaaataaattataacacgtgtctttagtcaaattttatacaacatactaatctaccaaatgtagatttgtgtgtgcatcaatataatctccttgtaaaagtggaaaatgcataccaacatacgtgttcccatttgtaaaactgaaattaatatgcttacctataattgcacatgaatatttcctatgcaaatactgatatttttataaataaaaaatatacttgaaaatttagtactcacactctaaattggttaaaaccatataaaggaggctctgtccaactggttttgttgctagatctcctcctaactctataaatagattagtattgctctaccaaactctgatatttctcaatattattgaattattggtagtgttgatgttttataaattttttagcatacaagtcaattatatcttctggtatgaaagaagaatagaaaattcaactctatgtagagttattgtttaaagaaattcaactctgtggagtgttgctattatttatatctaacaacctatccgcctaactaaatgactggtttaagtcctaaagattcctattcagtggatgatttcaatgtaggtacaagttacgaaggcagtgtcatgttaggttatcaaataaacactaaactagaaaatacataggacggaaaataattgtattgctggctggtatagagaagttttaagacaaaaagaccaatcgacacatgacattatatacatatcaatggacttctcacaagaatgtctgaaaaaaaaatctctaacatcaatcatactctatatggacatatctttggatggcaaactatacagaagaaaatcccccaaaagcgtgtagaatcaaaacaagagaagacacaaaataatgcagcagagaaggaagatggacactctgttaagcgatttgtcaagctggacttcatgccttctcaacctgggactgctactaacaccaatttgagggtaagaagggaacagactcgaacccgagcccccaaacatccttgcaaacaccatctctccaaaaactcccatggttggattgaacaagctagtcatcactgcaccacctagataagatgatgacatattgtttgcggcatgaactccataaggacgaggaaaatattgctggttaagtgatcttggattcgattggacataagttggatgatgaaggtgatgattctggtgcgatgtagtattaaatacattgtttaagccagaaggaagtggcctgcgtggtatgacaagatccaagtgaggtttcttggaatcagaatcagaacgagatgttccccggccatagaggggaatcagtgaggcgtgggaaatgttagccttgcagacagggcagttttgctgctcaggttcttcaaagtcattttggacattaagccacttgtaaatgcagggccaacagtagaggtgaccacatagagtgacgacaggctcgtttgcggaatctaaacatatgttgcactcaaagcacccgctttcatgatcagagattctggatgaggctggcataccccatttctgcttcatggaaatgtcttcattcgattccaagtgtgcctctggctcgtagaaattgtgtgccattgattctacagtctgtaaacaaaaagggtttagcacaaaagccttagataaaacaatttgcctagcatctaagaagtacgatgattaaaacataacccatgactcaaacatcaagttttgttgatagtttttagcaaaaacaaaaatccactggtagttagcataaaaaaaaaaaaaaaaaaaa

SEQ ID NO: 379691 - DNA, 4599 bp, Cannabis indica
cttcgcggtcattacaaaatatatcttcaagaatagtcaaaataaataatcgcccaaaccgattgtggacaaaagcccacttataaccatattatggaccataaaattataacttcttagagtattacaaaataaactcctaacaaaagaggaactgattctttgacaaaataaggaatagttctcaatttttcacctaagttccatgccgttgatagaattgatcactaccttagaatcactttcaaccaagataaacttgctgcctttattcttcgccacttctagagccaagcaagcaacgacaacttcacaacaaaatgcatctgaaaattgtaattttatcgtgttcacccaaactacctcactcaggtagtttctagctacaactgtaatacacatatattcgatccctacttttacatcacaattcaacttgcgccagtcttgagaaggagggcaccagctaacacagtgagttggagactcggaagggataactttccctttttgaaagttaagatgtactaattatttcttaccaaaataaataaaaattatttaggaagaaaaatctatgtctaataattagggtggttatctgatgtcatttaacatttgtattctatataatctaatcgaattagcatttgaattttaaaaatcatcatccaatcaaagtagcaatcagattagccagttttatttattagatttcaattttatatttatttaagttaattaggggtgttcattgaatcacatttaataaattcaaatctaattgattcaatcaaactatttattagctgttagattttgtctacttatctaatataatcaatttgaatcaactgatctaattacattcaatggatgcattgaattgaattggttctaaccattagatgccttaactagtttttttaattggattagattaattttattttcattatgaaaataatttatttggattcctcgtgaaaaattaagcaatttcagtttttacggaattcgatttcgataaaaaatgaaggagatatgaatgtttgaaaatagggtccataccaaagcctgacgacttctcgcgctcgaatttatacataaacattatttaaaacttaattatcatagtagtaaaacacaaacctaacatacattataaatagtagttaatttagtcttacctaattatcatgatgccataatcaaaatataacaacacaatacaaatctaatctaagcataagtcttaataaacaatttcaatacattaaatacaaatatcatctaaattatacaataaatcactcttgagctatcttttagaaaaataatatgtaatattttaaatttaggattttttatgtgatctcatgtgtgcaggtcaatattaagaataaaattaatttgtatatttattttaaacaaaataaataaatatataaaattaacaattatattttacaaatatataaatatataattggatgataatttgatcagtttggttcagttgttaaatattggatcaaatatctcattcaacaatcgatctaatccaattagatttttaaagtttacatctgatccaatccaattatgattggatcaatcagttgtgtttagttatagacttatttattgtatgtgaaagcaaaagaaattaatcaaagataaagaaaacaaaaattaggatttttaagtggttagggcgttcatgagccttagtccacgagtcaatattgttactttaaagctaaaaaatccttaaagtttacaagaatttatgaactctatttttttcctaaggaattgaggaatgagtttctaaccctttgcagaaagggttcttcatgtatttatagtgtgtagggttcatactcgttacctttttttccactactggagttacatattgactttgggcttatttagtgaagctcgattcatgaggtgcatgaagcatgttgatatggatgccacatcatattgatagttgtcaaaatcgtgtcctatctttgtggagaattaaagatacattagatgcttaattgctaactattatcttttcatatttaggaagatacaatctttagacgagatccttgggagctaattcttgatactcgagatatcataattaatgaggatacttctaagctggacatccagatactagctgttcacttctcgcaaatgtgctccctaatgtcttccagacgtatgccactctatatgggtctcttgcctacttatccggaaggactgactgcctatgggtccagtgtagtatctcacttgggcccactattgggtcttaagtatttagactatttttgttataggcattcaacgcgttcctatctagaacacggataacatttaccctggaagctttttgaactcaaggggttacgaaagcttgctcctttccactcggatggataagtggaggctaaagatgaaacctttaggaatttcgtattgatattgtttgtggttaacaacttttcattttttgaaatacagtgacatgtgcccttgtcttatcggattgtagagataacttttaatgaggaagcgcgtgtggtgagatttggtgaaatggtagttggttacatcagtgcaagtcttaagaaaaatatcatcatttggatattctcaatttgaaacactacattatatgcccgactatcaatttttcaaaactattggttccattttgtttttcctcaagcataacattggtcgttgaccttgaatcacacgaatcgccatctgtatgcataaatatgaggcaaataggtccgtttgtcacttttacccaaacttcaacttaagttcaaacttgcaatgaagagacggtgacaaacaagacaattttggagcgttacattgattattgaattcatattcttcttcaaatttgtgagcgagaggatccaagtgcaccaccacgcagtcctgattgctgattttttttctatcattgagaatactagatatcaacgctgagattgatgaacttattaatcaagttcatgcccttcaaactagggttgcttttcttgattgaccattcatatcaaatatttctctaacgccctcgtttgacgtcagtatttattctctaaggcctctatttccttcaaattcttcatcgctagccagttcttcaccaagaaagtttattcatttcacatttcttgaatcttggttaatgtttgaaactagtgttcttgttattgaagattgcatgtttcctgtgttttgttaataaatgggatttaggccttgggctgatattgattgtcttgtagaatagggagcttacattgtatctttactattgagtagattctaagactgtgaaaatttgaccctttctgatttttggtaaaaatagccaaattttagtagtaagattggataaatttatttcctttgttgggaacccttatggtttaggattatatttattttcctttcaattggccttttatgttcccaatttgatagttcaggttggatgctctttgagagtctttgattcccgatgtaaggtccggtggggacctttccaagcagttataggagaggactctctcgtgtccctactatcttctttagtattggtatctaattgcttggtgattttctttcttattcttttttagatcctatcatggtggatgtagactatcatgaggaaatcgaagttatggaggaggaagttacagatactaggatagtgtataacgcttcccactaggagatggacaagtatcaaaacaaattccaaaattacaaaaacctccaaaagtatgagatgaattgtggccttgaaagtgttcaaagcttattttggaatagattttctgtctagggagaatcaccctacaaatgcgcagatggtggtttcagcatctaaagttgggcccacgtggaaatgggaatgcatcttctgctcagaagctacttcatagaatttgacatggtagtaggtatatcaagataggattctgctatcttgagaggtattctaggtccttgatctgtccagtcagctcggtgcagcatactaatgatttttgagaatattggttctttgccccaggctttcgattgaagaggcgtccaaccctctctttagattttagtattgcaagtaagtgatgtcaaatgtctctattttgattctctcttcatcttctaggtataggttctaattatgacatttcttcctttttttacctctagatacaattacacgtccgccaactactcctttcatggagcttagacaaattttataccaaagtttttcacttgaggacttacgagtggaaaatattgtcactatgtccaagcttaggaaagttggtttgctggctccctatcagagcatcgatgcctttcatgtcaaagacctacttcacggtgacccttcagagcttaaataactaattatagagattgttgctaatgaagcatggatggccattaaaaaagaccaagaatggatggctaattgggtctgtaataccttagaattaagaagtggattagcaaaaccctaattagataattatg

SEQ ID NO: 379692 - DNA, 3148 bp, Cannabis indica
tttttatttttattttaataaaactcatatatggaatgttaaattttgtttattttcccaagtaggatcactattttttttttgctgaaagttagtagtatcacattggtcttgtatttcttgtttttgggatatctgatttatcttaaagttcaaatctttttttatatccattaagtgaattgaaaagaaattttgtgtttttttcccaggaaatgaagatgaagaattttgcatctagagttgtttggttcatcacagttattctggcattttcactacccatttctgaagggggttcttcaccttcctcctatatgattggtcttggaagctatgacataacagggccagctgcagatgtgaatatgatgggatatgctaatctagagcaaattgcatctggggttcacttcagattgcgtgctcgaacattcattgttgcagagccaaagggaaatcgtgtagtttttgttaatctcgatgcttgtatggcttcccaaattgttactatcaaagtacttgagagattaaaagcaaggtaaaagaaatttgatcatataatatggggatcattaccttttgtttctttcttgatgagtggtgttataatctttgtttcagatatggggatctttatacagaacaaaatgttgccattagtggtattcacactcatgctggccctggaggctatctccaatatgttgtgtacattgtaacatctcttgggtttgttcgtcagtcgtttgatgttattgttgatggaattgagaaaagtattgtacaagctcatgagaatcttcgatcaggatcaatatttgtgaacaaaggtaagtaataggaataatgatacaaacattggccaatgaattataataattacataggttatgaatctgtgatttgtattaagagttagtcccaaattgctaatgtgtggaaagataatagaatatataagaggaatgggctactcctcccattgtcaattggttttgagatggaaccccattcaccttatattccaaattctaacatagtatcagagcaacttgtgatcgtctaaaaaaaagccgtttgtgatccattgtgagccaaagtgtcgttcgttatactcacactttccacgcccaaacgtgaggagggtgtattaagagttagtccgaacctcatacatcttattcctcaaattctaataatttgtgaaggtgcatttcatctgtggatagatagtttagatttgacattgaaaggcatttttaatgttttcttgtattgtataacaggagagctcttagatgctggtgtgagccgaagtcctagttcttatctaaacaatcctgcagctgagcgaagtagatacaagtatgatgtagataaagagatgactttgataaagtttgttgatagttattggggcccagtaggtagctttaactggtttgcaactcatggaacttccatgagccgtacaaactcgttaataagcggcgataataaaggagctgcagctcgatttatggaggattggtttgaacagagaacttctaaaaatctgaacttcaatgagtcaggaattgatagtgtcccaagaagggtctcaagtttatttcaggattccaacatagatagtaagtgctctattccagtcaattttatggaatgtatggacttaacatgcctttatttctattgacaatggaaaatggtgtctccttcataacaagtatatattctttcaatacaggtaatgaattaatgaaacttgctgattcatttcagtcttcccaaggacaacctgtgacaaggcttttgagttcttctaagagggtaaggagtgctttaaggaagcctgacaggcctcaatttgtatctgcattttgccaatcgaattgtggtgatgtaagccccaatgttcttggtgcattttgcaacgatactggattgccatgtgattttgatcacagtacctgcaatggcaaaaatgaactatgctacggacgtggtccagggtacatacattcttttctggtttctagaaacttttccaagcatgttatttgttagtatactatttataaatggcttagaaaccatatttcatcttcattttgcagataccctgatgagttcgagagtactcggataattggagaaaggcaattcagaaaagcagtagagctttttgacaaagcaactgagaagctcaaaggaaagattagataccgtcatgcatacatagacttttccaaactaaagctttcaattcctcaagcaggagggagcgttaaggtagttgaaacatgcgctgctgcattgggctttgcatttgcagcaggaaccactgacgggccgggagcttttgatttcaagcaaggagatgatcaagtaaaatttttatggtgcttcatgtttgtgtcatctcatctttatataaatccatccttaatgatcaaatttgtttatattggttgtttttttagggaaatgccttctggagattggttagaaatgtgctgagaacaccaacacaagagcaaatcaaatgtcagcatccaaagcctgttcttcttgatactggggaaatgaagcaaccgtatgattgggctgttagtaacttattatctatttttttttcacctttatatgcaataacttttactatcatgaattgttacattctatttattgcatgcagaagctgtttatctacatttaatggttttattcttttgatcacgaaaagatttaacatagttaattagtagcgctttgaaatgatatttgttgcaatttatttgaatacgagggatttgatgttgctgctcaaacttatgtcatgaactgattttgcagccttcaatagttccagttcagattttgcagattgggcaacttgttattctgagtgtacctgcaggtacaagattacatatagcattagtaattcaaaacaatgtaatagaaatgaacactattataattgttagactaattaggatttttgcccttttaactttgacatgtaccaaatcatgcaacctgaacttttaatgtcgttataaatgccccctaaactattgagattgttttttaaggacttttgttcaattttagtaaaaaaaatctaacatgaatgaaagtt

SEQ ID NO: 379693 - DNA, 3879 bp, Cannabis indica
acacgaccctagacgcgcgtgaagatcggattttgaagactggaaattacaagagcaattaaagaaaggaaaacggaaaaataaacaaaaacttaaggcctgtgagaagggcgaaggagcaaatttttgagggaagattccaaaaaactgcctaaaaaaaaaaaaaaattggaagggtcaaatatcagggtgttggagggggaggagtgttgaatgcgcgctctgtcctctttgtttcatcgtccctgagcgaagcacttgaagccacataaaggagatttatatatatatatatagagagagagataaggaagcgaagaatccgatcgatcggagaatattcggttggacgggctcgttttgagttcggatcgggccaagtctgtaaggaagatgagtggatgggagagggttaggccttcgagaacaagactgggtcgaaattccaattcgagcatggaggaccgcgttccctctagtcgaacggttcggctcggccgagttcagcctcaggcgcctggtcaccggaccattttctgcaacgatcgcgaagccaatcttcccgtcaaattcagggtctctttccttttcataatattaatatatctgagagattaggcatggcgatagaactataggatgagttcattgcatttatatttattttattgtcatttctcattttcgttttacagaagaaatctggagtgaaaaaatggttattttatctcttattcgttttagacagagatttactgttaagtaagaaactcttacattaatgttttatttatttgctgtaaagccaaacgcttgatggaacaatgtcaaaagagggtgcaactgtatctgtttgagtagagttagattggacacatcccgtacgataattttcatgaggttcctatttgcccaactaggagaggctaatgagttagatgagttacggataagaaagtaaaaataagaatgaacgctcgatgcctagttttaaagtgattgtatttgttcctttgggtttgatcatgtgagttttgtaattaggtttattgttggatgaaatgcattgctgatattgacctctaaaaagaaacagttggtgtatccacgaacagctaaccacggcattgtaaaacttggttaaggctgtccattttcatttgggcctcttgaaaaggtctttctaaattcacaaagttattccaaagaatcaaagtggcaattattaatggaattctttctaggctctcattgtgatcttgaattttagcacaaacacagatctctaaatgggtagttgagtttagttgtatagcaactagagtgtgcattttattggtttttggtattttgatgatgagagtattcagcatctgtaactaataaaatttgagatttgactttactgtgttcactgttttctcattggcatttgaattcaattgtttaactttgtgttggttattttgcttcaactgtctcagggaaattctatatcaactaccaagtacaacttttttacttttttgccaaaaggactgtttgaacaggtaatttacttgaaggccttggccaatatgcaatagattaggtttgtagctattttcatattaccttgaatgttgttttagggtttggagcagcatttgctgttttattttagtaaaatagtcatgcatgctattattgtgtgagagtttgttgaagaaagttaggcgtgttttgttgtatagatgagctaattttgtataggttaatgattgcaaaagccttttgaaattcagctgtataatacttattcaaacaagtgtttgcggttcacttttggtgcagtctctagtctctgattttatattttggccatgtacctgataaatgttttgcttacactgacagttcagacgagtagctaatctttactttctcacaatctcaattttatcaacaacaccaatcaggtatgtaaagtgtaattgcttaaaatattagtttcaagattcattgacaaatttaattgatataaatttgtatgcctctatgtatataaagatcttatatttaataattcattgagatattgttggggggagtctttgaattatcacaatcttttgggtcagatttgagtgacaattgacttgcaataattagaaggacaaatgtgtcgaaagttggaaaatggtttaactattttttatgaaaagctctatttcagttaaattgctttataagattagtagaaaatctctaacactgtattacttattatatcaatagtggactctttgagccacaaatataatattgaactggtgtttgcgttttggattttgacacgattaataatccgggtgtgtttggtttagctgttaaattgagttagccttttaaagagaagaccattgatctgaactgccaactttgtatttatatatttatattttcttctactttttttcttttctttttgagcccgtttccacaattgtttttggttaaacttgtattgtggtttttcagcaataatgtatttcagatttatatgagccatattcgatttgtgactagattatgcacttaaaagtattttctattaatacagtcctgtgagtccaattacaaatgtgctccctttgagtttggtgcttttggtttctctgattaaagaagcattcgaggactgggtgagttctactcttattatatgctgtatttatctcaattaaactcgtgaatgcttttaggagaattttttggttgagaatgagggggatgttcttgggagtatggtttgatacttatatactacatactagatttctcactcttatcttatgttgtttttgtaaaatagaagtgtttctagaatcatacttctataaacaataattcttgggagtatagtttgatacttgaatactacatgctagatttctcatactcttatcttattttgctttcgtaaaacagaagcgtttccagaatgatatgtctataaacaacaatcctgtggaagtgttgcatgaccaaaagtgggagagtattccctggaaaaggttgcaggttggggacattgtaagggtgagtatgctctgaattatttatagtgtttttctgtaattagaaatattttatgtgtattttctcgaaatcctttgtcaggctttaatgtataagtagtcttatgccgtgttttggtttagtccttactaaaacgtttattatactagctttaaattgaaattgacattcgatggttgcagatcaagcaggacgggtattttcctgcagatctgctatttcttgctagcacaaatccagatggtgtttgctatattgaggttttgtttttgatgttttcttcgaggatttgtttgtttatttgtttatttgttttttcaataacgaagaaaaagttcagaaatgtgaagtattgctcctccatataagctgaaagattttattcttccttaaatttacttgcttgttgctctatttcagactgcaaatttggatggggaaaccaatttgaagatcagaaaggcactggaaaagacatgggattatttgactccagagaaggcatcggaatttaaaggttagcctttacttttctatcgcagtgagtgtccattcttattttttggcaatgcaaccagtctcagaaagggtcaaaggattaaacttagtattcacttgtggggtgtttttgtatgaggtaatcctttcgacatttccatgttctgtatgagatttttcttcttttaagccctgaaaaattaatacagtgaaaataagattaatccataaataggtagtgttaaatccttctaaaagacattaatcataaaactgcgagtcacattataattagtatta

SEQ ID NO: 379694 - DNA, 2306 bp, Cannabis indica
caacacacacgcactcttctatgccaacttgagcatagcctcaagtgcttatgtaagattaggaaatggttgttgtgttgagaaaggaagaagaaagacttaaattttcttatataattgtgtactagttatagtagacatttcacatatttaaaaaaaatttagaagaacttatagtgttaaaaatgaatatgtgtgcaactgaatattaaaattttgttttcgacatcataaattattcaaaaattgataagatatataaaaattaagttatatggaacaaaataagtagtagctattatgtcttatatatattagttaatactctatatttcagctgattatatattgtaatttgtaatataaaatttccatgcataatctattttatatatatttatatatatatatatatatgacagatgaaaagattgattgaatctcattttgaagaagctaaatggttgaaccaaagatatttcccaagctttgatgagcatatgagagtatcctatgtttcttgtggtaacacaatgttgatatccacaagttttgttggaatggataatgatattgtaacaaatcaaactcttcaatggctttccaatgaccctaaaattgtgaaagcttccactctcctttccagattcatggatgatataggttctcgaaaggtacaaatataattaattaaattatatattctttataattataattaatttatgtaaatttctttaaaaagtaaaatagtttgaatataaccctgtttgttttgaattaatttagaagtattaaaacaagggtagatacgagaagtattaaaaatataaataactaggtcactactaaaaaagcatctcgggcgagcttaattgatccaaaattgacctatcttgcatttaacatcattggaataccattccggtcgtatgacctttccatcattttagtggaatgactattccattttgaaataaaaagaaaaaccattccaatacaagatttgaaaaaaattattaattttttatgcattttaatttttatttcattctaattttcattctcattcctatatttctatatttttattcctcccaaccaaatgctatatcttggtgggacgtcagtggtcaacctatctgtcggtcttttcaaagctcatcaagataggtagaattttaatatatatttgtgctctatatctcgacatcttttgacatcgcattgagattggtataccagattagccattttttgtattgagtcgtccaaaatgttaattattttatttcattagactaattaacttttaatattgtatatatgtagtttgaacaagaaagaaatcacataccatcatcagtggaatgttacattaagcaatacgaagtatccgaagaagatgcacttgaagaactcaataaaagagttgaaaatcattggaaagaaatcaatgaagattttattaggccaactattgtgccttttcctatcttagttcgcgttcttaattttacaagggtaatggatcttatctacaaagagggtgatgatcaatatacaaatgttggaaaagtgatgaaagaaagcatttctgctttgcttatagatccaatcccattataaattaattaatatataaaccattatctaatagtacttgaggtaattaaaatctgcccagttatatatgttgagacaacttagtactttgtgtggtttatttcatcaataaacttataatgaaatccttttatttttaataaacttattttattattatagtttgtttcgatcaatttttttattatggttcagaaaagctagttgtgttcgtagttttcacttttaaaaagtgaacaaatcatagaagcaaaaaaggattaagaagaaattctagaaagccagtcaaagcaaccctaatcatttgtttaaggcttgactcttaaaagtttttaattacctcttattaatgtgtgtttgtttgcccaacactaagttaaaaatggttaattaaaattcaaagacgataaaggtaactctaaggaaagcttgataaaacttcacatttgagttatgttggagaacacatagatgaggcacttggcttcaggttgggccgaaacggttagagaagggcaatcactcattcttaaaatcagtattcttaagaccaagttacttttttttttgtccaagtttcttccctttttgtctaactcactttcttttttatttgtgaatttcgggaatatccccattcataggtccgagatccacatctatgaattgaaaggtccgaa

SEQ ID NO: 379695 - DNA, 2044 bp, Cannabis indica
ccctagtctaaatggtggaaaaacaaacatagacgatgatcatatgatagttatcatattttaatcattattatcatttgcaaaaaaacaacctgaataagagaatcatcacaagctctgtcaattaatcttccccgtccaagtaagcaaagtaaatggaccttgtgaacaatctccgcaatttcctgcagcaaaacaatgaactattaatatttaaataagatgaacaaatcatccaaaaaaattggcagcgagtaacttattatgggattcacatatcaccttatcttctgcagtaactctgcgaataggtttccgcctcacagaatctggtgtctcattgaattcaattgtcacctcattacttgcaggatctaatgatggaattgatccatcttcccaatctaaatcatctatgtctgccctgctttctgaaagattgcatggtaaagtttcctcaactttatcttcccttaaagtgctgccagttgtatctctactacaaccatcagcctccgaaacagttaatttgaccctcgaatctatgtcttgtttgtcatccttttcggacccacttccttgctgaaatattatcgaacaaataaaaaaaatgcaaacatttccgcatgttaagttactgaaagaaagttccacgtctcttaaggctccatcatggacataacatccacaacatcgaatcacattgcacagttatagtagctaattccccatttagaaaactctagatacatgaaatactatcataactaataaagtaagtcaataggacaaaccctgctacttaagtcacattgctgcagattattgtcatttttctttgttcccctagagccacgtttattggaacgtctcagaagtttgccaacagcctcctgtgatttttcagccagagttcctgaaatcatgtacatacacatacatggataaaattaattacaagtcaatcctgcaaccagtaagtcttttctttttaagaacaaaccattgtcattaagaaactcggaagagcttctgctttcagaatcacgtataggttttgttgaagtgtccgtacctgcacaaaaaatattacacatctaattatcaaaacatgaaggaaacaaaaaaaagtgtatgcatgaatatgcaatggaactgtaaaatacattacaaatgacaatgtctatctagcttgcttgcttttatcaaagtctagcattattttagtttttaatacttatttaaatattaagcaaatatatacctaaattaaactcatttctgcttttgcatcaaacatcatatggttataatgtttggtatagtattggataaaatgaacattttaagtcagcaattcctcttgtttttccatgttaacgtcttaacaagcaaactaacaactcatttaatttcatatgaactcgtagtaattttcttttttaaataacgccaacagcacttatttgggtctcaaaactcaaaccaatacacaagaatcaaagacctataacccaaatcatcaccatatgaccaacaatctaagtggggtctcttcgtatttgaggaaaacattgcatttcgtgttttgagtttactatactcggaaagagaactgggggggtgtgaaggagaccaaaataaaaactgggattggagagaagcaagaagttaaatttacctgatgatgatttcttcctggtacgcattttgtttgctgaggaagaaagagaaaatcgcgcctaaaaatgggtcagttggctttggcggttccactcatacgccacttcatttcactatctaattaaatacaccattgctacgggtgcacatttacacccgaaaacccaccgagcttgaaactcgaaaaaacttgataaaaaattgattttaatttttgtagaccgggttcgggtgtaatctgtttctctaccagattgagttcgagtttaatatttttgaaaatccaaaacccacctgaaacccaattagcaatttttttttaattttttatgtatatttatgggaaaaaaacaggaatatt

SEQ ID NO: 379696 - DNA, 1658 bp, Cannabis indica
ttaattgctgctaagcagcaaaaacttagtgaggctatgaggtctcttagaaaccagcctaaaataggtaaggagactgaatgttacatggctgtttcacaaactcatggaagtagagaatcccaagtgtataaagactccagctaccgaaatactactactgcaaggcaacaccaatccatggctttactaggtcagttggaaaagcagtggtatacttgtccagaggggtttgatgaaagaggttgtacatcttcatccaatatatatggccttggtgttcttctttttgaggtaagattatacatgtatgaaatgtttactatactatttagctttgtatggtttctgtactcaaattttatatattaggagaaatgtaatataataattatcattacaagtttcaactaatatgagctgtttacttcagttgctttgcatttctgaatcatgggaggctcattccaccatgatgtttgatttgggccgtcgaatttttccaccgaagttcctttcagaacagccactagaagctggactttgtctatggcttcttcaccccaagcctttgtcacgtccaacatttaggtatcacaatctgaagccatttcatttgtcttcatccttcaattgtagtctatgttgagtcttatatctcttggggatttagtgaagccacatattgaaggttgaagatttattttttttaatgttcaacagagaaattctgcaatcagaattgatatgtggctctgaagatttgaattctggaggtgttatctcaaattctgctgaatgtagtgattcccaaacagaggaattacgtaaatttttatcttcaatggaagaagaaaagaaaaggcgtgcttctaagttaagtgaacagataagatgcttagaagaagatatttctatggttgagagagggtactcagagaaggagttttcccttgtaaaagaagatggattttgtcttgaagagtctagatcattttcaatgccaaagaagaatgaaaatacattgatgaaaaatattactcagttggagaatgcttacttttacctgagatcccaaatccaacataaagaactgccaaagaccaaagagaagaaatgtgatgtgaaagttaagaatgaagactcaagcatgaatcaggcttcagatgatcgtattggagcctttttcgacggattatgcaagtttgctcgctacagcaagtttgaagtatgtgggacacttaaaaatggagaatttttcaactctaccagtgccatttgttctttgagttttgatcgcgatgaggactacattgctgcagctaaagtatcaaagaaaatcaagatcttcgagtttgctgccttatcaaatgatgcaactgatattcattatcctgtggttgagttaacaaacaagtctaagctaagctgtgtttgctggaattactacatcaagaattatctggcatcaacagattatgatggagtggtaaaggtgtgtttttgtacttagctaaagtaacaataagtctgctttaaatgatgacaattcttttgccattgttaataaagaatgggttgtttgttttgttttgttttgttctgtgtgcccatgagttacagatgtgggatgcagctactgggaaagaatgttttca

SEQ ID NO: 379697 - DNA, 1112 bp, Cannabis indica
attaaaataaaataaaaaattatctaaactaaggttccaccgagacttgaactcgggttactggattcagagtccaatgtcctaaccgctagaccatggaaccatttacgttaaaattaaattattttataaatttaaccaaataaaagtagactagaaaacgagccacgacatattaaacagtaaaggccgactggtatttcagcacctgaggtgagctgaaaatagtcaaacgagtcaaaggagtgaaccgtgtccatgtggagaagaagaagaggccggtttcactactgcacgtgcgctcacgcacaagaaactggacgccattgtcgtcggcggaggtcacatcgccctcctcgagagtcgtcatctcatcggcaaagccgctgtaactaaggagctcattccaggcaggacccacccaaacattgtatacagcttacaccattttccacaaagcccccaactatatgagagttcttttagtgttgagagattagagaaaaataaacttttacaccatagtattatagtgatctccactagtctctcctcaaaaattgtgagtgaatatacatatgtaatgtaaaagtattaatattgtaacatttattcaattctctttgtattattatgtataaaatctgtaacagattcattcagtgtacacatcttaattatttcagtacttaactcagtactgcttgctctttcttcaagaatcatatacgcacataaagtggtggagttagttaaagaaaaacaaagagtttcttgattgagatttgagatgttgactctttaatattacaattattaacaggaggaaatatttctcatggtgctatgagtttggaatctattttcctgctgagacctgtttgttaaatcatggtgattccaaaatattttatgtccttttttttcactcttaaatgcataaagatttatatgacttataatctttgatactatacacaggtcaaattataggacaagagggttgtataatataatgtatatatgggtagtggatcacatcctggcccctggtaggaaggctgcattagctgttcttcacgatatcaaaaatttacaaaaaaaataataat

SEQ ID NO: 379698 - DNA, 2894 bp, Cannabis indica
ggaataaaaattattaattttatagtaaataaatttacaaaaacatatgtatatatttgattaagattgaatttattcttatatagaggttatacttttttaatacgagacttagaaatgtataactaattacaatttagaggttatttttattataattggcccaaatttgggacttgatttttttataacaaattagaggttattcttgaatagagtattcttaaatagaagttctaatgtatatatgtggtattttgacaaaaaaacgttttgcttgtgccgtaaaatatgttatgtaaatatttatataggaagaaaacaaaataataattgcgtcacgagaaagggagtcaaatctagtgaagtgattgtccgagtctgtagtcactgtatacagccaatagggccgactcataggccatatagtaaatataactagtggtgtacggaaatttcagatgttgacattaattatatttaattaaagccaaagtatgttcacatatacatagtcatatttaatttttatttgtacatgtatattcaagctgctaattttcctttgcatgcatgtttcttcaggtgaaacacaattgccatctctacggagagaatgcttcaaagagactaaacaatttcgtgaaggcctataccgcagaggataagacaacggctcttgaatctatatctcaagcaaaaacattggctgccaccggcaccaaacttattcaaaacataaaaagattccaagtaagaatattatattattccttaaaaataatatatataccactctaaataatattatttatttattagatcacacgttaatataatatatatttcttatagcaattactccacttacacagcaccaattaattttgtattaattttacctttcattcataatcttactattaaaatgtttctacaggaaagcatgcgatgggagagacctccattgagatgtttgaaaccaagcagcatcttgatgaacccaggagacaaaatgcaagatttggaagtaccattaagagggttagaaatggctttaaaaaccacaacttcatttcctgttaaaaatctaacgggagagctcagagatggtctagttgtaatggagaacaacatgaaccttggtactgtgggaagcttacacttgaacgaatcgtttacagtccctgaatctgttgaagaagataaaaacttccttcaaacattgcctaaggatcttccaccaacccatcaagaattaccctcatttttcttcctcttttgcatgaaactccttcacataaaaaagctagccacaaaaacaataaaacccagtaccccagggcaaaaggcttcaaccgatagagatgacgatagtatttgggcttatatttttccgaaactgagcagcaaccaaaggctcatgtacgcattcaaatgctcgttttctttgggccttgcagtgttctttggccttttttacagcagagccaatggtttctgggccggacttccagttgccataagcctatctgctggcagagagcccactttcagagttgccaaccttaaagcccaagggactgttttgggaaccatttatggagttttggtttggtttctattctccaacattttaccattaagacttttttcacttctcccttggttcattttcactggctttctccaacgtagtcggatgtacggacaagccgggggtatttcagccatcattggtgccatcttggttttgggccgagaaggttttgggcctccaagccaattcgctatagcaagaattgtcgaaacctttattgggttatcttgttccatcttggtggacttactcttccaacccacaagagcttccacacttacaaaagtccacctctcaaaaagtctcgacacgttgaacgagtgtattgggtctttgagtacaagcaccaaagccctattggaagagaaccgaaagaagctgaagatgaacattagggagcttgagaatttcattagtgaagctgagctggagcccaatttctggttcgtgccatttcctagtggctcctacggaaaacttaccaactctttgtccaaaatggtcgatttacttgactttagtgctcacgcattggggtttcttcaccaatattattactccaatgatcatgataacgaaatcatgatcaaaattgacggtgatgtcgaccttttcaagaaactggtttgttcttccgtaacatgttttcaagaggttagtttgataaaatcattgcctattctcgaagaggagtttgagaagaacaaaatgccacatgatgtggagatgggaaaatactcaaataatgataactttaccaacactcaattgaatgaagaagaggtggacatgattttgggctcttacctccagcattcaagagaagttatagagaagattaataatgatgatgataataataataataaacaacaagtagtagtggctaataatgatcatgatggggagaaaatgatcaagagccaaatggcgactctgagtttgagtgctcttgggttttgcataagtcgttttatgaaagaaactaaggagattgaagttgaaatgaaggaagtcgttcagtgggaaaacccttctagccgtgttgatctgtataatatttcctgtatgatacgtgctttgaagaaataaaataaaaagcattgtaaacattataattgttaagtacatgcaatattttttgcattttccatcttcacaaaaataagtaaaataaaaatacaagcttttcttttaaaaaatatatatatgtctatatctattttctatataaaatgtgatatctaacacaatttttagtttaatgatatttttttttttgaatttttaaatt

SEQ ID NO: 379699 - DNA, 7102 bp, Cannabis indica
agaaatatcatattggaatgataacttaggataaatttattcactcttacacaaataattattaccattattatgttcattacaatcaaaatatcagcttctagctttaagtgaaaatttcacaacacttttgcatgttttgaggattatttctatgtagcatgatcagttagaagaatctctttttaacatgaaatttgagtatttttgttttttttttgccttttttaaagaaaaaagtagttctaggatgatactatagtataaacattaattggggtgaagtgtaatataattagctgaaaaaaatgctagattctgtgcttataaaagaacatacagatgtcaacaatttggcagtgtaaaataaacatattaagaaagaaatagaatttcatttttataggtatctatggctatgtatcacttccatgtcatcctcaattattctgattttgacaggattctataatgaaatccattatggagggaagaaagataatggtggggctaatttttttttttgtttaagagaatggtgtggtctccaaaatttttgttgtggtcggtatagaataccaaatatagaattcaaatcacttaaggccatgcatgaagtgaaagagagaaaagaccactaagataagactagatcattctgggaaggttggttaggtataaatatataaaattccaatgcaaaaggaacaaaaatcagagaaaactaccaaagcattagaatttaaaagttggaattcataatgttgaacctgtctatggcttcaaaagctaattggatcaagaaaacttccactaccattgccattcatggcattctcaacaaatattaatactactccatggtcttcttttactattgcaatggaaagattagaatgtaaagaatagacaataattgactaaaaaaatgataaatttgtgattcatatcctttcactatttaatttggtttcttttcaaattacactaataacttcatcatcattttccagttccttaattaacatttccatcatcttcttatacataggcataaagtgatccttaatcatagttctagagagtcgaagtttactgtacaattctctaggtgtctcgtatataccgacatgttcttcatggggtccctcgtcatctaaattgttagaatcagattgagggaccgcaacaatgtgcatgattctgccagggggatagagatggtgattctctgatgcatccgtcgacgaaattgatgtagtgctctccacagcatcgaccaatttattttcctcttcagttatttcttttgctgcagctgcttcttctgcctctgcctcactgtcaattttattctcctgtctctgaagctccttctccagttcataccacaactcaccttcagtaatgtcctctgcaacagatgaagtggtgactctctctgcaggaataagctgctcctcttcatccgtatcgtcgtgtcctgatccaccacttgaagaactagattctgcattgttcagaactatgtctctggtaatgactccaacatccaaagattctgccttttcggctatcagagaaacttcaggcaaatcctcttcttttgaattcaataacgggcccacatttcgacggcgtgcacccatgcaagaccatgatgataaagatgagcgggttctaacaacagcttcggcaacattctgtgcacgcttcattacaacctattaaccatcaagccacaaggattagaacaaatggaatagatagaaaaactagtcgagcagacagatataaaattagagcacagaactgtgcagcaactaaaaagaccaaacaaaaagtaaagaaccacccacttttattgcaacatcataataaaacatttatagtctacgtacaaaaaccttgcaaaaatgcaaaatatcaagggcatatcattaatagaatctgattgttaaagaaatatcttgacaaatttccagggcattggtgtagtggcatgggtgccttgagtaaggttcaacttaggcagaccaagtttggaacccagccactacactaattcccctatgtcacctgggacctggatgtgggggtatccctgagggattagtcgactggatacccatgggtttatcaaaaagaaagaaagaaatatcttgacaaaacatcacctgtgttctgctggatactggtctcagaagtgcaccggcaccagcaaccctcgcttttgcactagctatggttggtagacgagaacctacagcagttgcagaacgatagacgacattcagtatcctcgtgtgctcaagctggtctctcaaatcatttagccaagatgatgctgttacctgataagtaatggtaatcaacatataaggattccaacagaactttattgacacaaatttaacttcaattaaatgaatttcatatccagagaaacaattaaagcacctcagaccgaagatcatcaatagaagctgttgagaatgtgggcaccagatcagagccattgatgatacttgtaatgaagtgtttcccagattctgccaactcccatgtcatacaggcagctgcaaaacgaaaaattacaatgcaaaggttacagaggagaaaattgaattgaataaaattgtataaatttgaaaaaagttgaaatgcagcacgtttagaaagcaacacaacactcgttgtacaagctctaggagatcaagccatttatgatgtaacataacaaaagataatcaaattataatattgtacaacctataggggatcaagccatttatgatgcaacataactaaagataatcaaatttaaatattggacatgcctggggcaaatgtgatgcaagtgcttgaggagaactccttttgttctcgaaaaatgtaagtaagtagtgcagctgtaccaccaccaagtgaatgtccaacaacctgaaaatgcaaacatcaaaagtaacgcgttaacagaacatagtagattatggtgaaagtggcagttgaacaaaatcccaactataataaagacaactcataaatgtatatgttgtataattaatttattgtggagtatacactagagttagctaatagacaaccaaagaaaaatccttacaagactattaacatgggaatccgagatataaagtacagcaaatccggtaagcaaaaggcaatacaacaaaattagtcaaaactaagaaatgacattaccttaagtttatagtcaggatattcaccaagagccttgagcaggcaaggactgctaagcttagcaatccagcgggctgcagcaaccatcccgcagtgagcataaccaagaaccaagttgctaatcccaccatcatgcaaaaccgagtggtggaaagggactacagcaccagttgctgctgttaacgtatctttgatactatgagttccgcgaatcaatagaagaaagcatttcgaatctttatcacgaataattgtgaaagcaggcatcaacaactgcaagcatttgtttcgttgattaaattaattcatttgtaaagcatcaaataagaaattgcccaaaatatattatagaactgattggaagattatgggcaacaaaaatatttcatagaactggaaattctagttggcattctcacatttcagcattttaattccaattctacataatataccttttagactaccactaaactaatataatttttctcttcaaaatatgaactctccatatgatatgaatgaagaaccaatcacatctctccttcattaaattcttctactcgctcccacgataaaatgtctcataacaaatcaaataaatatttgtactaacgtaatgagcataatacaacgaatcaaagagattagcataccccagccttgggcttctgaagaagaacatcctcctcagagtaaccggcggactctaaaaacaccgggaacggctttttcgaaaagaatatgcaaagggtcaacaatctcaagtaataattcagctccgaaacaatttcaggacctttaagccgtacagaattactaccagcatacacactggcaacgtgtaaattaccctgcaatcacaatatcaaaataaattatataaataccaacaataatcagaattaaacgaatttcagaaaatgcacgaaattcgaacaaaaatatattagaaaacctaaagcttttcgatcgtgtacctgcctccgcatgagataattaatgccgaaagccaagtcgccgatcggccacttgcccaatgtctcggaatacgtaaacctcagagtctccgataacgtcgtaatggactcgagccacgtcgccggcgcctgcgcaggtcgccgtgaaagcctcctcttaaacgatctcgtcgatttcgtaaaatttccactcctatcatcatcttcttcaactttcgtcgataacctccgactcaaaaccaaatacagaatcaccgcagctccggcggcggtagccattgtccccgccgccataaaaatcgcgatccaaacgtctcaacgatccaacatccaaaactcgacaattctcggaaaaacttagtaactataaataaaaaaaaaacacaaaaaattcagaagcggtgagaacgaaattcgttagggttaagaagaaaccgatgaggaaggaagaagaagattgagattcgtggaggtgagactcgatgctaaagttgtgttaaaggtcaattttctccccggagaaatacagtaaaatcttcccttctaagaaaattgtaggggtattattgtcatttaaaagagaaataacgccgtgatgggcagaggacgtaaacgcactgaactggtataaagcggagttaaagaaaagaataataaaatatttatggagaaattataaagtatgcgcacgttagggatcaagtgggatagtttaacaaggtggtagcataatgacgtggaggatatggcatggccccatctcacttattatttttgtgttagttaattaattcttctcattatctaattattaaaattattatatatattatttttttgaagaaaaagaaaatctttactactaaaattatttgtaactaggtttgttttcgtgggtagtttagatattttaatttttttaaaaaaaatattgtgaaaatttaaaataataaaatataaatataaattttaaattttaaaatatctaaatttttaagaatgtttaaagttaagtaaaacctgtttatactttaaatttaaattagtattaaataaataaaaataaatttcaaaacttgttcaaatattaaattaaaaatctctttaactaactaagacaaaaaaaaatattattttcactttaaaattacattttagttacgtaaattgaaagacaaaaaataatttaagttggtctacatctaatatttttaaatctatccaaattcgatccatattaaattttactatctgatccgatctgatctaattagatcggtcatatccattagatgtatttcaagtatatttattggtttaatttgaatttaatttagattcaatcacaattggatatacaatatttagcgatttgttgtaattgcatatatctcataaactagtgatcaatgtgagatcttaactatatatctccttttagagcccacgtccatggcggatcactctatagtagtctattttgggcctaatctaacaatcgctacttcagtaacatctgttcctatttaaaagtgtatgactctgatactatttgatcaaccaattagaactcactttgtaaagttagctctttccacacattcctcttatatattctattatctttccacacattggcaagtggctctttttgctctacttttcggattggtgttttgctctgataccatattagaatttggggatataaagtgaatgaggttccatctcaaaaccaattggcaatgggaggagtaactcattcctcttatatattctattatctttccacacattggcaatgtgggactttctaacacaagtggttgtaaactattaaccaatctcattattaattaatgtgagatcttattatttttagtgtaatttaacataatttaatttaataactattataacaaattacttactactcattccatgcataatgaatattaatgtattttgtcattcaaaatctagacaaaatatcaaaaatcaatttgttatatatttatcatgaatattgaggacacaaaacaatgtagctaattaatgagattattataccaatacacaaaattaacaagagaaaaattataaaaatatggttgtacggatttttaaataaaattacgatttttatgattttatttacagaaaatacgatctttttatgttatattcttattaattttttgttatttgtatgttatttttgttgttgtttggatattttttttttgttacttttatgtagtttcttgttatttctatagaagactataaaaatataaaaaaataaataaataaacgtaaataatgtaattttttttatattttttttataaaaaaaatagtatttcatgtaattaataattacataatgtaaaaataaggagtttcataggccaatttcacaatacatgtttctgtgattagatccaaattgattaatggaaattctcatgcatttatgctcaataattaagtggcccacacctagtaatagtttaacaaaagaagaataaattatattcagataaaaaacataaaagaagaagaagaagaagtatcaattattatagtgaaaaaagtagaagaagaagtaataattgtaacaaatgagatggttgaactacattataaaatggtctaaataggtatatcgacaatgagaatgtgacacaccagccgcaactaaaatatatatggtcaattacttaagaaagagacacaccaattgtatttgcatgcatcttcattcattcattaatcatgggcatttatatataaatatatataatctttttctaaaaataatagtatagatataagaatatgtgaatacttcattaattttgaaattattttaatagttacatcaaatatataattat

SEQ ID NO: 379700 - DNA, 908 bp, Cannabis indica
aataaaataaaataaaatcaaaatgataacatttgaagtgaagggactaaaatgaaagctttttaagagtttagggacttaattctttgttccaaggggaggagttaggacatagaaaacgcaggtgaaaatgaagtagtgattttttccagactggttgtattgttggagctgggctttccgttgcccagatccggtgtccctcccttgatcgctattctaccttctccatttcttttttcttcttctcttctactcttctcaccacaggtttctttctttctccctcgctttcttttttatttattttatatttgtacgtaattgatctgaattcgttatgtctttgattgctttcattgtactttggttaggtttggcccaatttagtgttgtttttgttaaatttggggctttcctattagtcatttgatttggtgacttagttgttttcatttgcttctgtagtttttctcctttgggttctctctctctctctctctcttgatcgatttgcacatctatgtcatctttgtggaataacagtgcagaaaattttcgttggtcactggcactgacttgggttctttatcagttttgcccaattcagagagtgatgatgttaatgtatagaagaaaattaaccccgttttctttcccttgcacagaatcataattaccaagctaaacaacgaaaccatttgcagacaacaatggcggtaatttctgggatacttatactccttttgcagttatatttgtagttactgaattttgaatttgttcctattggttttggtggagcaggactcttccggcaccaccctcatggatctaattacggcggaccccgcccctgtctccgcccctgctgcttcatcctcatcatcatcatcttcttcttcagc

SEQ ID NO: 379701 - DNA, 654 bp, Cannabis indica
aaaacatcccttataacctctttaaacccaatcccaaatatatttctaaatttttgatttttaattttttttttgtcttaatattctctctctcatttaaaagctaaaagtcgtaatcttcagatcggaccagagcaaatcctaaacctaattttatttttcattttctctccccatttttgtctcagagcgcatagagctctcaactaacacttctctcttcttcttcatattcttcctcggtgacgcccattctcgaccaccgatggtctagacagagcacaattctaacctctagcggtttaaacaatgcttcagtcttcatagccacccctttttcttttcactctcccgtgtggagcttcttctcccttgttgttttctctacgtgcgacaactgaaggccaaaagatcaactctaggtgacttcaacgggggttcgcgagggattgggcacctggtgactgaaggccaaaacgaagcccaaatatgagattgcaacgtgaaatgtacatgtattctctcagctaaaatcgccttctttgttcttgatcggtgctatatcaactgtaacgtccccgcttcaagcctccattgggtccttacacccatggaatgaatggctcttatacacgagtacgtcactctggctgc

SEQ ID NO: 379702 - DNA, 4262 bp, Cannabis indica
ggaaaatatcacagggaaaagaagcagagagcgttttgtttttatgtagagtaacaatttgatattcaaccaagggagaagaataaggtgaaagtctatggccgaactgtgaagtctctgtgcagccttatggattagtcgccggtttgtgcagacatctcccttggaggtttttcattttctcctttttttttatctgcttttggtcatatggatctttttaaaatccagttgcaaatatgtttttacctgttaatatttagaggggtcggtcgagttttaggggctttcaacaatttgtataaaggggaaaaaactgaaccatcttgttgatgttttagttgtgtgttgtagagaaacttgtgaattggacgatataaaagccttgtacagatgttttactactttcccttttctttatagctcatatcatatgatgatttagaatttcatttcatgtaataataataaaaagaatgtgttatgaaacctttcattcattactttcaactaacaatacttgtcagaacagacactgttatgaaatgaatttggcacatcattttataggttctttcaagcaaaagattttgacataaactgagaaacaagatgggcaatcctcgtaagcatgaaatatttcctaaattacattattattctagtaaaacaacagccccaaaggcaggcctaaatcataactcatgctttcccacttttattctggaatcctgcaaatgtattttttctaaatttgcagagcatctgcaattgatccggcaagacttataacctcaaaaggagccttgttggctatgtctttgactgtcatcgggcaagaatctgtgatccaaaagtaagcaaaagcgttctccgagcagtctaaaacagttatcaaatggcaatgagttcagtaaactcttcatcaagagagattattcccatcttatggattaaaaaacatgcagcagtttgattacttaccctttttgtgcatgaaccgctcccatgaacgcttgggaaaaacaccatgtgtaacgtaggcactgaccttggccgcaccatgagctgccaagactttctggtgaaagcagaaggaaatgttaaaagtcaataatatttttggaaatgaaggttttgacatgtctttaagctatggtattcatcatattatgttctaatggttgatcacacgaaatcgtgaaagggatacctgacactcaatgagggtgcctccagattgaaccaaatcgtcaacaattactacatgacaaccagaagggtttccctccttgatccggactatcctcttatcaccttcacgaaccttagcacataccacctgccatttgaaaaattttattaagaatataacttaggatatgaggctctgcttattagcactctcttttttttttttcttcagcaaaatctttaccgtgggaaagcgatctaattgcttgtgaaatcgcttccaagcaccatcgtcgggaaatgcaataactatctggagaggacaagaatcaaaatgaatccatttaccacatctgttatttgaaagatgttctgacaggactcaatgataacaacttttaatgttggaagtgaaaaaagaaaaaacaatttgaatatggtaacagattatttgtgatgtggaattgtataaggaccttatcagagtcagaaagctggtgcaaacgttgctttaagagaggaattccggtctcaaacacaggcaaaacatggtctccaaagtaaaacctttcctgcataggaaaaggaactaggaaacattaggagttacaataacgaatgctaagtcaaagaatcgaaatctaaaataaaattagaaaataattaggactgcaaacatctcttcaataaatacgattggttgaaaaatattaggtgtaatttgtgtgcgcacatatcattatccataaagattatgttatcaaaagagttatgattttaaagtaaacatagtgatgactcgaaactaatataaaagatgggaaaggtttataaatgtcctagaaaatcaatatgagattatgctgttcaaattacaatctcagcagcaatatcattgaatacctcgattattttttgaagaaaagttgtgcaacttgaatatctttctattagtaaaataatttttcaataataaagaaaaatgaaaataacaatcatcttaagcataggcaaacctgcaaagcatgtatatcgtatatgaccaaactagttggacctcctcttgagatgggaatattcgtcaacatcctagcaagggtaaatgcagtggctaacatccccttcttcttccattcgctcaaaagaaccagttggaaagaaaggcaatactaaagtaaaagaagccacaaaaagtcgtggcagtgcatatattacagaaagctgttcaaagataactgcttgggagctgaaggatgccagaaaagcaacatgttgacctctgagatcttgtgcgttgtttataaatatgtttggaaatccatcagcaaaactcctgtacaggaatacaaatcaatcttcgtgttgctactcatattttagaacaatcacatctttctccagtcaagctcattagctttgtaacatacaacaacaacaaacacacacacacacacagaggaaaatggaaggaacagtaaagtcagagatgatatgagtaaatattaatgacagacatgtcgtcactacacactcttctttcaaggttaaatgggcataaactctgcattcaaatgagtgaagttaaataggcataaacactgcattcaagtgagtgaagttaaatagacataaactctgcattcaagtgagtgaagttatgaacataaactctgcattcaaatgagtgtcagaccataaaatacactatcatactccattatctgagactagcatcttttagagaaatgtcagggtacgttcagcaaagaaagtatgtgaggttgtgttgattccatactttctgtttcaatcttctagtaaaatccaacatcaatatcgaaaacatcacgtaaaaaattgataacttatattaaggattaagtaagtgttttccacaaggttctgtagagtggttagcccaatattttcatgatgtatgagatttaacttcccatgggattaacaagtaatatgcattatgattgaacctttagccttctaaagattgtagggctgaactgaaagtaaagaattaagttgtaaatacatacatacacctctattcctacaatagctggacttgtgggggaaaacattaatacattaactaactttatttcaatgcacagacagacagagttgagagaccacatttaggagactgagtagaaaaaaaatgcgtgcgtaaatattgattttggaccacagtcataatacctaaaacgtcaaaacatcttcttctcattggatctccttaattttccccaacaacccagctatcataatgagcataacatttagaagagagtggcccagcccagtcaaacaattccacaaacagattatgtgcttcattttcacttcagtaatcagcacatactaatcctacaccaatcaagtcattaaactctttttcactgcccaattactctaataacgtttcctacaattcacaacattttctgttccttcttcttgggttttatttacatctatgtcacatgtaagatttcctattcacatcatcacccaaaaataaaaacccaactattgttttagtgattgagcacaaaggaaaagtgcccatgttttatcatgggtagaaagatagaacaaagcacaaaaacagccatagcccatattccttaacacttaaaaacaatggaaaaagagagagagagagagagagagagagagtaaagacctccacttgatggtctggagattgatgaagtctgattgggaggcaacttttcgggcaaggtcttcacactcgtcacagtagaagagatacacctgcttctttcgagaattctccattgccatttcagaaaaataagcacaaaaatagagtctttttgagttgtgcctcacaaagctcaacactttcgaggttagaaaggtttttcagtcccaggggagcagactagggaggtttggacagttgtttggttacaggaataaggttgttacagctctgtgcaaggacaaccccagccggctttactggtaaccaaacagaggcaataaaattacacacttttaagagcaattatatgatatcttat

SEQ ID NO: 379703 - DNA, 3689 bp, Cannabis indica
tgtcactcattgctcgtgatgtgttagctataccagttactacagttgctactgaggccgcattttcaattgggggtcaaattttagatcctcttaagagctctctaaatcaaaatagtggaagctttattttgtttgaaaaattggtggagcgaatcacatcaaccaattattgttcgagaatatatagatgaagcggaagtgttggagacttcgaaatatcttgagcctggtaatttttttttttaaatttattaatatttataactattgtatgttatatagtctaatatttatgtttatattaatgatattgtagatgatgcttcaagtaattctcaatcttcatcctcatcttcaatctacagagaagaaccttggtactgaattcacatgactacttgttagatttcctcaaagtgtctttaaatgatatttgttatggtttgtaactttctaatttagaattttatgtttgacaaatgtgtttatggtttgtatttggatttttttttggatatttttatgagttttttatggtttatattggactttatgaacatctgaaaaaaagagtccaaaaagtttatatttggacttttgtggatataagttaacaaattatagacaatttttaaagagtaattatatttaagtttaatcttcggtaatagataaataaagtttaattttttgcagtaattatatttaagttatattttcgtaagttctgtaggtacctaatcgttaagtattaaattaatagtcacgtggtaattcctgattagtttatgtcattaatttaaatatatcaataagaaaatgacatatagataatgacttacacttaacggtcagatacttgcgaaagttttaaaaatataatttaagtattattactatcaaaaattaaacttaaatatttatttacaaccgaaaattaaacttaagtatttatatcgcaaattactattaaaaaaacaatttcttaaaggtttagtgaacacattctttttagttttaagctttaattaatttgtaataataaattgttttaagctttaaggcttatcatctacttttgattttcattttttaagttgctttaatattctttacaacttaattaactttggcaatataagcccttaaatttaattactttcctttccaaacaacacaccatgtaatttaaaaaaattctcccttgacctttatgatcatgaaattttcaaaacaaatcaacatgatgaatggagattattttctctttcaataacatttgttacaaccacatgattgaatatacattatgatcaaatacattacagttgatatgattcacaattttacaagcaacagcatcaaaaattttagagaaaaaagtgcatattataaacacaattagcatacaacaaacaattgaatatcatcgtattcaatccttcctaatctctatcttgtatcagattattgaccatgtttaccaaaggaacagttcccttagccatgatttctattctactagtattggaggcattagaaaacagagaaagcccgaatagtaaaagctcgggaaggaatagtctagacgacaagaacccgtgccaataatgaggttctagatcgaaaaatgcatcaaaaaaccttcttgtggctggcaaatcaagtttaagaagaatatccataccgaaacagaagaactccctttgtctcctcctttctatcggccatagatctttccaaacttcggtggacaattgatgtcccgaaaggcctccatcagatcccaaatattgaactatggaattcgcaacaataggagctgcagccaaggttcttgctaccatataaccggttgaagggtgaaccatcccagctgtaccaccgataccaacaactctttgaggaagcacgggaagtggcccgcccattggaataacacaatgctcatcttcttcaatgctcttcacatttatccccaaatgctttaacctagccaccattctttcttgaatatccctcataggtaatccgggtcgagctactaaagatgtttcttcaagaaatatcctgtttttcgaaaagggcattgcatatagaaaagtagggattttactattactctcttttaactccaaattgttgttgagatgagaatctctccaatccataaaaaccattttatctacatcaaatgggtgactatcaacctcagctaaaatcccataagcaacttggtaacctggattataaggcttatcatattgtacaagacatctagaaaaaccagtggcatcaagaacaacagaagcttgaatagtaacaccatcattacaaatcaaaaatgatttagtttcctcatgtataaccttaataactttagcttgatgaaacttaacaccatttgatatacacttttggagcatttttgacttaagcaacttcctattgaccctcccataaggcctatctaaatccttcttggaattttcacttatatacacaacagcaccagaccaagtagtgtcaagacaatcaagcaaatccatggcctcaaattcatcaacccaaacaccataattgttaggccaaattaattttggacaagggtcaatggaacaaactgaaagccctgcttcggatacttgctgcgccacggctaaccccgctggaccgccaccaacaacagcaaggtccactacaacaccctttgatgggtcatacaaaggaagctcaaaatcaagattctcctttttggtttctggcacaagttctaatagagcactactagtactactagccctaacacaagtagtcttactccatttcgggttagatttcttaacaccaaatctaagctcatgaagcttaggtgttgttgttgggtatgaattgctcaatttctctgaataaaacccattaagtggatgcaagaattcaagcttgttatgagttttaagtaaagtatccatgaaatctcaatctgggtcacagaaatatctacaaaatcctaactgggttcacctcaaattcctgaaataacaatctggggtgaaagaaaatttagaaaaatctcaactttgaaatcaattacaattatggatattgtataaaaagaacttaactttactcataaagataaattagtacaacaaatattttctagaaattgataaaagttcttccaatttctcagcttcagcaatgaaaaacatctaaataagaagttaatataattaaagtttgcatctttaggatttgacaacataccagaaagcatggatggaagagagagagcattttagaggccaattttcggagaagctaatgaagaacactctcaacgccataaaagaaagaagagatttttgtaaaggtgaaagctttgtgtggtttgtgaatttgcctcaaatgtggtgtggtgatataaaccaaaaccaataatagtagcaatcactaaaaatgattgaattttttagtttaatttttttataattatttatgttgtaattatttaaaatattttataaaatttagaaaaattactaacaatatatttcaaataatttattacaagtaaattttttttttatttttatgcgtatgaaatatattatttaaactttgaaacatatttttagtatattaattttttttaaaatttttaaaattttgcagaatatttt

SEQ ID NO: 379704 - DNA, 3896 bp, Cannabis indica
ttttttttttttttgagctacagttgcattggtgctttataccttagataagattgtattaccaaattaaaaagagaaaaaaaaaagtgattggcgatattacaggctacagccaaagccaaacaaatattactgaggcataatgaagatctaatgtatttttttttcaaatgtaaagttgtactaattagtctaggctttgctaattagctcaaaatggataggctgtgctttcatgtatggtcaatttaatagagattacttcataattaaccaaatatatatataaaatgacaaattcatatatatatatttaagtgatgactttgggttctataagaatgtaataaaaaatttattataattcgtaaaaatattgaaaagtcctaagcactttgtataagaatctaatcaacttcactaaagtttgtttaaaattttatttcattttcatacccaacaagttatatatgaaattatatgcgtacattttttttaaagaataaaaaatatgcgttcatttatttagaaatctgacgaaaatctgtttctttagagtttgtgctttgagttgaatataataaaaaggtctttggttatgaataattacattataaatttactttccaaaaataaataaaatcgataaatttatcattaatgtcttgagatcacatatatgtttctctatttttagtgaattaaaaggagtaaggtggggtttgaggtaaggttggttggagctgataagtagtaacactcactactttacttaactccatggccaaacgagaagaaagacaagaagaagaagaagaacaaggaaaagtgggaagaaagagcttcaattcattttcagagcaattccatccaataccatgataccctttaaagaggtatgcttttcccatgtcttcctcattttgcattttctctgttattgcctatacagatcttatcagaaacatcactcaattcaattcaattcaattgtaaaatgtgtgtgtgcatatgtataggaaaaagatgccaagaaagaagctttcaggaaatatttagagtccagtggtgttgttgatgctctcaccaaaggtttaattttacatttttgtgtcaatatctcttctgggttgattcttgtttttgggtttgtaatctcatattatttatgattgttgataaacaattcttctatctatttggtagctctggtctctttatatgagcaaaatgagaagccttccgctgctctcgagtaagttctttcctatgaattgcaggcccctttttaatatgagtttagggttttttcttactttgattttctgtagacaattattgctccagttatgttaattgaagatctggcttcatatatgtatacttgtatttttttcttggttaatatatatatatatatatattagtttgaaaaagacatacagtcaatctcaattattactcttaagagacgtttacctggtgagatggttttgtgagtatttaaggtggttgtttttcattgtgacaggtttattcaacaaaaactagggggaccatctgcctctgattatgaaaagttacaagctgaactgtcagatttaaaaactaagttcaaccagctttccatttcacatcaagaaatctgtaaagaggtttgcttgcattgcaaaatctgcttttttctccccttacttgctgttgccaatgatttcacaaataaaaagtcaagacccaattctcacatattttaactttgtcaaagtttggttgaagtagtagttacatgaaaagtaatgacttaagtacaattgagttgtggttggctgatgcttagtataagaaaataaggtgtacattattacatgatatggtcgaaattgaatgaatatatgtgtttttgtgtatgtctatggattgctattacaaccatctgtagggtcgatcttagcaaataacaggacacacatgatagagtatgcattgtacatgaaaatgtcagagcatgagctggtgatgtcttagaattaattatggtacatgtgttgtgtgtgttgatcctgaccttgcctcctagtaagagaaacttagttagcctcatcaccgatgttttaggacatttactttgcttgttctgatctgtatgtggtccatttcttatgattctttattgtctgttaccttgtctatttttttacccgcgttaaacatgttatgaccgcaaacctaaatgcagttggaggaggttaagagttcgtgcaatgaagaaccatctttgaccaaggagtcttctgatggtgagactcaaaaagataggctttgaaggtgacagagtttattacattgtcaaacaaacaataattcattaatgatatatgaatttacatttaggaagcattattccttaatagttgcatgattgtatctttatcagacagcaagacccattttccttgaagttgggctcctcgccttacctacattatttgatgagaatatgcagtgtttaaatgtagttcatttgaaaataaatacattgattatcattagtctttccttctagatcttctcgtggtttataatagatgctttctgacttattttgatataattttcctaataatgcgtttgataaaacaaagtaaataaatacacttccaacaagttgactaagacatgtcctaatttcctagaaatagagttattcattaaaagtgttactgttactatgggtctcatagtaaactttttacattgatctaaatacatactagtatgaccaaatttagtactggaaactcaacacatgtggttgaattttccttgtgtccagtcaaaaactgaaacccaactaacagaaaacagcaattagggaaaccaagatagcgactgagcaaattaaagcctgcaaaacatcatcatcattagccagtaaaaataaaataaaacaaaaccattgacacatagaaaaaccaaatttgaccaactctacaagacagaaggtattttggtttgtgttgtttacttactgcaatggctgatgctgcaagtcctggtctttccctaggatctttaaggtaatagtttccaaaataaaggactgtagcatagtaccataatggtggaaatacaaaccccagtagaaacctgtacaaaaaaacatgacaggaaaaaaaatactagtagagaattaatgtctttgtactctgattcaaaaacatgatacagttgaattgaagtaaacaatggaagtgatattaatgtgatagtactcacgagaaccaaccaatcccacaaccaaaacatgggagagacttctcataaatcccaccagaagaagaatctaacaaagaaatgtcccctccttcaacatgaatttgcatttccatctctttattattctcgaaaatttcacctgtataaacaaccaccacaactgtagctcttaatcaattttcttcatttatctttatagttacatttccattccatcataaaaactaaaaaactgaccttgcttgtgtggctggtgttgctctgccagcgccgacaaaggcgatgtacgggtgatcccgaccgaggctttgtccttgtgcatattgaagtttgtaggccagattcttcaacttaattcctttagaacgtttagtctaataaaatttgtttagaacgtttagtctgataagaagtaaaccattatttgtgtaaaggaattgaataacgaatgaacacagtatgttaaggagaacaggtaagagaactaattggggttccttgtttgaaaataaactgttccctccttttcttttttttttttttagaaattatacatccattttttttttaagtaaagtagatttacgtcttaaaaaacaaaaaaaaaaaaaaaaaaaaaa

SEQ ID NO: 379705 - DNA, 3210 bp, Cannabis indica
tcctaaagttcttgaagtttgacggacatatggctgtcaagggcctccttgagctcccgagcaagaacaaagttagaagattctagcttaacatgtttggccttgaatttttcctccatttggttctttaaatcctccttgtaatcattaaacttccgcaaatacctcttatttgccttagcatccgcttcagcgcagtattgttcggcctcttggatgttcttatcaatcatttccatgacatccttcttgatactctcgattggggcctctagtgttcgtcgagtggccaaggaaagatcaagttgaatcaccatagagctcacttccctacatgtacgctttgcgagaattgccatctaaaataagaggaggagagtcagcaaaggaacaataacttacaacaagtaaaaaggagaagctagaggtcaaaataccccaattatctgttacctcatggagttagccaatagtacgggattagtcctactgcctatcgcccacttctcagtggtcaattcactcacactgactgctatgcccgctagcaagtcatcactgaatggtgccaactccctacccaagcgaggcacgagttgtttactgagaataggaaggtccatgatgggtgtagaatgccctgggttacggatgccttcagttattttggccctcataattgcagacagctggtcagtcctagtttggacgatgctacatttcttagcaagtcaatgtttcaaataactatcagccttgcgcacttgttctgtgacctcagcccctatattagtagctttcaagagaaacttaaatggcaaaggtgggattttgggcaaacaagtttggaactcttgggtttgtttttccttatcagttttggtcgaagaagatgaagttggaattagttggttactcgggggttgttttagtggttttattttggaaagttgtttgcttggttggatttgtgttaaggggttagtggacatgagaatgatttgcttctcattagcatttttatctgcaaatggtgaggtgtgttgacagcttgagtcatggagaggtgatgggactgttggttcctagcaggaaggccatctgccctgacggacccagaagcctgatggtctcaagccttccaggggataaatctctagccctctattcttcccttttgggatgaaagtcagtgctagagtgttttagtgttgttgctgccttcagaaataccaagccttccctggaatcgtcatcgtctgaaggaatcatgggttttgtatcttgggtcacaacattagtaaaaatgggaaattgaactattgcgttgcttccaatgctagtggccagttgagtcttttgattgctcttaactttgggttgaatggctaaaggatcaaatgtatggctggcctcttgagcgccagaggtttcgagggcaccaaaagctttggccttcttggacctagctttcttctgcctccctttaccatcgacctcagcattgaccttctgaatggaactcatcaagtcgctcagcatcttggactcgagtgtatttaagaagatcaaaatacagcaacaaccaaatcaattgaaaaaacataaaatggtaaccaaagcaagcaataagtaacacagactaaagcagcagagatgcaatgcaaatgcaacctgaaacaagtaactatatggttcccctcttgcaaataaagttatttcttcccgaccaatgaagttgacgtgttccctgaagcctgagaagagcatgttaagaaaggtatccactctaatgatattcgcgaaagactcaaggttatctgggttcctaactattttatctaccctatcaagataatccttcattggatacttacacagatccaagtttaggaagtaattgtcaaaatccccttggtctctcactaacatccgagataggctggggtgcgaattacgtagaagggaattttacctcttccagaagtacttgcctcagaagcatttttgtccgcgtatgcttccaagaaccttgcatgtatctcttcctcctcaataagggggtctggatgatgactttcccacgtagctacgagaagttcctcatcttttgctgccttattcatcagaatagacaagtccaaagaaatttgttctttgagattattaggggtctgaggttgacccctgccgctaatgccatggatcctctggaaatttgcaatcacaccatgctggagcaacaacttagtggtcaccaaatcctcaactttcagttcttcctctgaaaaagcctcatagaaggttattcactattttaatttgtctattagcgttgtttattagcagagacatagggacgaattctttaagaaaaaaactgaaagtcaagtacatagatgggactgcattttaaactttcacaaaaaagtcacagaaagatgagtcttatacttagaattttgaaatctagtgaaagtgctgggactcgttttagagggaaacctgtcgtggagaaccagtattcacatagatctaggaaatgcgaggaggtgctagttgggcattgagtgtgcttgtacttcttgaggcattcgaacctaacctttgtatggtgcccctgcatgagatgcagtttcacctcataaaaatacagtatctcctctggggttggagcgccttggccctgagatttttagaatacgaaccatccggagagcagtttatatgaaactgaaagaagatagaaaggtgtgattcctgtcttaacgcaaaattgagcaaaatatgttctaagtggacggtggggtctggatgaaatatatgaccaactctatgccccaaaaccttccacactatgggatggagattccccgacaactgacatcttatgccacataagtctaagaatgttttagatgccgccatcattggaatacgcctcctgtaaaccataattcctcagctggttgggtcgttgatccatctcccacatagagttgttcagtgtcaaaggggatggagaggtagctttgcctttgcccttttcctttactttccctttttcttgaatgtctttagaaggcccctctcctgggagctaggtcttcaacacccaaacacgcaggggtgcgttcactgaagatgctctagggacctcttcaggcccatatttccaattaaaagtcactgttgttggaaattatttta

SEQ ID NO: 379706 - DNA, 3341 bp, Cannabis indica
aaaaaaaaagcatgcatgttgttaaaagcctccacaattttttaaggaaataaatttcctttttaaagtaattaatcaccctacaagaaaagaaagtgggggcaaagatgccagtagaaaaccttgtggtaaattatctgtatgattgtttgacaaaggctgctccaaagattttctttctggctgactttctacttggttagtttgaggagttgaagtgtaacgcttatgtgtatatccactctttccagaagaattcggtgtcaaagtgaataactgtgggagcttcaaagcaggaggactggccgaaatcttctcaatctgaacattggacatttttgaagccacctcagcaatatcatccgtactactttcctgcataaaatttagggtttttttttcatgaagaggtagtgtctaacatagcatataacatgtaaacaaggctgtatatgacccagaagttagcatttggcatagaaaggagaccaaattaccatagtcctgctgctatgtgcttgactaggtgaggttgaacgaccaggacgtttaaccattggaggcagattggtagaaatactatttactttctctgtacactctgatattgaattctgtattgtcggggcaacttcttttagttgattgatgagaacctacatgagtacacaacaggaaaacatttcaacagaaaatttggacattgtgtataaaatacaattaacaagacattcctaaaaatcaaaatgtaaaataaaaattccaataattcttttctataaaaataaattgaactgaataatcgcaaatggcctaggtgggagttggctgccctttttatgtttttattttctggtcttgatgttgttggctgtaatttcctctgggattcccagagatgataatggtatggctgatgctatgcctcttgggctagacgacttaatttttctggttttcctaattttggggagttaacacctgttgttgttaacagattttgaggttttgttttaatgaatttacctccttagcaaaaaaaaaagatgcaaaagagaaaatagaacaaaagttttatatactagaacagaagaggagaactggtcctaaactgggatgtgggaattcaaatggtcagttctcaaatagagtattccagcttgacgagtagctataaaaggaattacctgaaagctagctaagtgttgctgatgttctgcaagagtcgtagctaaagattctgcatgaccacttgaaccaccatcatgagaacttcgtaaaatttcaggaccctctccatcattagcttttgcctgaaaaaatatggttttgtaataacactaaactgtgtcagaaactacaagcaaaaactgacacatcaaactactcagtgtcattgaatcaatccaaattcatttcagtcaagagtaaactgaggtaactcaaggaggtctaaaaacacaaataagtagtaagctcaaataaaaggagcaaaacaactgcaattttatagtacaaattttagtagacacacatccagtaagactgcttttcgaactgaaaagcagcatacagtgaactattcttcactttgacaaggcctacatgggagaaaaaaagaccaacacatacctaagctcaaatgagaactgacaagtatagtcacaaacacaatgacataccaaatgaagtgattgtttatgaatgcgctgcaaggcatgtgtccaacgcctgataatttctgctacatcaacagttgtttgggctcttccacttctttcctctgctcgagaaagtgtttcatcatttgcttgtgaaacagatgcatctaagccattattcatcctttctccattcgtggtgatatatgatccatcactttggtctacttcatccaaatgtgatgagtgagctcaccagattgggcagttgatgcatctggatagggaacctgagaactctgatccatagctgcaagtaaagaagatccagatattcggtacctaaaaacaagagttacaattttaaaggcagccactaaacatccatagaatgccaaaataaaattgaacacagaattacctatgctccctgtgagctattaaatcctcaataggaccagaagcaagaacttcgtgttgacctgcacatagtagtatattatcgagattatgaaccaattttaatcacaaaagagtgatatagagataagtgcaattttcaatgaacattattatcatgagtatatcctatatttactacagacacatactgttaggcctcctgtccagcttactggcccaaggctgattagtcttacgagtttactggtttatttggctaggtgtctaaaggttagtggccgagttgttatatttttaacgagccgtcatgttagtcttagcctaaacctataaataccaaagtcttattcattttgtaactaagcgattttatgtaaagtttctagaacttaagggagagaccaagcatctcgagtagctttgaaccatttgtatcaaaattgttcaatgttaatcaaaatctattagaatagaagaaaataaaaactcattacttacttttgcgtgataatatagactcccacaaacgagtagctttagacactaaatgagaattttgacttgaactagatacaagatcatcccaatgttctccttctaacttcactttgttcctcaaatcatgtaatttttccagttcttgctgcagataagcctatgatccaagtttccaaaagaagaaggtgctttattaccaaagaagtatctaaaataatgaactcgtttgaatctagatgaaactctcactacctcttcagcacaaagaccacgaaactctgccgtcatttcgtgagccaaatttgaccacatagcctgccgttgtactgctgtttctgcattcttaagaaacctccttcgttcaagagctattctagcctgtttgaaaaaggagtatcatatcactaacaagcattgacaaaaacaaatgaagatgttttgaaatttaaaaattaaaaaagtgaatatctacatacacggaaggagagaagaaaaagtaaacccaaaacaccatgaatctaacaatatcactatgaattgtcaaacaacaagaaaaacaaagtgaactatcaaaataaaccgtaagccacctcaagtcatatctatgtatgcaaaaaaagtattcatggtgaaaactgaaaatagcctaaattcaaaatgaaatgtcccaaaaataactctacaagcttggaaagtcataattctagtgtctactgtcaatcctaataatgtcagcatgacatctgacttgtggcagtt

SEQ ID NO: 379707 - DNA, 5291 bp, Cannabis indica
gcctatatatacgtatagagcacaaatgttcgtaaagaacgttgctctcaattttgagataaaagtgaatcaggtggcatattaataggaatgatatatctcaaatatatgaccaagtcaacaaatgaaatctgccacgatctattcttttgaaatatatataatatataataatataaatatacacatatatctatatcttacaatatttccatcctagtactgcagctcatatcttggcagaagctcaagccctttctttggctcttaccaggtgtgctgttgtgcagcttcccttagcacaagtttcagcagactgtcaaatgttggtggtgaacaaaattaagcataaatggaaagatagatcttccctctcagacttggtttaaattattgtatcctctttatctaattttcctaatgccaatattaaattcattcctagagatcaaaatgtttatgtctataggttagctgaaagagcattgggaagagatggagagtgtgtttggattggggaggttcaaagctttgttatcctgatcttgtaactttgtaactttgtaaccttggctttttttattttacagatcagttttaaaaaaaaaaaaaaagaatacattcctctctatgtaatatatatcatacatttgccatccaattttattttaccttttttttttcctacttctatgcttgtaagttaaattgaattaattgactctttcaattttaaaaattttgaatttagaatatatttcttaattttaatatcattcaataaacctacttttaaaagcaagattatgcaaataaataaactgttattaacttgttctatattaaggcactataatgatatgtcatcacttttttaagtaaccatctatagagaatagccgagaaatatataaaaacaaaacaaaaagttaaaaaaattattacttttaataaaattttacgaaatcaaaaaacaaaaataaaattgtgctaaactcaactttttaataataccattaaactataataaatgaccaattctaagtaggctctatgcaagaaatttcacatactttttgagttggactataaaatatgattctaaaacaaagaaaataaagcttgcctttgagaagccaaaaaaaaataaaatggaagcacagagacaaaacagattaattcttgttccatgtccattccaaggccacataactcctatgcttcaactaggtacaatctttcattcaaaaggctttgtcatcacagttgctcatactaagttcaactctcccaacccctcccaataccctgatttcaacttcttagaaatccctgatggcttatcagatctgaatgtttcttccaagaattttgtatctgttttatctgattttaacatcacttgcaaaattccactccaggaagcgttgactcagatggtaaaaacagatggccaccttgaaaaaatcaactccatcatctatgatgagtacatgtacttctccaacgatgttgctaatcatttgcagattccaagcatcatcttgtcgactagcagcgccgtaaacatgctaacttaccaagcaattccaagacttgtaaaggatggttatattcccctgaaaggtgagtagacttcttttctttttttgatggaactaaagttggaaagtgatcgaatggtttgttgttgaaattaagggtgttgattggattagatctaatgtttttaggtccatatccaatcccattatatattgaatattatattttaccatttaatttaatttaattaatttcaatcattcaatcgatttaacattgttctatccattagatatatttcatgcctttctattattttaatttgaatttatctaatattttaagcttaatatttttttatcaaaatggtacccttcattttactttattttttgaactgtcgtacttatattgtaccaccatctaacctacagaaactacgttgctggatccagtaccagagcttcaaccactcagattcaaagatttgcccttttccaatttcacagactcagatggtttgctgcagcttatttctgaagcacacaagacaagaacatcctcagcaataatatggaacaccgcaaaatgtcttgaacaaccacagttagcacagctcggccaaggataccatattccattcttcccaattggccctatgcacaaaatggttccaccatcctgtaacaacttgttggaagaggaccataaatgcatctcatggcttgataaacaaacagataactctgtcatctatgttagtttgggaagcatagcatttatggatgagaaagagatagtagaaatggcatggggtttagccaacagcaagcaacctttcttgtgggtagttcgaactgactcaggcattgacgaagatgtgattaaaaaactgcctgaaagttttgaggaaacggtaggagaaaggggctgcactgtgaattgggcaccccaaaaagaagtcttggcacacagagcagtaggaggattttggagccactgtggttggaactcaaccatagaaagcgtctctgaaggggttccaatgatatgccaatcttattttggcgatcagaaagtgaatgcgaggcatttgagccaagtattgggagtgggaatccagtgcgagaacaaattggaaagaggagaagtggagattgttataagaagattgatggttgatgaagaaggaaaagtgataaggcataaggcaaaagagctgaaggaaaagattgaactttctataagacaaggtggttcttcctctagttctttaaatgacttggtcaatcacatcttgctgtcttaaatgagtgaaacgtctctgtttctcactttcttttttccttattcttactgtactcctcacagaactacacaaaagtttaaatcacaaatgtcttttaacttcaattatagagaaactaaagagcagagcacataattcagtaagctaaagcaatagtgaaaaacattcaaaaacacttaaaagaactattatactattcccttattagaaaatttgacacccaaacgacatattataacaacaacaaccaaaaacaacgataaagcattatatcataaactatctttcaacaatacacgaacccacttaaccggtgactcaaataacttggacaaactcaattaaactaaacatgttaatattcagacaaaagagacgaaatagacctcagtcctcgccagcaatttcaacgactctgacctcgggccttctagcttcctctttaggaatagtaacagtgagaactccattgttcataaaggccttgagctgatcgagctttgcactgtcagggaccttgaaactggtcatgaagctgccactatcagtgctaatctgaagaacccgttcgtctttaagctctacgagcacgtcttcattggcaaaaccaggaagacaagcttggaagatgtgggcatcagaagattccctccagtctacacgggaattgaccggagcacccaggttcaattccgggaaaacgcgggaaattgaggagggaaagaaaggaaaatctgagagtgggttccagggatcaagaaagaatgggtcataaacattgattcttcgatcattgtcgttggttgggacgatcgacatcgttggtgtgtggatagagtttgaacgggaaacgacggtacagaagatgagttctgtcgaatccaggtatttctagtatcttccttaaagtggtttgtctatttatacttggttttcatgatttttgttaccaggccgaagtttttttctttttttgaaataccaggccgaagttttatttattttattttttttttggaaactatcaaaaatactgaaaggttaattttataaaaatattgacacatctaaattttttttaaatacattctttatataaaatagcagttaaaaaaaattgaacaactaaaaataaaattagaacaattaaaatataatagtggaacaataaagaaaacttaaaacagtacacagtataaaaaatacacaaatatttttgaaaaaatttctgcactacaataaaaagaaaaaaaaaattgtaaaaagatatgtattttttttttttatcaagaaggaacaaacttcattaatcacaagcacttacaaaactatacaagccaataaaaaaggctccacacaagaattacataaaaattctctctatgtatctcttttcatgatctttcatatttctttttttagctacatgtaatctataatacatagtatctttgatatcttgagtaatttttgaagctgtactcgagtatttgttgaaaagataattgtttctattgctccatatgtggtatatcatggctgccaaaagagaaacatgaattctatgaagtttgtcccctctgttcaagaccatccactgcttccagctaccgaaaccagtcggccacctcctcattcccagccacttactgatgtttttccccacctgctgagataactagcagtcaaagaaaaggtggccattgctttttgttgcattctcacagaccgggcattgtatgttgtcaagagcaatgtggaattgctcaaatttgtcacgggttaagagctgagagttgatagcttgccaaagaatgaacctgtattttgggaggttgaaagagcaccaaatgtacctgctgtaatcaaaaatagattgaggtatgctgctgttatacagcaaggcagccttgaatttcataccagcccctgctttgtgaatgtcttctcgcgtgaatttgtcccttagagaacatagtttcctccaataccaactagtgtcattcttaagttcatattctcaccaattattgcattttagataaatgttgttgacccatttcacccaaaggaagtccctttcggtagaaatagcccaaacatattttgcaagaatagctcgattccacttgataccatccttgaagccaaggcctccataggtctttggaagacaaactttctcccatgaggctacatgaagtttacttctattcccattccatccccatagaaatccccgacaaagtttctcagcctccttagtgacactatgtggaagaatgaatatgctcattcaataatttcttagcccaagaagaacagaatgtatgagttgagccctaccggcaaatgagagatgtctagttgcccatgtgtggagcctttgcttaattttcttgattatcacaccgcaatcctccgctttccatttagt

SEQ ID NO: 379708 - DNA, 1618 bp, Cannabis indica
ttttaattctaaaaactaaaaataacttaaaactaaacttggcctatgtagtgtggaatacttaaattaaaaaaaaaaaaaaaaaaaaaaaaaaaaaaacacttttatggcaaacaagtaatgctatacatgttgggtatctcattctttttttatgtacatcaattaattaaatttgtcacgtcaaaaaaaaattattaaatttgttacaatttattagacagctccgaaactatagaatatgatgatttttctttcataacactccactagtctagtaatgatttttctttcattactgttttgatcatgaacagctaattaatagtttattttaatattttcagaaacaaaattaatatacattactaaaaaaaaggcataataattatggcaaaaaagtaccaatgataattgtttatacaattgtgtaaggattggatcgaaggctaataaaaaatttgtataaatacttcactcttaattaaaaatgaacacaagactaattctataattgcctgacaacaagacgtattatcaaaagaataagtgctagctagtatgattaaatttcacacaaagggacaaacctaatagcccgagtgaatacctaaaattaacacttttgataaattttaagaagacgtgaattaaaatccttaatataagctcatatatattggtgtattgctatttaaggatcacatgtattaaaatatcaagggctaaatgtatagataccttaagcgatattttttaatttattgtggggttaaattaaaaatacttaaggctaataatctagctatgagattataagctgaaatgattaatcaaaataattcataaggtctctcggacgggacatcttgacaatcctagaaatgtgcgctagacacctgacgagacgagccatagacaagtaacatcttccaaacccagagggtagttcagatagatggctcccgaatggaaatccctctggtgatggtcccgagatgtggtagtagtctcatggtcaatgaccacgccagcatcatataaaaatcgctcttaaggcggttatacctttttctgagacaagatcaaatcttgtcccccatgctaggccatggtagtgcgggcacgcacctctggacatgtcttttacccaattgcctggttagacagtattttgcaaaggagagacctttgcacgacatgtgtcttgtttgtacgaaatccctcactgcagctatacgacacacgatgaagaaggttcttagcaactaatggttagattgtcctattatagtatcgacccttgcaatgagtagagtacaaaaccctaggtgggtaaagggtatgccctcatccccatgagtgcctataaatacttctattttttatgagcgaggggtgaacaatttttacttagagaaactctgctgaaattcctagagagctttcttctaaaaaatcaaaaggtatacagagattattattgtaaacacttgtaatactcatacatccaccctagaagactaatactaccaactcgtagactaaagattgttaattccatttttagcatatttaattgacaaaaatattttattatttattattattttcggct

SEQ ID NO: 379709 - DNA, 2303 bp, Cannabis indica
tgacaactaaattgctaaaaaaagattttacaatctcaccttttagcacgttaattaatcaaaatatttttcaattaaaaaataactctgcaaaacaaaactagcaagaacacaaattcaagaagagaactccccctaagaaacacataaaaaatataacaaaatattgctaacttttaaccaaagaataacaacacaaaacaaactcaactctccatggaaaaataatccaaagttgaacacacaaactaaaaattaaaaacttactactccttctttttgtctatctcaagagctaaaaaactcaaagatgaaagaaaacaaagcatgtttttgtccaacctccgtgatcgacctaagctctttgtctttgcctgatgagaaaatttaaagagcacaacacaagtaggagagtagagagaaagacatgtcaagaagaataagagaattagtcgtagagagaaaaaaaaacaattaaacaattgttagactacaaggaaatagaggaaaataaaatggataactaaatcaaaatagaaagttagcattaaataccaaataaccacccaatatcagaaaacaaaattgtttcccctttttttttttaaatttgaaaattaaaaaatgaaaataagaaaccaataaactcacatttttttaatattctgaattttcgtaaattgagagaaaaaaagggaaagcaatttttaacagctgtaaaaatatgtttgtggttgtttctagggtttcattgattgtaaatagaacctggagagcaaccaaactttttatctcttatagtttcatattttcatgtctatctttgtgaaaagagtgttttcttatgtaaaaacctagcgtgtaccattaggtttttatgtctttgtttttgttctcttgttgttcataaaataagttcaagataagttttgaagaagtgcgaatcttcgagagatgacttttctaagtctcattttgggaggatgcaacaacataaattacagttattggagaaataaattatttttttgcaaaacactgagtttcagaaatttttttattcatatatgaggttgtgacttgtattgtatgaagaactaagatcactggtcaagtataaaatagtcaacaatatattaaagttatgaaatcttcaatcaacgattactagaaagattcactgatgcttgttattcgatgcaagtaatctcaattcagattgttgatatagaaagacatctaggtgaaggtaccttatactaacagtgtaggcaacttgttctattctatggtttgtactataccaaatctagcatatgccttaagtgttgttagtaagtacatgattgatcttggagaggatcattagaaagctttcaaatggattttgagagatgtctaagggacaaaatatttaggacttgtttttggaagaaaatcagatcaacaagatgaagtctatggctatgttggcaatgattatgaagccaatatagacacaagaaaatcactcaccggtttagtgttttatgtgtgtagaaacacaatgagttagaaatctactatgcaaaaggtagttgctctctcaaatttgaagctgagtacatggcaataactgaagccttcaaagaagctctctggtcgaagggtttaactcaagagattggtttcaaggaagaaagtgtggacatcttctatgataatcgaagtgctctacatctgtttaaaaaccctacgatgcatgaaagaacaaatcatatagacatcaagtatcattttataagaaacaatgttgccaaaaaggtcaagttcaagcgaaaaacgtcaacattgtgacaatgctattgatatgttgaccaaaagtatgaccttacataagtttaaacattgtctcaaactcctcaacattgaagtgttgatgaaatttatagttattatgaatagtttttatgaattttatttgtcaccatctgccaattgttgtagtaactaaattaaggttaatttgttgtgtgattcaactacatggacaaatttatatatctacatgtcttgctgacatgtctaggcaattagtagttgcatcttaaaagttaattttctataggatattggcggctaaactaactgaactttacggtttgtaacagataaccacaaaaatcgaaattttggcagtataactacctaaaccctggttccgttttgctctgtacacctccatccaaaaattacagtaaagtgccatggtggactgtccaagtgtacacccttgtacacgtggcaaatttttagtggtccac

SEQ ID NO: 379710 - DNA, 1956 bp, Cannabis indica
cttaaataactacgattgtagttatactaacctgggatgtcgtccctctacttcattttgttcatcatctacagctttagtcattttgctaacccattgttcagcctgcatatacgacgcacaaagagatatttttcagactacaaagatagagattaatagtcagaagagtaatgccagtatttgcacaaagaattatgcctataactataagcaccggcatgtggattttggaaatcttataatcagtaagatttcaatacatctggcctttaaagattattatttcttaaaaaaaaaatttgaggaaaaatccaaacgcgaaagacccacatagagttttagaggtcatccaagtcattgtaattataaggactttatggagtcagcaactatcactcaagaggtaagaaaactggtatcgcatagttcaagcttgcccattatgaaatttaggaagccatcattataaagcaattagaggaaggaaaaagatccataaaaaagacccgaggaatgctgattcagtgaagaaaaagaagagtgtgtgtgtgtgtgtgtgtgtgtgtgagagagagagagagagagattaccagtgttaaagcgctgtttgacttaacaatgttgggaggactgaacttttcctttgtcatggtgctcgctgtagcttcctacttgacctacagacaccatgcatccatccataatcaaactacaatccaaacactatagcaactgaaatatagcagcaatggaaaagaagctatctgttttggaatcaatacatcaaaaccttggtcaaataagccacctgtaaattcatcgaaatattctcaataaataatccaaactaagtttgatgccttgtaaaattctttaaggtctactcaatctaacttaaagaagacgctactgaaaccattttagttctttatccaacatttgttttccttccacagtttactctaaccacaatctcataaagttcctttcttttccttgcagaaacaaaaaaaacaaatagtactaacattgaactcctaaaaaatcctagtcctatgtcatgtacacaaacttcaaattaaaagcaaagaatttcactccaaatgttcttcccaggagaaggcgaagaaaacaaagttttcttaaaggcacccggttgagcagctcttgtgcaatgttccccttagtagcagttttcttagtgttctatgaccttaaaattaaacctacacaaaccaagagtcccagctaatacttcaagttattatttttccattcagaaaaccacaaggatagtactcttacttttatctactcttctaaataaaccccacattttataaattaaatatgtaatgaaacaactaaatacaatttaggtagaagaaagtttacccagaatatgacggaacgaaaatatgtatatctgtaaccaaatatccaaactccaaatgctctctcttcttcttctttgtttgtagaagcaccaattcagtcaattctgatcaaatattagtcataagggaattagaagtcagatttgttttagaaggtttcacaaataatcaatcacgttaataaatactaattattcaaaagcatgatttctaaaatacaactcatgctaattagcctcatgccaacctaaaaacagtaagcaattactacagctagccatggcccatacatcaatctttccattctaagaatacttcagattcattattgcttttcaaaaaatagtcaataaagatgcaagtactgaagcaacatgaagtctattaagacataccaaaaccttgaataagcatatcagcatgtaaatttgagttaacaggcaagaaatataattacactagagatcattggggtatctttggattagtaatgttaggtaagcttgagttaaatgtaataattacatattataaaacacacaattaacattttaca

SEQ ID NO: 379711 - DNA, 1231 bp, Cannabis indica
aattaaggtgactttttatcccattaattttaaaaaaaaaagtgcgataaaaggtacttttttcccacttttcttaaaaaaaaacacggagataaaagagatatttttatctcgattttaatgataaaaactggaataaaaagtattatttttatcacagtttgttaaatattttttattttattggtatatatctcggtttttattttagcgaaaattaagataaaaagtcttaaaaatagaaataaaaggcattttcttgtagtagtgtgttgtcaaacacaaaaattaattaagaaattgtaataagacattaattagactcctctttgctaaagagtgatacataatttaatgctatttaataatgtctaatttacactaacactcttgtcttgcccatgaatttgtcactcacagtagtcatggtgtacgataaatccaacatgagtgtatgtaagcctaatcattcacttgggttttgcaagtaatgaaaggacagacaattgtaaggacagtatggcagtattttatgaacatatggatcacccacttttacagctgctatattatacgctctatctatattatatacatataaatgtgtttgtaagtaagatgtggaatcataaaacttgtactatcgtttggttgagacatatgggtcatgcttccacaactagatatatgctcttgtctggttctctttctcatatatgtgggtcttattttaacaagaaaaaaaaattataataataaataaaacgaactagcttttctatttccctaactttgtcattaaatcgggcattttattcattaaaaaaaatgataataaaaaagtgtacatgtatgtgatattgagatatgtttataataatatgaataagtttctcatgccgatgtgtaactagtacggtatactttattttattattttaattttttaaattttctactatttcataattgaatgggtgagaacttttgggtggattttgattttgatggaggagatataaagttatccattattgaacacactgacatatgatcatgatgcattagaaaatatatgtagtaaaagcataatcatgtagctcaacaatctcaagagatccttataagaatatttttattttagttaatatatttttatttaagaaaataaaataaataattaattttctaataattgaatatttttatattcattgaatctggacaaaat

SEQ ID NO: 379712 - DNA, 2543 bp, Cannabis indica
tgcattactcttgctgcccatgaggttctcaaaatgcttcacaaagtgtttgactacttcgtcaaagttatcaacaattgcatcctctttcatgaaagtagtgattctattctccattcttcttttcctcatagctgcatgaaaatagatagagttttcatcactaaatttgatccaattaatctttctttgttgccgaataacctgagtatacctgtcttttgtagtcacaaactcctgctgcagtttagaaatagaagtttgctgcattatatcagtcgggttagtagctgcttccttttgaatgagacagtagttgtccttagctttttttgtactccatagcagcatcccgaacattgtttctgctaaaaatctttaaagcatgcttaactctggacattttctgcactaaaccttcaagcccaaaactagcaactggtttgttccaattgtccatgacagtttgatgataccccagacctcccatttgaagcaagcatcagtattgggaaactcgtccaaccaaatgttgtttatgaacactctatcaagtttggaaaagatcctatctcctacctcatgcttgtttgtccaagtgtaaaaggaacccgagcttttgaattcctcaacttgacctaaagcaagccaagattgagcatccataatatctttactttgaataggtctacctccatatttttcttgaaaactgaacattgagttgaagtcaccaaagatgatccaaggctctttaagcttcccaaaaccagcaagttatttttttttttgatgaaagtgtaattttattgctcacaactatgtttatacaaactataaactagcaagttatttatcccaaagacatttacaagcttccattgagtcacttccatagacagtcgtgacatataaagaattcttttgaccacaaaacttaactttacaatgcagtaactggttttcctcacaaatgatattaacctggacatatttcatttgccaaattaataaaattcttccagataagacactactagaataatgattccaattaggaaaattattctccataatggcataggttttctcatgtttaaccttggtttcaaacaaggctccaaatccaatcaatctaagaacatcaagaatatcatttttcttatcctttttattcatgcctttcaccttccaccctaacatattacaagcattcatcaaaagtttgattagagttagaaacctcatctgttgcaacaacttgcaagactgcatatccattactcttgtttgcaattattggagcttccatgttcttggttgcttcactctgtctcagccctcttcttttgggggtaatccacttgctacctatttcaattccacctgtttcttctcccactatttgcttctgcactacattattcccctgatctggtattgattcaacaacatcagacttgggttcagtcattatcttctcccctagttctttgtcttgactgagaacatcatctttcttatccagcttattctctttttcaacaatctatttcttcttccatatcactttcttctctttattacagttaacaaccgtatgccccaagttcgcacatgtcgagcatttaaaagggagccattcatattcaaccatctgttctaccaactgttttctttcattaatgaaggatatagttttaggaggatcatccgaaatttcaatttcaacaaggagacgagcaaatttcaccattgtacgctcttgagtcaccttatcaatcattaccggtttgccaattgtgctcaccaatgcactgagattatttttaccccaatattgtaaccccagctcattcagccgaatccaaacaggaacagagctcaccattcgagtagagtctatatcagtagaccatggtctaagcaccacaagttttttctcaaagtgaataacaccagcttcaaggattatatcacgagttgcttcatctctaaaattaacaagagtgcaacctgagtgcattttaacaactttctcaactcccaaatgaccccaaattctcttcacaaatccctcaaaaaccttaaatggagggttagcacctaagacaatacaaacaatggcatttttccaaaacaaagcctctgcctctgcctcaatctcctctaggtcaagtttagccacaagctgatcacctactttgataggttcagtatacttgagtctagatgaaagagtaggtacctggtttaactttgaacttgctccatagatcctttgcacttgattggaaatcggctttctcagcttcgtcagcccagctaactgctttaggagaaacacgagtaccctactcagcatagtaaatctcaattccagtctcaatcgccaggttctcgcaggtatcatggaattcttccatttgctcacgttcagtggcctcatcttggattaaagggagatcctccacagcttcattgcccaccgtgatggtattgactggctttcagatgaccctcttcttcttcgccatgggaga

SEQ ID NO: 379713 - DNA, 4373 bp, Cannabis indica
ataataatgtacgtaatgaataagatcaaacactattttttgtatcaatatcaatatctttatttttaatttatgccaaaaaaaaaaaaaaacatatagcgtaacaaaaattcattcctcttatgatttacaaaaacatatatatctttcttgtttctttttcttattccttaaaaagaattctataaatacgaaaatgaagttaaaaaaaattaagctggagaaggataatagtgacaagaacagtgggattaatttgtaagatatatatatatatatatatatatatataatatatggtagtaattttatatatattattcgtcgttattatagtagtgagattcacgtacatcgtctttttattaatgaccactgtgtagtactatattcaagtctatatatatgttaataataacaactacaatgatcaatataatcgatcaccctatatagattttgatacattattagtatacataataattttccaatttttattcaaatccatattgaattaattatacgatcaagagctggcgtgaatatatgaaaaattattattggtttgatctgcaaaaaaataaatgccactatatatgaaaatttggaatatacctaggcaaaaggtatttttgaaaattggaaagatataatcaaatatataatatttttgttattgctaattgggaaaaaaaaaacagaagacggaattgaatttgtgaaaaagaaaaaaaaaatggttgaatgatcatcaaagtcaacttaaataaccatataattatcaagtcaacttggttgactaaagtacaggagaaatttaacaataaagtaagagaaggaagctgaagtcaactgagaaatgtaccaattaagaacagattaataaattaattaaatttaaactaagagaagtcaacttatttaataataagaatccccaaaagaaaattaataaaaaggaaaatattataaagaagtgatgagctcaaaaagtcagcatattttaccattttaatcatcacattgacattgttacaaaagcttattttgaaaaataaatattatgaagtcaatttatttatttttattttgtctatatatttatataggtcatatttgaagaacaaatcatcgattaatttgtaagtctaaagacaattgaatcaggtttatctgtgcatgaacctgtcagcttcaaaagaaatatttgtgtgtgtataaatatatatatatatatatatgtatataagtataggcttcgtatattaatccattaattgagttacataatattatgtaaacgcgttagaagaagtgctcatttgaaatgtttgaaagctcagttcataaattaatccttaacataaacttattataatgtcaataatttcaatacagtactatgaattaaaactcacaccaaaagccgattctgaataaataaataaataaaattatgtataaggtaaattactaaattaacactgtttggtaggaaagcaattaggatggaaagaaaatttaagaaggatagaaaattagaaagacagaaatgggaacatatatatatatatttctttcttttttgttttttatatcagaagtcattattataaatttgggttttagaggcggttttttaaagccttttagtgtcaattttagcgaaattcgcatgctaatttaggcgacgctatgatcgaatataactaacgctatatagtgtactctatgacgtcggttatttcatatggcgtcagttatatcctaataactgacaccatatgatataataaccgacggcaaatgcataataaccgatgccatgtcattacaattaatttatttatctagtaaacctattataaattcaaaaatttaatttatttaaattagatatttattaaattgaaataaatattatttaatttaaattaaatatttattttttaaaattaaattaattaatattatttaaattaactttataattagtcaatatactttttttttattaaggaaattagtcaatatacttaaattaatttcatgaaagtaattaaaaaaaatattaaattacaattatattacacaaatattttaaaaatagtttaagtgttaacaagttaataaatctaattacaaattaacctaaaaaaaataagctagggaagaaaaattcttctacatttaagcatttatcgcacaagccttcgtgaatcaccgctagcaatcgttctatccgctgtcactgtaatggtaacaattcagtttttagatcgtatgtcttctttttcccaaactgtaaaaagaaataaatatttatattagtatacatattattgtttgttaatataataaattcgataattaataattaaaacttataactttttgatcgtttatatataacgattagggtttttgcacgtgtgacgatgtcagtcatgtatttcaaaatataaataccacttctttgtttttaggttgtcttggacaatttgctagtgaaattcatggccacgctccaagaaacatatttgattctcctataatctcatatgttcttttttaaaaattattaacattttaattcattaacatatatataacttcgttaattaaaagatttgttacataaaaagtaatttaattattacctttccaacattgcattaatttgtgggagaactttgtggtcacatatatggtttaaatagataatttttcctagcacaacgacttctagcatccaatgcgcattaaaaaattatattagaatgtatgtaagatagtgtaaaaataatttcaagttttaatatagaaaataattttaaattatctcttaagtagtgttacgcgatattctaagaaataaagaacatttggtgttggttattcatcgatgataaccaatgagccaatccttgtgagcattctcaaaatattttttcttctttaaatttttgttatcgttcactgcgagaagctttgggtcataaaacttgaaaattcgtctcaaatcatttatgctctcccatatgtgttcgcattaaattgttaaatattagtgttttataataatttcaatagaatttgatatataaggttaattaaattaaaaaagagtatatatcattccaaaaaatattccttgattcccgataaagtcacacaacgccacctgctgcaaatcttctccagatatcgtgatctgggtacgaggtgttatgaatccacatggtacccgaattgggattatctcatttttatcattgactctcagaaattattcaaccatccatttaagtgacttgggaattagtgccatgatctctggtgtgaataatagatctgcttgatctccaccactttttcgataaggcgtgagactttttcccttcgacatcatatcttgatggtggttaagctagtggaccttatacaaaacaccatataatatatcaaatttgatcctaattctatcgaattttcagcagcataatgcctgtaattgaacgtccccaaaaattttaaagatgcaataacaaacaaaaacagataaaacaattaattaagatttacttcactatggttgaatagttaagattttcaaatttcactaatcattaaaaattaattaataacaaaagttacctcgagtgttaaaattaggtatttaggccaagaaaggaacatgtttgctactttcttaacgtatctgcacccctcaatcgagattgcgatttcatcagcatcctcttgcagcatttttgaaatgagaacccaggcatgtgaatcatcgtagggcttagtgtgaactgtgattagaccctcatgttcgtacatataataagctcgggccactatgttgccgatattgtctaagtagataaatactggctaattagctgccctctgttcaacaaaaattgtacttgacaggtaattcgtttagggaaacaaactcctgagcataatttcgtggaccctatcctcttgagcatattgttatggaacatacgcctgatgagtcacttgtctttcttcctcatctaaataataattatgaaacgtggacatttctccagttttatttatcttctaattagctaaaaataaatatacaactaccttaacttaaaataagtaaaataaccgttgttgttgactatgcatttcaatctgttgtggacaagctaatttatagcaatattttactcctcaggcgagacactaatgggggatgcatattaatcataggatttccttgtaagttttggtccaatttatgtggacaatgtcccacatggaataaatggtagagaattgagccatatataagaacatgggctactccactcattgcc

SEQ ID NO: 379714 - DNA, 4536 bp, Cannabis indica
gtattgattaaattttatcaaaacaatttgaatttagggtaccagataagtataattttaaaatacagggtaccaaataagtattattaaaaatacagaataccaaacttggatttagataaaacacaaggtaccaaatgtgtagacacccttctttgaaaaataacataaattattcccactttataattaattgataagaaggttttttttttttttatttattattataaaaaatcatttaattttatttgttcatttaaaactttatacgttcttacattgtactttaatgagtcaagtaaattgatacagcaaaaattataaaataaatcaattgtgtaatataaattctaactattaattaatagagtataatagatctagttgacatacgaacaataggttgacatgtaaacactataatttgggttaatgttaaaaatattgtcaaaatacaagtagtcttaaatcttaagaatatatgtacaacctaattagtttttttttttggttgtgaataaagacatagcaatttatactagaacgagtaatgatattaaccaaattttatattagaagtttaaacattaattttgtttgaattgtgaaaatagtcaaaaatctacaaagtgggaacttttataaaatataatagaatacttagagttaggtgaaggttgagttcggttacctaaaccctcatcaaagtccaactgtacttgaaccaataatagctcaattttaaacggatatatattcattgtttgtcgagcccttctttcccaaatttttttcagaaattgtaactacaaagaaacatagatgatgagtacaaatgttacaattacaacaaaagcaaggagagctaagctctctaaagtaaccacctataaagtcataatgcatcttgagttttattataatcatatacattattatttcttagaatatgataaaaagaacacattagaaaatgtagataagaaatcaaggatctttgagataagaccagagagagctgaaggatctttccatttatacttgatctttgttgctaattgaagacaatctgtttcaatgtgagtgatagacaaattatagctgagcaccacaaaagagcataaaagagagcgtgagcaacatccacattcaatttgtgctctcctagaagcattagggaacaacttgaggggtccctagatgaagaattactcttgctagcctcagttttcaactttacagcagaaattttttcagaatggagagattgagcatccttgtaatcctgcagaaaagcttttgtaaaatcttctacatctgagaaaatgttaacatttttattaaaaagagaatcattcttttctgaccaaatcaaccagataatgcttaggaaaagaataaagtcctcattatcaaaagtatcaaaaccactcagaaaaaattcttttatatcacaatatttattttgttatagaattgatgaaaggaagtattcttccacataatttaagcttagaacagactataaaggcatgagtaatagtttcatctttgctccttcagaaggaacagatagggctttctataattcctctcctaaacagattaaaagcacacgacaaaacatgattaaaagccttccaaataaagtgtttgatcttagaaggaatcttgatagtccacaccaactttcaccaaggtttaaaacagtcaggaaaggaggaagatggagaacctgaaacagagcaagagttagcaaaatgataagctgaatcgactgtgaattttcctgatggatgatgcccctaaatgaggcaatcatccctaaatggatgtataggaaattggaggagaacatcaacctggtaagatggaagatagtgctgaagcctactaagattccaactcccatcagcatcaataaaaaaaagagacaatgttattaagagagaaaacatcatgcaaaaaagtaagagaattcaaacctggaatctagcgagagtcacccaaagagatagaattatcattcccactctccaaattagccccttcaaaagaagcttccttccccaaagtagactcctccaagtgatagaagaacaatgtcccttaagagcgctaagaaaattattatcaagaaaattattatctttgaaatacctcgctttgaacaaacaagaaagaagcgagattgggtttgaccaaactctccaagccttcttagcaagcagaacttggttatgattagttatagattgaaacccaagccccccaaaaaattatgaaacacacagactaggccaatttttccaatagaatttatttttgttatttgaggatccccattagaaatttgcaataagtttttgaatactcttaccagtatagcttgacagtttaaaacatgacatggcatatgaaagaatagcttggactaccgtttcgataagagtttctttaccagctcttgaaaaaaaaaacttagcattccacacattcatttttgaagagacattttggaccaggtaatggaaaacagagttgtcaaccctaccaacacactgtggagcccccaaatatctgctaacaaaccctcattggtaagccccagatggttacaaaaactttctttagccacatgattaatattgggggaaaacaaaatagaagacttagcaaaattaaccgactgaccagtggcacgattataagtatctaaaatacttctgatagcgaagctaatgttctcattaaaaggggaaaacaaaatactgtcatcatcaaaaagtaaatgtgagataacaggggcatttctatagatagcaaggccagaaaattctctagccaactctttaacacgaatggcagtagaaagcccctcaaccaccaacagaaataaataagaggataagggatctccttgcctaatcctcctggtagagttaaaaccttcagaaagataaccattaaccaaaattttaaaagagatcgaggagacacatctaagcacaagggagacaaacctagaaggaaaaccaaaatgcttgagaatggcttcgacaaagctccactcaactctgtcaaaagccttctccatgttgagtttcaaagaagcccatcccagcttacctttcttcctacaattaatggcattaacaatttcattaacaataaaaatattattaaaaaatcaacctatcaaacaggaaagtactttggttgctagaaatgatagaattaaggacaagcttaattctatttgctaaaaccttagcaaccaccttgtaaatggtagaacagaggatgatgggtctgaaatccctaattctagaagcatttttttcttagggataagaacattaactgtatcattaatacgagagatatctgagttatcattaaggacaaccaaaatggctttacaaaaatcaaaaccgagagcagtctgatttttctggtagaagaaagcattcaaaccgtccaaacatggagccttgttcccaaagagatgaaataaagcctccgtgatctcatcctcagtgaaggggttatcaagtaaggagacttgagaaggagaaatacaacaattgacaccagcaaggacataaaaaataatcacatagtcacatccttgagtggaaaacaaagaagtataaaaattaataaaatgtgaaacaatagtagaagttctcctaacaataaaaccatcctcaagagtaatagatctaatgaaattgatctttcttctagcagaaacctagtgatcaaaaaacttagtgtgtttatctccaactttaagctagtcaactctcgacctttgcttccaaaagatctcatctttataaagcaaagtatcaagagaagcctataaagccttggctctcacaacatcattgtcacttaaaatgctggagttataactcctatcaaagtctttttgggtggtcgtgatgtgattcccggcagtaccattgttactacttcaagacttaatattattaatgcaggccctttgcttattcataaaatactcaagactattaaccatattctcatcaccattagtacatcaagaagagctaacaatatcataaaatttggcatctgcgagccaatggttctcaaagataaagtgtttcttcccattaaggcccctaagatcatcctcaaaaataatcttaagagccctatggtcttaaccataaaaggggagatgcaacaaagaagccataggataaatatccccctaggtatttgtaaagatcgcttaactttaatttagaaattagcatataaataagatttaattatgaaacttgcatattagttatgaattattatttaacggagatttatttgaatgtagaatgcattttatatgccatatatgaaattttatattttatgttttgtgcccaatcacatttactatttttagtatagtaggataatatagttagatatcgggaatgtcgggacaacataaaatttcaaaattatataaaatataataaaataaatttcaaaaaaata

SEQ ID NO: 379715 - DNA, 1995 bp, Cannabis indica
aatgtcagaaagtcaaaagggtaatatcggtatttgggatccttgatttgtgatgaagtaaataggggagtgccccattagcaagagctcattaattatgtgcaatattgggccgacctgaagaaatttagccatgcctttaggagaagcaaaggagtttgggtgtaatgataaaaaaatattaatgcatggggggaagtactacacacactatgccaacagccaaatggacccttttcatacaatactagttgacgttttccgttaattaaactatatagttgaattgaaccctaagatgggtcttagtacaaccaatctcgttttccatacatattactctttacaattataattataaaaattattcaataattaacatgtaactgcaaagttagcaatctctcaaggctagagagaatacacgttttctatgtaacaagtaatattggaaaccatagtgagtatcgaatggaagagcaacacatgtcatgatcaaatcgcgcgtctccttttcttttttatattgtttgactagttatgtttacaatgaacgttttctattaataatgatcatatataaattctgttattagtgcagtgttttttagctttgtccctatagctaacaaatacgtcttattatatataatcatatatatatatatgatgacagattcaagcaatagaaaataaattaagaaaatgaaaattgatctgcgcggcttcaatttaatactgtttgtttatgtttatgctgttgccttgttgtagtgagaattaatgcatcatcatgttaaggttctttctattatttataactaggaaacaaattaaaatttgggtgcagttatattttgtttagtaataataaactataatagaatttgtatttgttatttttatttctttatttcgttagtggactactgctgtgagcttcttcctttgtggtccctttgcaccactttaaatactctgtattaattgtttcctaaaatggtttgaggaaatacaaaaatctttgccttattctgagatggtattagagctgtaaaggctcctccaatggcgtctgaaaagtacaggctcaacacccttgcttgaaaatcaacaacaaaatgacccaccaaattcaataccaaacgttactaccaatattgttgctttagccacttaatttccttcagtcagccaaacactatccatcagacaagttatcttgtttggaagatgcagatgctcaacatcattatccctaatggtctattacaagaaatataacttttagctactaaaaattttagtagccaataatggatatgtggtagctaatacatgttttgctatcaaattttttggtagcgatttgttagttcaattatggtcgctaaaagtactatgctaccaaattttcaatagttgttgctattctttttataacaaaacatatttattctagtagcaaaattattaaatttaaatatccaataaaattatcttactaccaattttttgtagcaaaatatatcaaataattaagaataatattaagtataaataatttggtagcagaaatctgattttttttcttttctttaatataatatatattattaatttttcaaatacattatcaagaacttaaatatattatgaaatttaaatatacaaaaatacttaaatttattaaagaaatttaaggtatataatttgtacacgcatcgattcatagatattcaatcacatttttaagtgcacacatgagcaaatctagaagtagtttggcttcttgttttggaatattactagatccctgcacttgacaaaactgcggagagttccaggtgaaaagagtcctcagaatatagtatgagcatctttgattcttctccaagtctaagagcttaagggttcgtttggtatgccgtattacaccgtattgtattgtacagtattatattaaattgtacttcatgcaatatttgtatgtaa

SEQ ID NO: 379716 - DNA, 7454 bp, Cannabis indica
ttattaaaaacaaaaatggtaatcaaatggtatatgcttttatgtcaatatttttaggatatatgttgtgctattttgtcataataacaagaatagaaataaaacaaccgaaaaggaaatttttttttcaatctcatcatataaaacagctattgttcaacaaaaaaataataatatagagctgtgataagaaagcatttcttttaaaaaaaatagttgttttaggaaaggatgatttattttaaattatataatattttttttatcagaatcaaatgtaagaaaggaaaaagatccaaccaaaaaactttaaagcttaccatataaagatttattttaggaatatatgttaggttttcctttgactaaaaaaatccaagcctggcacccaaaaatggaaaacaaataaaattttaataattattttcatacttattttgacaaatggcttgttttgtttcatttgaaaagaaaaaaaatcttactcatttatagtagaaaatatcatacacaacacacaaggattttttcatctatgcgttacacatttggtcaaattatgcatttattattactagcatttgttgtatataaatacacataatacttggcatagtttattctaacctaaatagagtgaaatatcatatacattttatagttaagagtttcaaatatcatcatgaaagcttcctatatctcttttattattctagctctcctcctcattcaaacctcaggtaaaaaactagcaatgctataacaaatatactttactttcattggtgattttctgtatagatatataattgcattagccattacaattttttttttttcttttggatgatatctctttattattttgaataactttataataaataaataaataattaaacaggtaaaaaggaagttgtagatgtaaatggtgttgaaggaacagggagctcttgccaagaaactgctcaattacccaaatgcgacaacgaaacatgccttcaatattgccaatccaatgttggctcatatatgactgattctgaatgtctccctaacggactttgttgctgcaagtgatcatattatgtacttcgcacacaataaaaaataaaatatttttcatattacattttatgattaattaatgaataatatttttttaggtatttcttgtttggggtaaaaagatgtactgcatattaaaatttaataatattgatatgagtcatgataatataaatatatatttatatatatacatactaggtttggtttaggagtcagaggcacaaactcataggttaatcatatgttttgtataataattattagttatcatatatatataaaaaagataaaggtaaacttaagagactataatacattaaaaataaaaatagcatatttacattcagccaaaaaaaattcagaatatttacatctagcaaaaaaaagcaatatatttatattcaaattttattttaacagtaaaagtatttggtcagtttcaaaaaataatctctcactgactatgatattatctttagatagttgtggtggattagatattaattgattcaaaagaaatatgtacaagagaagtttcaaaagatgtatatacaactttgagattatacagttttcacttcgctagaggaagtagctgatatgctatcaagagaagtacatgaagcatcaaaaaactcattatcttcttcaagaacacattcttttcctgttgaaattgagtcattatgttcttgaagaacacatttcttacaagttgaatttgtgtcaccatgtctttcaagaacactttattcaatagttggaattgctggttttagtgatgttggtaaaattgtagtaacatatattttcatggcacttgtattaccagcaaaagattttatggtcttcaagtgtatggcgtattttccttggtttgatgagtgattgattctatgcaagcagttaattgtctcctgtatattgtgggaataataaaaaaaatcagaaatatatcaatgaaaagaagaaaaataacatacttttttggtatattgtgcgagtatatttgcagaacaaccaagaaagatttcaataatttttccaaatgttataacctctaagtttcttgttgcatcatgaagtttgacaacaactcgagctttgtaaattggtgaatggcagtataattatttaattatacaagaatgaaagatatctcatatattatacttataatgaggaatcaaaatataatgttatcatcatttaaaattatttgagatgtatattagctgtaaaattagctaaaaataagctaattagtttcctagtataacttccctaagttgtgtataaatacataaaatatttcctcaatgaaatacatgttatattctctccacctttatttacatggtatcagagcatcaatttgaaatttaaaattagggtttattaaaaaaagtgcaattagggttcttcatttttagggttccatttttcggaaaccatacttagagagaaagtaatatctcactgtcgataccattaaattgcctagtcaccaatcaatgtaaccccagagtttagtgatctggccctctgcgcatgagcctcacacatcgcctaaagatccagagacttctcccacgcaccgacgcatgtaggtgtctgactatacattttctggccattttttgctagtttctaaccttggtgtttttgacttagttccgtatttatttattccatcaagttctttttcgtgattgttaaggtttatttgttatactttcttgtggttcttccctctattgctgtccttgtttgttggttcagaattatggctaaaaataagtcttcaattgtgacggatgtgttgtcgttaatgtctaaaattactgatcataaactcaatggttcaaacaatatggattagagaaagactaacttcctctatttacgaagtattgacaaagatgatgacttgactcgagatcctccaaagttagattcaaaagagatgattgatttgacatggcttaaggaggatgctcgcttatttcttcaaattcaaatttccattgaaaataaggtaattgtttgattaatcactatgaatttattaaagaactaatggattatttgaaatttttttactctagaaatggaaatctctcccgcatgtatgatgtgtgcaaggtattttattgtgtggaaaaacaagatcaatcacacataaactattttatggctttcaagaatacatatgagaacttaatgtgttgttatcctctagtcttgatgtgaaggttcaacaatgtcagagggagtagatggctatcatgagctccctagcagggctctctcctaaatttgattccataaaaacgcaagttctttctgggtctaatatcacttctttgacagatgcctttagtcatgttctccgtattgaaactacttcatctgatttacttactattgctttggttagtcacaataattgtaatgtgtcagggaaatcttctacctcaagtggatagaatggggatatccataaggatttgatagtcgaacatcgaattctggaggaatttttgcaactatagtaaaaaacttagtcacacaaaatttgagtgtagaaagtttcaatttaaaaattagcaaagacagttcactaatgttgcaagcactggtgatgcatctgacaaatcggtcgttatttctgctgatgaatttgccaagtactcgcggtaccaagaatcacttaagtcttcatctccttctgtcactgctattgttgattcaagtaaatctaatgcattccttcttgccacatccttaaaatgggtcattgattttggcaccacatatcacatgataggtaattccaatctattttctaatttttaatctcatagttccacttcaacgattaacttagctaatggaccttcttcttatgttcttggatctagcaccattactcctacacctctacttactttatcattagtcttacatttacctaatctatcatttaatttgctttctgttagccaactcactcgtaatctaaattattgcatcccattctttcctaatcattatttactttaggatcttatgacaaaaaagactattggcaaatgacatgaatctggtggcctgtatgttcttgatccacttccaccaatctctatttcttgtccaagtgtttcttttgcttttgaggcccattgtcatttgggccattcatccattcatctgctcaagaaattttgtccccactatagtaaagtgtcttcattagattttcagtcgtgtcagttttcccaaaattatcgtgttaatttgagtccttgagtcaataaacatgctagtgctccttttgattctgatgtcgggggcccttctcttatgttgtcaaaacttaaattcaattattttgttgcttttgtggatgattattctcatgtaacttggttatatttaatgaaaaatagttatcagctgttttttatattttgtgctttttgtgctgagattaaaatcaatttaatgtatttttttgtactttgcaaagaatgccaaggaatacacatctacttgatttcaatcttatatgatctgtaatgacatgcttcatgaaacttcttacaatgattttgcaccccaaaatggtgtagcaaaacgtaaaaatagatatattcttgaaattgagcgtgccctcttgtttcaaatgaaagttcctaaaccttttttgctcgatgcagtttccacaacatgctttcttattaattgaatgccatcctcaacacttaatggtgagatctcatttaaaattctttttcccgaaaagtaactatttccagttgctcctcgggtatttggcagtgtttgttttactcgagatattagttcacatgtcacaaaattagatctaaagtcattgaagtgtgtctttcttggttattctcgtcgtcagaaagggtataggttttattgaccatgtcttcatgcaattaagtaaaaaatttcgaggtttgcacttagaaattttataaaagcaatttttattttgagcaacaaatccgtaccaatgttgagcttcgtggtcgatatggtgggttttatttcaacttcttctagctcgttcactagcccaacatttatcttaggttccccatggcgaggatccatatctttgtcctcacttggacgtattcctattggacaaagcttttacccttctctgaactctggctaaaattgtcttcctttttggccttagatagagcgagcttacaacattctcgtgtagttttttggtttcccttcaaacaacccactccatttcttgttaggttttacacataggtggaatacaaaagtgatggccttcagttcatgtaaggctagtcgggctaatatgacataaaaagcagaaggcacatcgatcactatgaattgagccatcaccgttgtgcttgttgggtcttgtcccactgtaagaggtaggtggatctatccgagtggggcaacactttggctgaaaaatccatatactagctgagtgcaaggaactagatctttgagttgaagtcccatctttccatatattgttttgaacaaaatagttgaggaagctccattatcaaccatggtccgagtcatcattttatttgcaatctgaacatcaacaaccaaagggtcattatgtggataaataacgtggtcagaatttgcttcactgaaagatatgattgattctccaacatgcgattgcttagactttctttcttctttagctaaaactacatctgtctgttcatattgtaaggcccgggcatatttcactctagctttgcccgagtctctagcaaggtcgggacctccaatgataacctgaagaggtctgtccactggtggaggcatcaactgattttgagtgttatatggtttggtgccctttattcctggtcgatcttgacatattttttcaagtaagggttatttttcctaatgaggaattctaattcctacttcaagttttgtattcattagtgtcgtgaccgtagtccatatgaaagcgacagattatagtggtatcccttttgctcatgtctttcttcatgggaagacgttttttatatggtaccatggactgggtagttgtaaaaattgtctttatattatctgttaggatggtaaatgcagtaaactttgaggcattctcgcgaggatgttggtcggagttgccactgaatctacttttttttttccattaccttatttatcgccattatatgttcttttacaaccttggctcaagctgctgtgattttgtgaattctggtctggctagatggatgtattggttgtaggggcatgttgttaatttttcttcagtccaacttgtccacacaccgaactgcttctttgagctttacaaatttttcttcttagtccaagaattctaccattaaccgtatagtaagtttctttatgtctttcgccaattctcttagggcttcgatacctcataggattgcatctagcctctcttactcggccagtcctttcacttttgttgctttaatcataaatatgctgatgtaagctcttaagggttctcgtggtatttgtttcactttgactaggtcttctaagtgatatgggagtttccaagaagaagagaactatgtgtgaaactctgacatgaaagaattccacaaactaaaattccttgaagccaacatgaagtaggactgctaggtagcctctgccgaagtagctgggaagattctgcactgtacatcacctctcactgcttgtaagtccatttgcatttcaaaatacttaatgtgagacaaaggatcatctttgcccatgtacgttttctatgttggcattttgaactttggcagtaggtctagagcgttgatttctagtgagaatagtgattctctagtctgatcaggttctagatctatgagttttgggccgaccagaccttgaacgaggctcttaagttgatttatttatacttgcgctaatggattaacttgacctacttgttaccgacctgtgtcatattaggatctcttagaactggaccctgtacatagtaatttgtattatctagttgtacggtaagaggaatatcctgttcgtctaatcccattctacaattaaaatcattcctaaggtcatgcacggtacccaattgggtaaaggttgattcgcctagaggcccttcttgtctgaccattgtgaacaaggggttggcccaatacctctgtttgaggactagtgttaggttgatcattctctcccaagtagcgagttggtaaaacttactcatctaccatttggcccatagtttgattctgtggcctaggattggacggtccatctgttgggttttgtgccct

SEQ ID NO: 379717 - DNA, 1484 bp, Cannabis indica
ttttagtgctttaattacttttttggtaaagtggtgattgaagctttgtatgaaatggtctaattgtcattgaatgatctttgcaggccataaaattaatggaagtctcattggtcctaaggtaagtaaaagatttgtaattgagtaatgttattaagtatattaaggtgtttaataacataagaggtaatgttttataaatgattaatagtttcttgtattacaccaatagcgatcagggtcggtcttgagtttattaggtcttagaaaaaataagttttttgggctcttattaaaaaaatagatggtattttttaaatattcataaaaattatccaggcccttagactggatggatcataggcgcatgcttagctcgccttagtctaggaccagtctaataacgatataatgcctacttgtgatgttgggttgagcaccttaaaatgcacttcaacatttttttgtgatttaaagaagtttttgttttgaattttttttccctaatgatttaaacttcatattgcaggcgaaaggaagtacattcatcttcatttatccggaaggattgagaaaacttctgtgtttcatgaaagacaagtaccaaaatcctaaaatcattataactgagaatggtaatgttaatatagattaatttgaacaaattatttttatttaaagtgacttgccacaaaagtgtgtgttatatttgtatgtaatcattactttacataaaaagaacttccaaaacatacaatagaaccacgttatcataaaaaaatataatttttaataatgtttattttagagtagactacaataaaactttcagaagtttcacctcactagtaattaactttctaaacccattttttggcgataaaatcgtctaaatccatattctgttaatagttcatcactttcatccaattttagctgcgaaggtataatgtctatttctcgaactaaaccgatcaaaaattaggtcacaagcacacataatagctatttcattaatgttaatatttttgaaattgcaggcattacagaagtaaatgatcctaacaaaccacttgaagtagcattgaatgatccacatcgaatcataaacactcttcgccatttatataagatccatcaagcaatgcagtaagtcttcaaatgaataatatgtctatcccttattgacttatattcatttaaaattttcatttttagacttttaaaatataagtttacaaaatataattttttttttttttatgggaaaatattagaaaaaagttaaaaaaaaaatgagaaaagtagtatgtcataagagtacctagtttatcatatttttaactaaactaaaattttaaagggacacaataatacataaatacatagttcaggtggcaaaatttactaaataactaaatgcatgtttgacatcataactaaaaaactagttttttgtttttaaaaattaaaaaattagtttt

SEQ ID NO: 379718 - DNA, 5136 bp, Cannabis indica
aataactcattcattttatatataaaatatttattattaatgaaataatgtaggactaattttaatatttctatacataattattagcttgtaactagtacaatttggttacttattttgcgtctctaggtgtgtacgcagataataccttcttaaacaattttgctgttaaacattaatggtcaactcagcaatatataatggttaccccaagtatagctagtgacaatcacgtacttaaggaaaaaaatatataaaatatacaaatatggaaatagcacatacattatatattgtaataagaggtaagcagtacgcgtttagaaagaaaaaaaaatcttgtggtttttaattaattgactcgaataaataagtcacattgaaacttagaatagttacggttcctctcatctaggtgtcaaaggaaaaaacaacttgctctgaatattaacaaaaatcatatacaagctacttgtttagtaataaaaaaagaaaaggagagggcattgactagactctagaggaattctaaagacaaatatacataaatatatgtatatataatgtgtgtctgtgtcagtccaaaatccaaatccgggtgcttcgttaatcattcaaaaaacctagctagcctcaagttaataagacgatgtccccagtggggaaaatttaataattaataatgtctaaatctatagggaagtcaatttaattcattgtacgtttatatgtgtggaaacatgtatatttaattggtttaaacatattcccataatcactgcaaaaaattaggtacgttttaggtaataataaaccacggcttgaattaaggcaagtaggcttaatagtggtagttatactccatgctactgtatataggtttggtacattcaccatcgaactcctcacattttatacatccttatttcttctgtgttcttattcccacaatatatattcaccgtagatgtatatttattccattttataaaccctatttttaattattattaatatcaacattaatttattttcttctttttttttttgttgcataaaagatatattaatttattttcctacattatacgcactcaaagtaatttaaacttagtttataattgcatgcaaggtcattgatcgattgagattgagtcaattaatatgtaaatgggtattgcataaggaaaggaaccatgcaaatggccttaaataaaagagtattgctattaggcaccagtggtgcctaacaccttcttgatatgtcgcgttgcaattggctagcgatactccctaaaagctattatattaaattatatgggacccgatacttaattggaccaatagtgatattgacacattggagagtgctaggcaccactagtgccgtttagcatttctctaaataaataataatcaatagttatagtcaagtcaaccgcccaatattctgtcatgaccatacgtgcacgaagaaaggaggggataaaggggccaataaggttacgaagttgtaaataatattaatcttttctctttttcttttttggggcgtaagacaaagtaatgaaacatacaaatacttaatcaaaacaagttaacaacccacttagagttttgttttgttgaaagtaataaaaatataagaataagaatgacaaagatactctgtctagactcttcgctctttgttttcctttcacactcaaacccaaactattttcccatggtgaaaccatctccaagttccagatctcgaggctctggtgactcctcctcctcttccaactccggtcatcgtcccagtacccaccacaactgtcgcatcaaccttcatcctagagctcatctcgactagttccctcgccaacgctccaacacattaatggaattcttccaggtacacatccccacactataatatctaccctccatgtcaaatccacaactcacacctagtatttcattatgaaattacttttaatgggtgttttagcatttactttgtctgattgtataactatcctctgctaggtaacttagaaaccctccccctaatttttctaataattacatctatataattttcaaatggtatctggtttgtgaatgggactgttagtgttcttgtcactgaaattttttgatgggatgtgcagttaatccctcccaaattaattgctatggccaatgtttttaatatagaaggaattttaccatttctggctctaccacttgatccctagttttctagtacccaacctaaagtagcaataaccttttttctttcaccaccgtgcaaatactaatctctttcaatggatggcttagcttcttctttatctgtggcccttaatcttacagataccgagattgtccacaccctccacgaccccacaccctctgaagtcctagacccaaatgtcccaaccacaaatatttttctggttgcaaaacttcataccatgaagccctttaacatgaaaatttttatggaaaaaatgtcaagtgacttgaacaagatatcccggttccttgtcaccataactaaatgaacaaaaggactttttctggtagaattttgatgcgtaggagaccgacataaggttcttttgcagcaaccatggacctatctgaaccatgctatccttatggacatccctagctttgtggatgtcttaaatggagatagcttaatcaagctcccgctttgggtttaagtttttaacactccttttctcaaaagatttgagcaattagttgaactagtttcaacaagcttaggacaccttctggaaatctatcgaccctccctaagagaaacttggggaccctatttccgtgttagggttatggttgatgttgcccttcccctgcctaggggcatccctgtcaactttgttggaatcaacaaagtggtttggcttgaactcgagtatgaaaacttacccgacatttgcttcttctgtggacgcatggggcatagctacaacaatagttgcatggactacatgaaagcttgtgatgaggccccacttccaccgtatctcaagtaagatagcaaaaccatcaagggtaaagttaaagtttctactaatccttttttgccttggcctgagcagattaattttgcctgtccctttgtcaccactattatgacatccaacccagctagtaatgtttgtgttcgctccctgaaaccactccaacaactagctgaccaacaaactcttttagacccttgccaactcgctggcctttacaagtctaataaccaagaacaaccaacagaaaacacactttggatgaacaataacctccagaaccaagaaaccaaccaccaaacaccaatgaaatccccaccaactttcacagccttactcaatgctaccatgagtagcatcagcaaccaataaactatcaaaacaactaactcgagcctatccaacacttcccaaagctccagcagttcgaaatccacaagctcaaaatattgccacattatcgtatcaaccaacatacccctcttagacacaagcaccgacccaaaggctttacccctcacctttcaactaggaactgccaccggaacaagctccaagagcacacaaagaaagtcatcttccaaaggtaaagagagcttcaaaagacaggcagaagtgattaatggtgaaactcggcaattgatcaagcgtactttatcagagaacctagctgaaacaaaaatcaccttcttagaggcgggccctaggaggacagaggcctgcctaaaaccatgaagctgctgagttggaatgcacgtggcattgggagtgattgtgcattatataacctctcttgtctcacctatgtctgcaatcctaatattttatttctcatttccatctcacttgtttttatggctctcccaatgaggcccaatgaatccacacttggaaaattttgcatagaatcagtcataataattctattgactagtggatcatcatagatgattttaatgccatccttacaatggatgacaagattggtggtaatcccaatatatatgggaccttctaacaattttaaaggtttcttagatcattttaatatgtcccccttcgacccattaagcctcaatttcacctggaataaccataatgcgaacaacaacaacatccaggagcgcttaaattggtgtattgttaatgcaccatggtcaagaaattttcctaaggcttgccttcatcataaagatttccttggttctgaccatcgagctttattacttgacactgttggcacaccctcacagccctctcgaaataaaaccaaacacttcctttttgaaaatgtttggttgaatgagttgagttggaataagacccttgaatcctcttaggttacccaacgggactcgccttgtaccatctcacaccttattgccacctaatccacctgtggggatagcctcaatgaatggaacaacaaatcaagtttccaactcaaaaattgaatcagcatcttgaaaaaagatctcgaccttgctaagagtaatcattactgggatgagaacactatccacagaataaaaaacccttcaatcccatcttgatagactcttgctcaaagaagagacttattggaagcaaagagccagaacccaatggctctcgtaaggggatagaaatacaaaattcttccatcgtcatgcttcctctagaaagaaaactaatcagatccacaaactcgatagtgttcagggaacgaccgtaacttcttttgaggacattaccaaggaaattgaacgctattttatgactctgttcatgtcttcaaaccccaactttgaagacatacatcataccttggaaggcattacaacatctctttccactgaggacatccaaattctctaggaaaccttcacaaaagaagaagtggaaaaagctttcttttggctaccacttgataaaactcctggtattgatggtttcaacaccaatttctacagtaagaattggtcttttgtaaagcatgacgtggtggctgctgttctccttgcccttaatgttggggggatatcacaccgctaaatcgaactcttattagtcttattcctaaggtcaagcaaccaactgttggaaattattt

SEQ ID NO: 379719 - DNA, 4661 bp, Cannabis indica
acttaccataaaaacaatcataattaccaacaacaattccatttattaacactgtcaaaagtgataaatcaatttaggctaatcatgattttaaaaaaataaataaatagagaaaaagaaaaggtcaatccccaacaacaagaggatggttgcctactgtacggacccccctaatatgggtcccactagatgtcattgacatcactctcctcgtgggggtgtgggcccattttgagatgattaaacacccatgtggctgtggggttcttcattgcacgtgcatttctgcttttattttttattttttaaaaaacaaaaatttattattattctctcttttggtcaaaattaaaaataccaccacttttttatttattaaaaaaacaatggtcctcactcagtcggtctatcctggctctcaacccttttttttttctcgggaggagagaaattgcattatttgcataagttaagaaaagaaagtacagtcaagatttaaaaagtttctgagaaaaaggaaggttaaggcaacacgatactgaaaaaaattgcctaaaaaggtcgatttccacactagtggaggttgtaaattaaggtttccattagtcttatgtatgaggttttgtttttctattggacctcatcctcatatttatgaattatgattcatgttgcttcagtttctttcagttggttattatatgttattaattattgttattattttattttatacctaaattgagaaattgatatccatgtagaaaagtcacattagtgaaataaataataaaaatagagagtgaaaagaaaatgacctccactaatttatatacccctctctatatatgcattttaataattaagtgtccttttctatacttttattttggctcaaaagtaatttagcaaaagtccaaaacaaactcaatacatttgtcaatttgcccaacttgattattaccctttaaattatctctatttttttacatgctctttttttttctctattttgtggtaataaaggagatgaagcaacaaagtagtgatcaaagctcaacatcatcaagtaattataattatggtaataataacagtttcatgccatttgggggaggaccacggttatgtgctgggtcagaattggcaaagcttgaaatggctgttttcattcaccatttggtccttaattaccattgggagttagctgagaaggatcaagcttttgcattcccttttgttgactttcccaaaggtctaccaatcacagttcgccacctcaactcttgcatataattcattttctctatattcaattattattattagaagatcaagagatatatatgaaaatgtctatgatgatcataatatatctatatatatttctctatttcgggtctcttctcccatgtttggatatatatataatagaaagtactgttcaacaaagccccatttgtatgtgatgaaaatatatattagattgtatttttcttcttttagaattttccaacggcttagtgcaacttctttcaattaatttcatcacatcaaccaaagccaagataagcacctttatttatatatatttatcatatattatgtaggaaagaaaaaaaattcccttgtaaattttatctgcctctcatgactagtacttgagagttttttatttacttgtatgtatgtttatggctctcctttgtaacccttcttcccttttgttttttttagtataaaaatgataataatttatttggattttattctattatatgtgacaattaaataataccatatattatacgtacgtatacttgcatgcatgtttacattttatatatattttaatacgatatgatcacatttaatgtggcactactgttacagctgttatatttagtagtcaatttatttatttatttgaaggaggtagtgactagtgatcaatttaattatttcaatcattaatttatattataaaagttttttttttaaggatttatgtatgtaaaagttagcatatatatataacaggaaattatagaaaaattattttattcggtcgttgtattagttatttattattgtatttgtttatgttttcatgttgactgaaaagatttaggaaattataatattatactattaattattgtaatctttgtagttttgactttttgtttctctctaatcatgataatatataccttcaaacatttggctgtgaaaaattctacagtgcactcttagaatttttagtccaatattttaacacatcctatagtgtactcttaaaattctatatagtacactaattatttaagacatcttatcaaatttgaaaaaaattataatgtcaaaaataggattcaaattttttttaacgtatatatatgacttttttattttatattttgaatactctgtattttatttttgaattttttaaaattttacaaaatatctcatataattataaatattttaggaaggtgtggattatagaaacatcactatttattaaatatttgtttcaatgggggaaaaaaataattgaaaaaacaaatctctttcaaataattgaaaaaaaaaactaatatattatatattttttttctaagaattttcgattactttaattcaatttataacatcaattaacaagtagaaaaagtttataatattttttgctggaaataaatatatttataattatttggtactttaaaaaaattgtattctactttttcaataatatttatctagtattttaaaattgtacatatttcataggtaccttaccaaatttgatcaataaattatataataaatttgactaaattatattctcagctaattgtactaaaaataattaagtctgaatttggaattcatttaattaaaaaaaaaaattaatccaccacaagaaatgtcactttaccaatacaattcgctactacgctggtaaaaataatttttatcagcgtatttcgcaaattgtgttgccataaagatctaagttttattagtgtacatttgcagtggttaaaatctaacttttactagtgcatttacgcattgagaaaaactatttttgccaacatttttcatttgtgttgacaaaaattctaatactaacgttgatttgccaatatatcaaaaataaattttattttaccagcgcaacattaaatatttaccagcacaaaaatatactaataaaaataatatttgttgtagtaatctaataatattaacacataaaaatactaaacacgcctatagtatcttttatttcttttaatagatatgtatatgagaacaaattatcatatgccccaaacgtgcgaaaacgtcccgaaattaatgtaagatataagatatttatccgtctcatttattttggtcttatcatcataccattctctctctctctctaatatacatatatttatatttttatatataaatatggggacttatactagatttcccctatatatattaaaaagaaagtattatacacttattttggatcaagctactgtggcgatagcaataataatactgtttaggttttacttttcactactcacatatacgtacacggtatacacgtgtcttttgttatatatttttcttttctattatacatggctttcccttaattagtatgtacttttttttttttatcaaaaaaataagaaataaatataaataaatgtgtatatatatgtgtgtactatgtgtggcagagtcattacaaatcaatatgaaaaaaagcaaaaatagagacaagacaaagaaggtgtgaacaaaaaaaatctaaagtactactacgtcgttttattatgcatgattttgtctcaagtactctaaagttgttttgttttttattaatttctttagtttttgttttcttttggagtgaagttaattgatgatgttctgtgagttaacattaagctatatatctataacaagcttcgatcataatcatgatctcttggaaaataacaactaattaagaaaataaaaaatatcacttcaattatagtaagcttcgacaaaacgatagatacgtatattgctttgctttaatatatttatatatatattattatatttggttatacctatttttgcttctactaatggaaaatctaagaagtggaaagctttgtcataataataacgccaatataatgacgtgggttaatgcatggcttttctttgtcgtatacaaaaaaataaaaattaatgctttaattattgttttaatagcctatttttactattttaaaaacatttttatacattaatttattttttttgaaacttaaattattaagaaaattatttctaagaaaccataaagacttcaagaaaatattatgacttaaacaaaccacgcttctttgttttgctatcttattcgttctttcttcatcttctcttatggcccaggcctactttctttcgtagtattcgacatgaaactcaaggcccattcaactacaataacgggcttaattttaaggggtaagttgaaaaatgcctcttttattcattaattaatcaaatttacctctaatttttatatttatttgaaatatacctctttttatacgtattgtacccaaaatacccttaca

SEQ ID NO: 379720 - DNA, 8377 bp, Cannabis indica
aggtaaaggggctttgtttttcgtggttttcattagtgggttggtgtgtttttgctggaagtactggggtgtttttggagtttgaatgagtactggggtttggtttggccgagtttgtagtttgtggactcaatttgactagcttggtggcatactgagttgacccagaattgaaatcgatgcaaaaatgtgattttcgtttgctgaaatgctgaatattcagtcttctgatgctgtgtagttgttggaattgattttttgatgcttatactttgtactacatccatgtttagtggtagcttttaaattattagttactctattatgtaatgtttgggaatttctaaaagtgaatattttgaccaagaactgcatctccgtcgtgttgaaaggagcatttgaaaggaagttgtttttgtttagcttagggagggttttgtttttcttttagaagcgaagtctttgaatttaatggaagtgttgcataattgaactggatttgtacgtgcattttaagatttcgtcacttggttgattgttgtttgtgatatttagtgatatattgattgttcaatgaaatgataaaatttgtttttttacagtgaatgttaatggagactttgaagtttaacatttgaagcttagaacttgccagtgtctgatataaaattttgagattgggatgggctgcaagtgttccaagctctcgacttgttgttgggattccgagcaaaataatccagctactgaggccccaaatgctggtaagcaagccagtgtttctttactgctttacatagagtaaagttgaaatgtctaaaagtttctatacgtgtgtagaacctgaagagaggaatgaacttgatttgcctgcatttcatgaatacacggtcgagcaacttagggtggcaacatcgggatttgctgcggaaaatatagtttctgaacatggtgaaaaagccccaaatgtggtttataaagggaagcttgaaaatcagagacgaattgctgtcaaaagattcaatagatcagcttggcctgattcccgacaatttttggtgagtatagccaaactattttcatagttttgaaatatttgttaatgtgttattttcatcttcattgagtttaaatgtttcaaagttctttgatctttctattttgtaatttcaggaagaagcaagagctgttggtcagcttcggaaccaacgattggctaatttacttgggtgttgctgtgaaggtgatgagaggttacttgttgctgaatatttgcccaatgatacattagcaaagcatttattccattgtaagtgtgttattctggtaccctcccttgtgtatccctcaattgatatctgctgttgatttcttaattatgactttaaaattcattctttcggaaattgtgtaattgtttgtgattgcttattgaatgtagggttctagtactaaaatgttcatcctccttctctcggcaattttgtagattatcctatacacagtttttactagtaagactttatcatttttctatgtaggggaaacacaacctatgaagtgggcaatgcgattacgtgtagctttacatcttgcacaagctcttgaatactgtaccaataaagggcgtgcactttatcatgatctaaatgcttatagagtcatctttgatgatgtaatttatttatctcgttacatgcaatggcttttttactcttgcccattttggatagtcagagtctaattttactctcaataaatctcaggatggcaacccaaggctttcatgctttggtctgatgaaaaacagtagagatgggaaaagttacagtacaaacttggcatttactcctcccgagtatttaaggacaggtacatatctatgaaaagaattaatcaagcttctgtttacacatgctggtatttattgatattcatatgaataatagtgtgatgtatttgagtgagtatttaaggacaggtacatatctatgaaaagaattaatcaagcttctgtttacacatgctggtatttattgatattcatatgaataatagtgtgatgtatttgagtgaattaatgtatgtggcagttgaccttaactttctgacatgtttttatgaagtgtttatcatgtgatgatttcttgtgagcatattctgttggtataaccatttcttttgttttctttatatggtatgatgttactgcgttgttgggtctactttttgaaatatgccatggctggttggctataaaatttctgtaattccttctcattggtttctctctccctttctctctcttaacaaagtggtttatgttttcctctctttaagctaaagcacaatgcaaaataatgtaattcacatatgttattgctgtgatttttctttctatccaatcattattcttcatttggtagtctcatacaacattatctttgttgcttctgattctctgctctccacggatattctctgttctgtataaaattatttttatcttgtgtttttgtgcatgataattttcattctatatgtctaaatactatttatatgattctctgcaggaagagttactccagaaagtgtaatgtatagttttggcactcttttgcttgaccttctcagcggtaaacatattcctccaagccatgtaagtctcattaacaataaaaagtattcctagtgcaaataaataaatggttatatgccttttataccatgctaaatttcttttagctctcttatatactgagctcattttctggtttagtttttccgagacatgcaactctaatttccatttaaatctccttataatatatttattttaatttaaataaatttcaggccctcgacctaatacgcgacaggaatcttcagatgctaacggattcttgtttagaaggccagttttcaaatgatgagggaacagagttagtacgtttagcttcgcgttgcctacaatatgaacccagagaacgtcctaatccgaaatcattggttactgctctagatcctcttcagaaggacactgaggttagttttgccttttcatgttatcagacaattttttagataactgtcttcagaaattttccttacttgcttaacctattagaatttatattattttgttaatgtagtcaactgtaagtaccaagatgttatataggagtctatctggtgcttaagttttcaacgtcagaaaatatctgttctatcatttataggcatgttgctctctttgtgtcattgcggacagtatccaatttgaatactacttttacaatatcttgaatgagctgtggtaaaattttgggcaggttccgtcgcatgaattaatggggatccctcagaatggtgctgccttacctctttcaccacttggtgaagcatgtgttagaatggatttgacagctatacatgagatcctagaaaagcttggatacaaggatgatgaaggtgcagcaactgaggtatgttttcaatacatcagaacagaactaacgacagaaggatcttatcatttaacataggatatttggtgcatgttcgaaaaataatgaaaatttattttcatgattaattttgtaatgatgtttgttttgttgtattactatcatagaatcacattctaatatcataatacatgcaccattctggcagtttaacctacaactatgattcttgatttgtaatttagcaaaagttatatagtcattaggggatggtaaattaagtgcccttgggacttaacatatgtactttagagtggcggtaaataaactagcaagcaacgtgttttaccctcttcaattaattcatattatgctattgatttcttatgattgcaaaagctaattgctattttgttttttttacctgtagctttccttccagatgtggaccaaccagatgcaggagacattaaactcaaagaagaagggtgatgtggcttttcggcataaagattttaaagctgccattgagtgctacaccgtggtaaagattatttcaccataaaaagttattcacctgataaggcatgattaatacctgatagatctgctatgtctgaaattttgggaacttgattatctttacaaatatacattagtggtatacatgacaaagtaagaacaaatgttgtgtgagaatggtacgattgaattcacatgaactggtttgggtgcaaccggtatgattcgaactctaactttaagcattaggggatggccactattttctcacttaaagcattacgtactccaattgccagcccttatattatacagccttgccgttgtcttttcctcattatatgaactcaaattttaaaggaacattttgaagtggttacttattttgaatgatagtataatatgattgctaaatcctagtctatatttgatggaggtggtatgtgtcccatgtaccttacaatttcattcaccaatgaggttttagtttaccttgaaatgtcctcacagatggaattttttgtttgacttgcagttcatagagggtggaactatggtatctccaacagtttatgcacggcgtagcttgtcttatctcataagtgaaatgccacaagaagccttgaatgatgcaattcaagcccaagtaatttctccagtttggcatattgcatcctacttgcaagctgcatcgcttttggctcaaggaaaggaaaatgaggcacaagtagccctcaaagagggttctgtcctcgaaagtaaaaaatattaaactgcttgaccaccaaaacaatgaaaggtcaaaaacaaaattttattttaaaaaattgttcttttgttgaagaagacgagcaccagattgcgtacaggcatcgtctttgtattcgagtcgagcaaattgatcagagtttctaatattgtcgaaaatcaaagcagctcagaattacatttagaaatgggtggtggtagtggtagtggtgatggttaatgggttatcttctatggcattatgaactggttcatttgttatatcttgaagcatattcttttgctacgtaacattattggtattgggtggatgagttggcaaggccatgggttggtggggtgggtcgggttgggttgagtcggggaaaattattgtttacgacaggatttgcaaatggtttgttgttgttgctgctgctgcctggcctgtttcatgggagtaacagaaacagattatatttttgtaaaggattcaacttttgtttagaatgttacattgaaaagggttatgggatgatgttattgatggtgttcttcttcttgtaatttttgtaaagctcccttgctcatcatggctgtctgttatttttatggaaattggttgtttccaagtgtgctatttcaattgctttgtgcttctatcactcgcatgctgataagtaatgagccacatacattttaacatgtttgtaaaatgataattatcaaatcagacaactttttgtattgaaattggtagttccaattgctatgttaactgcatttaaacaaaacttttgtattgaagtttgaagggatgtccaccaatttcacatggtaatgagccaataacgtgttagctaacatttatctaattatttatttatataaattcgtaattttcaaaatttaagaagctaagttgcagaactcaaacttcggtgtaactaacttttggcaattatcaataactcattttatgattaatgtatttttaagaaaaaaaattgaagggcccaaccgggttcgaaccggtgacctcttgatctgcagtcaaatgctctaccactgagctatggacccttatgctgtttatttaatttatattttataaataaagtaataaataaatttatttgtagtaacaattaatttcttagctatttttctttttactaacttacctatttgttaagtagcatatctataccaaagtaattaaaaatgaaataaatatgtattttgcttattgaactttgcattaataagattgtgcccatgttaaatattttttgtaacgccctgccccacatggacgctacgtgtgtgcttttacaaaattaatcttttactatttttataaaagtagtttataaaaagtggtgtaattaaaactttaatcaagtcaagtacataaatttgataaaagatgactattggtaaatacgaggaccccctgtgttaaaaacttttacaatctgttttaaaagtaattttacaaaataagatcacgcttcaaaatacatccaaaaagggtggattctgtccaccaaagctgtggcaccgcgactgatatgtacattgctgcagaagcttcaaactcatggttgctcggctttaccttcccttcacctgcaccattaagcacccgagagtcacagagaatcagcaagaaaagtgactaaattcaagtaattatactgtgataaaatgtatgcaatcataatacaacatgcttatacaatcacacctcatattcacataatctcagtgcttcataaagcacacttaccgcacgttatccatgagctatgtatgtcactatcgttgcccgataaagcgaacaataagtaagaaatctatctgcgatttcagcgagtaattactcataatggtaatgactatttccaaccctcgatcataatcgaggcacaacaaacacataacaagatatcgatcataatcgagactataacaatcataatcgcttcttaattaaccattcagcggtgcgtaacagttttcttacctcaatgcagtatcaggcgtgcgggccgacctgagtggaaacaaagcttgacgatcccgggtcctatgtcacggcaacaaaattcaataaatatcttaaactaaaattttgagaacaaaccctaattctcgtatttggacaaaccctaacctccaataactccaaaataggccatatgacacctaaataaccttaaattagatactaagtaccgccccaagccaaaaatgatcttgaggaaaacccaagaatttcccttgcaggacaaccggtcgactagttttgttgcaccagaaccaacctgtcgaccggttttggtaggccacaaatccttaggtttttctccccaaactcgaaccaaaaccctcccgaacctgtccaacagttccagaacattatagtaccataaatacaacatattcaatgcatcaaaacaccataatttatcaaatcacacaaaatttcaagttagagccaaaatcaagttcctaaactaaaattgctaactccaactctatcaaccacttaaatcacctaacttaagctcaggcataccctaaaacaaacctataaacacaatctaaactcaaattaacatcacatccctgaaaccataaaaccctaaccaaaatcaacttaaaacttatgaaaaatcaaaggaaattgtaccaagaacttacctcaacttggctaacacctagtgctatagattctatccttggcgttcaactggttccctttagctgaaaaagaggagagagaatggtgatccatttataatttttttcctctaggcttttaattttaatctcatgtatatctaacttaataatattaataatatacaattttaactaacaaaataatacctaaacaataattaaaaccctaaagtcaaacttagcacatttaccattttgccctcaatactacacttaaaccaaaacataacctaggggtaatttaggtaattcttaactaatccgctaactcgacaacttaatattctaaactagtctggtataattccaattcaatctatactttattatcgtgacattcctgaccactccaccgtgctcccatggtcgtcgggcccgaaaacattttatttcaaaaatggtatctacggtacccacataattcaaaaaaatctctgtaattaataaattacgttttatttaatcatttattaaattcacactaattagcttaagtaagatcatcatcttacttcattatcaagagaattacacatttaataaaataagctcaattaaataccatattattttttgggatattacatttttcttcaactttgaatgttagtgacatatgagacttttaaagtcttcgttagagtttgttatctgcatttctggataggtgatacacgtgttattttaattttacactatgacgtgacatctgactaggaaacacgtgtatcatatttcataatttggtcagatgattctgctcctagtagcctatgaagattgatatgaagctcgtgctgggttttgtgccctaaataaaactcatttcaatataatcagatttactgattaataaagagtagaaattgcttttatgttgcatggttcac

SEQ ID NO: 379721 - DNA, 3440 bp, Cannabis indica
agtagaaagagaattacctgaattggtagttcagttctctgttcttctgagttctcccaaattccaaatgcttcaaataaaccagcaaaccttttctttcagtttcatctcatgtcataatagggaatggtttgttcaataattgggccctcaccttggcccactaaattaaaccaaaagcccaataaagacttctttttttattattatttcaaaaatacaaaaaatttaactttttttttcttcaaaactaaggtgatatagatttttaaatatttttactgtttttaaaattttatttacagaaaatagggtttgtatttctatgttgtacttttgttggttgttttttattatttgtatatttttttatattggtttgatgttatttaaatattatttttttataatttttttttattatttttataaaatatcgtaaaaatataaaaaaattaatttttttttttattatccaaatccaagttggaggattacataacttcaagaatatgttatgttaattcatgaccaatttgtttcttttgtaacaaaagttttaagtaagagttaacttcattatttgcttatctaacttaacataacaatattatttattaaaagaagcttaactatgcaattaaagaaaattattatattctcttacttctactaatattaggtgattaaaactaatgtatcaacttaaaacatcgtaagctataagactaaaggaaggtttggttgatttagtggtttgcttgattttattttgtaataataagtcttttgcaccctctttggcactgccttttactatttctaataatcagtgtggttaacagtttgttcgatcatcttctcgtaagatttgtgcagtttcgcttctgcctgacaatttggacattgttccgatttaaccttcattgagttgtgaggtagtataagtagtaaacatggaaactaatcacatttttattaaaagaaatgaaatgttattctactaatagaggtagaatttaaaggtagcttagcttcaattgtgaacagagaaaaccccaccaaagaccatacattatagcttcacttccaaagtagtactgttcttcaaacatgtttccttaaaattagaggagattatccaatccaagctcaattggcaaaaaatggggaccccattcaataattattactcaagataataaaaaaaatacacgacttttaaaagtgaatgatccttgaaaagctgtgtagttcataatcaaatgctctctctataaaagtgacaattctccagcaggaatagatctcttcactagtttagcccatgattcattggtttcattgatgactttaagagcataatcctgttatatgcataacacaattttgttatataaatatgtatatatgcacaagcacagcctctgatattgaatatgaaaagttgagttgaaatgtaccttattagctgctttgttgccaagaccaaatctgttagcaggttttccatctgggatcttgtaatctctaaaccagtcccttatggctgttagagttccctgcaaatactcaatgctttagcatttagccccattggccatctctatcccatttgtaatttcattcctatatggaagttcgaagattgtacggaataagaggtgctctagattatgggcaatagctactgtggccatccttttggctattttgttgtggagagaaatggaagaactttcaaaggtaccgaaaatggaacagtagaaatttgggagaaagttaaattctcggatgtttatgatattgttttgtctattcatgagcatcctaatatattcgaaggaaactaaaaaatgcatttaaatcaagattcgaaggcatgtcatgtagagataaaccaacaaccattttcccaaaaatacttctaaaacttcttatattctcagattaattaacagtttgattcagctccttaaaacataaataagtagaagataaacataccgggaaatgtttctcaacgtcatcaacatcgttcacaagagacgcctttggatcatccaatgaaattgctactattttccaatcaagttcaccttcatcaatcatagctaaagcacccaagggcttcactttgagaatctcaccaatctttctctgacgctcaccaatctctactacatcaactgtaaatttaatataaaccgaaaattagacttaacacggaacagggacatgcagaaaaatgaatataaaacatcaaattgaaacctggatcattatctccaaatgctccttcaacttcagagttagccaatgtcgggtcttcccatgtttgaggaagcaatccatagttccagtttatattgtaactgcaaatatgagaaacatatattaaggcacatatatactagcaagctcatagagaaaattaacatattaagcgaaggcttacgggtagtatcgaagctttcctttctttgtgtcctgcttaattggagtgtgagattcatcagtagcaacttccatctttgcacttgattctttaggtatttcaacaacaaaattgaaaatgttgtctcccaaatgcaaaggaatatcatgccaaggagaaatctgtacagatagtaaaatgacattgacacaaataggaaaccttttcagtatcttcaagaagacaatactttatcaatgcaaatttcataaagactacgtttacaaaaaaactcatacatgaccattaaaacatcataggcatttaattcatgatatgttaggtgaaacttctaatcaaacattctttgcaaaatatacccttttgaaagtgattttaattttgttaagacttcacatttaaactattctcctcttgatttcattgtaactaattgcacaaggaatattaatagtctaaacatagtatgtcttgtttttgtcaaacaatctgcgaacaaggccgccaattattttgtcaaactaaaacaagattgtcaatttttttggctcggatttgtccctactgatttgcaagcaataaagattttacaattttattcaaaaataaataaataaataaaattactatttacattgaaagaaacaaaaaacactcttgttggaaatattgtgaatattttaacaaaatatataagtgtcttagtgtgtgtgagttggaaagagtcccacatgggatatgaaccctcattgacaagggtataaagagtgcaactttggcatttgggtttgggccccaaggggtacccagttttgtgcgaatgggtgaggacacacacacttgacccaccacacacgcgcgccgtccgtccgatccgagccgggccgggccgggttgggtggtgtggtgtgacacaatattattttttacagaaaaattatttaataaaataattattttttatttattaatttaattaaga

SEQ ID NO: 379722 - DNA, 9640 bp, Cannabis indica
gtatgttgactactctctctctctctctctaaagcttaaaaaatagtgacttaattattctatatatatatatattataaaattacttatttggtgatcatgatcttatataaaacatatataatataatttagctaattcaagaaattttgtttgatattaattaattatttgatcttccaactgtaacattttcaagccatttttgtaaaaaataattaagtcctatattgatcacattcttcatttattatcattattgataataattaagtttttttcttcatgatattcggctataataattcgtagatcgatatttgtataattaatgcggtcaaaagtcaaatttagtcagtctcgtgtgctaatttgtatcaaaatttctgaatataataatttacagcttcttgaagcaattttatacatacataagtaaattaatattactcaataataatcaattcatgttgtaaatattttcttttaattaaattaaattattaattacaatataattttgattgtatccattaatctcatgcaatttccagttatggtattaaattttttaattaattttctcgtatattttaaaggaagattataaaaaatgttaaataatggcttttaatttttatttactatttttattttataaatatcttatatacgattatgttttgacaatgaatgactaataataacgactaataattttttggtcatatagaaatgaaatttgattagtagaggttttttttttttcagttataggctaaaaaatattatatttatatttaaaaggaatatatataggctaagaatatattgtcacctaattaataatggattttattatctttttactatttcaattttaatatcttattttgaaaataatttatcgtattatttatcaacgaaatatgattaatatatgaatcttttcttgattattggtttgatttgttttgtgcatctaattaataattctttgatttgattaaatttgctatcattgtacatcgattatggataactgtatccctatttaattattttgtattaagattattgggatccatatagttttaattagaatataatcaatcaataaataaatactaattaattaatattattgattgtcatcattataaatatctaggtattattcttatcatggatattcaaaatcagtgtcaggacagttcttttgatcattcgaataagaaatctatactacaattatacactaaaagtaaaaaagagtattagagacgacaattttaatggcaacaaaaaattgttcctaatagtagtgatattaataattatttctattttttagtttaatttgaaaatttagtagaggagatgtttaatatttttaagaagacaagtcatccctaaaaattggacaataaatattttatttaaattaatagctataaaaaaaaaattaaaaataactggagcactttttaaaatttttaaaaaatgacttttgtcgctcttaaaaattatttttcatttattatcattaattttctaacaatattctttattttcttagattatatataaacatactaatccttagattatatataaaacaatttcataaaagaaaaaaaacaccatttataatggactgctgtgcttttcttatattcttgtttataagagatcgagtttcataaaaaagattagacaagtgaacaataataccaatcatgaactctcttacttattctaaagtggagtggaagattattgattgttgttgtctcttcacacctattttttcaaataatcacattatggagcaagctttcagtacttttcttttctttttcttctgttccggtggttgaaggacaactctcatggctgcatcaaagactccttttacattctgtgtatacaagatgagtttaattattatagccaatttcatcacaaagaatagaaaaggtttagttatgttttgtatatatacctgttgtgttttcgagctgcattcgatataagcaaatgctccgataagtttctgaagttcctctcccttataatatgatacacatatcaatataaatacaagaaatatgcaataattaattatgtaaagagtaaattttttcacttgagttgtagtaattggaacggcatcaggatggtctatgaagaattgtgtgtcatctcgaaggtctagctccacaaaaccaaaagaaaaattaaatgaaaaaaagaagaatattcttattcatcttattagtaccataagtttcattaactaaacacaatatgatgatacacattatactacatatatttctacaaaataagcaatagaaagatgaaaaagataccaagttttgttccaacaagaataattgggacaccgcgggcataatgcttcaattcatgaatccactggaaaaacaaaaaaaacatacaaaaaacaaagacatcaacaactaaacattataattaaaatagatattttaataaatgataattgcccacataagaaaataagaactaaccttcttaaaaacattattatagctaattttgctaatgagagagaatgcgagtataaatacattgaccccacaataactcaagggtcttaatctgttatattcttcttgtcctattctccatagaataaaaaacttcagaccttgaaaagagtgttatttgtgtaaatttcagtcattcaatacttaccggctgtatcccacaatgccaaagtaatattgcttccattcacaatcatatttgcactgaaattgtcgaaaacagttggcacataatcctgtttttttccaccaaagtatgaaataatgaataataaaagaatacaaatgtatcatcatttcaaaacaaacaaattcttaaatgtaagaacaaaccataataattacaaagaaatattaaacaaacaaataaaagatcaatcattataattagaaagaagatcaaacaaagaaaacccattacagtttaatttcaaataattataataaaaaaaaactcaaatcataagttgaaatgaaactaactaaccgtgggaaaaatattactagtataggagataagaagacaagtctttcccacagctccatcgccaacagttacacattttatgaacctcgaagcactcatttttcctactttcaaatttctaaaaaaacaaaagaaaaagaaatcgaagcctgtgataatatttttcctccttaatcctaaatgagtaataaattttgcaaggaaaaatctttgaatggaaagaaaaggaaaagcaaaaaaaaaaggaaagaactttacaaaaggaaaaaattttgaatggaaagaaaaaattgaacctagcaaaatttaaagatttcaatttactttgaataaaagactctgaaatgcttcattcttactatgttcttctacgtgaccatttgaattaccataccactcatatggtgtaggatagattagagcttaattacttttgattttgagggatgaaatttatacatgtgcatttgcttgttctgacctaactcactttagatatagcaattaatgtgttttaattttttataaatctcatatataatttatgtatattttcccattatatatatttgccctttttggttggttgatcattttacctatcttattatgcatttacacacattcacacacacataagccatatatatttgttgtggctatgaagtaagataacctctaagctaaatgagtgaattatgtttgagtaatagagattgggccaacaatagactatattattatgagattatttcagaaatacataaaatgaactaaaaaaaaaaaaatacgattgtacgaaatctaaaagatttttatgaatttttaaatttttttttacagaaaatatggtcttttgatgtttttattttatttttattttttattattttttattattttgttgttaattttttattatttgtatattattttaatgttgtttttctattattttcatgtaattttcttgttgtttttataaaatatcgtaaatatattgaaaaaaaatatttaaacataaaaatgtattttgtttttaataaaagtactttgcttaaatttggagtttttacaccatatattaaaatttctaatttttttattttttttactgtggggcgaaattttttttttcaaaaatactgtgtttcattttcaaaaatgatgtatataagttttatacagtgtactgtgttaaattttcacagttattgtacagttatttttaattatttcagtgttgttttaattgttatattttgttgatttatggttgttttataaaataacagtatttttgtaaaaaattccgtttgacaggaaaattgtaaacttttacccaaaatccaatatttttataaacctctaaattttaattgatgaaaaacgacaatgggctaataatagactagccatgtattatgatcacaggcccatttagaaagatggtagtgggcccatgtgtaatgggatcgtgagcccaataccaaagcccacgttgcctttctgaaatgtactccaacgtttatcagtgacaaagcgaagaaaagaagaagacgaagacgaagacgaatacgaaggattcgaattagggtttggagaaaagatgtcgtttttgaagggagaaccactgataagaaagctggccttggtatctaagtacgccgttttacctggcgccatgatcgccgctctcgtatactcgccccccgatttcgtctactactccaacaacaaccccaaacccagcaaatagatttctgtgagatttcgatttcgtctatttttgctgtttttcattttccaggattaggattttgttttgtattgatccaatttgagacaattgttatgttatttaagcaactatgcgatttattcattcatgattgtctttggtcatacgataaaagatcaagctttctcttttgaggtttataattatgtctttttagctataagactcacatatacaaacaactataatgtttgatttgcttagtcatgcaataattgtagtagtagtagtaccaatcttcaataggaaaacccccaattctcattcatttcattttcactgataatctaagaaaaatactaacaattaactaataagctgatatgccattttcatacaattgacaattaaccattcttgacattggttgaatctgtagatataagcttattaatacttactaaatccaaccccaagtgtcattttgcttaactattgttcttgtggttattttaggcctatctttacctttcccgttttatgtctttatcaaatcaatctttttgaaatagagttgatgatatatggttacttggtaggtatcacgtgaatgtctatggttcatacaagatcaagatttttcctctgaggtttataactatgtgtttagctatatgactcactaatacaaacatttacaatatctgatgttcttagtcttacaccaaactagcttattaggaaagtaattaggcttaactaaatatatcctagtggatcgagtatttatcactagctaacagtgtagattaactgtcaaacaactatgaataaatcaatctaacaaaaccgattttttaaaggaaggattgccctcactgattcgagtatatatcaccagctaatatgagacattaatcattttgggcattgattgaatatgtaggtgtaaacttattacttactgaacccaacccaagtgtcattttgcttaatcatggttcttttggttattttaggcctatctttacctttccctgttttatgtcttatcaagtcaatctatttgaaaagagagttgataatgttggttacttggttaattgccctcccctaattatgaaataatccattttttgtttgtttgatgatcaatctcatgattatttttctcttgtttgatgcagggccatcttgactaaattggttatggatgtaagagttttagtattgtatgtaataagcctttctggtctgtaatacaattgctcaattttgtgctcattgaagaagtgatggttgtacttgtttttcataaggaataaaccaggagatttctgaagatactttatttgatttcttgtcttataaataacattgttttctatgattgtaaacttggttcacttgacttggattgttaaacaacaatcattgtcctttgaagcatgatttgttaaacgatgttgaaaatagagtttaaatattcagttgcacctacaataatttatgtttgcaactaaaagtttgaattttgtttttgatacaataaattattttaaatttatcgaaaataaaaggagtgtctgccataattacaatatacaaagttataaaagaaattttgagttataatttctcataatactaaaagtagagttgtccctaccagtctttagtgtagaatttatcgagtaataatatgtatatgtaaaatgatattggttgcttctacaattcattctcataaagctcataaagggtgtatcgattttggcatttaaaaagaaaattaatctattttttttttttatagtcgtgtatggttgcttctttataaatgcatcagtacacactaccacttttaagagtgcattattgtagaatttttcaagattaattaattaaaaagcttattgggcctatctcgtgtttattgggccggaggagacctctcttgttgtcaactccataggctcacgggcccaaaagaccgaaccaattcaatcctgtgatattcaagatcctgttttctcaggtgattatatcactccattcatggcagtctttgtcagacagcgaatatatatctttcattcatttcttactcaattttctcgcagactattctaattttttattattaattaatcattttttaatttcaattttcatatcctggtcgtggtcgctgatttctctctctctctctctaaaactatttgtcggcgatcaaagcagcagccatggctttcagaggggtaagctttaaagattctgcctttttacttatgcagttctttgaatcaatacccaactttttctttcccaaaattagtgttataaaaataaaaaatatgatctttatttgttcttcttttgaaaatttcagtacccaaatgaaaaattggtaaatttttgctgtaactgtagtttgagtttaactgaaacctggatttggggttaatttatttttgtgtttcttttcgaattggatgcttttggctagaaggttgattattaaagtttcaatctttttcatacccaaaacctaaattctgtttatttattagtgtaacattttcattttttgacttaaacctcaaagaaagagctaggcatttttcattttgtagaataacacacacatatacatattaatttaaatcattttgattagtttccactggaaaatggaaattagtcctttttggattaaacaatcagatcactcatgagtatagaataatataagaacaaataatgagtaccatcatagcattacttttgacttgactttaagagtagtgatttgaatgtaacttgctaacatcatggattttaatggggttgttttgtggttatgttatgttttttttttgaagaagaagattgtaacttttattaatcagaacaatcagaagtcaacataggcaacaactcaaggggacgattgtccaccttaataacacggtcatgaatagaacacaatgctcaagtaagctaatgagcaacagtattagcagaccgcctaacaaaatgaagagaaacattctctaataaagaaagtataaaacacgacactcatgaatgatcaaaccataaggagaaaacatagtggcttggtttatgttatgttaatgttcaatgttggtttttttgatatgtatagggaaatgcttcatctggcatgggtgtggatgagcatagtaagagcacattccttgaacttcagaggaagaaattttaccgctatgtgattttcaagattgatgagaagaaaaaagaggttgtggttgaaaaaaccggaggccctgctgaaagctacagtgattttgccgcctctatgcctgagaatgattgtcgatatgctgtttatgactttgatttcgtcacttccgagaattgtcaaaagagcaagattttttttattgcatggttagtttcttttccatttgctttattttgattctcttgttaataacttaatacttgttagtttaactttgctatattaacgtgtctgagattgccaaatgtttgggttcgagaatttcattcactagagatttgataatgagttgattaataaaaacagagaagcctataagattgaagagggttgtctgaaaatgctgttttatgaaggcctgtgttaattgctataaagcataataattttcgattttaaattcaaccacaaataaagtgtcaccttccgtggtgttttaattagttgtctgttgccttcatactcgcatttggtattttaccttttatttctagcttttgaaaaattaaaacttatggtgttaaaggagaggagagcagtttgaactgacatacttagtcttgttagaatacatcaaatttgttgttgtttgtactgaatgttgctgcaatactatggttattctgagaaaaaacattgttacaaacctttttaagtaatcgaaaatggtgtgttctcttcggttggttgccactataagtactttttatgtaaatcttgtattccaggtcaccatctgtatcgagaattcgagcaaagatgctatatgcaacatcgaaagacaggtttagaagggagcttgaggggattcattacgagatccaggcaactgatcggagcgagatggatcttgatgttcttagagagcgtgcaaattgagcagttggtaaaagggtttgaaaagaaatcgcggagtttcttctacttatttagtattataatctgtttcatgtttcatgtttcatgtatgtacaaattacatgttagcttaattactaaataaaataatggtttgagcttgggaaggctgataaggggggttctgtttaaggctttagctatattatctgtgcaggaagagacatttgagctttccctcattttcatgatgcttcccaggtgatgttgtgttctggtttgtccaattgaatacttaaaataataaaagaaaactctttatttcaagttttattttgttatattttcggagagtgtgttgtaatagggttagtcgccttttccatatcggctgtatggtatgattttgtttagtatgtatgaattgctcgagaaatgcttcgaagccaatgccgatatcgctatttataattttcacactctatttggattcattttaagggtgtgtttggaagtaactgtgtaattactaggtagggtaattactaaagtggtaattacacagtttagtaattacactatattttaaaatgcaatgtgtgtttggatatgaggtgataattagtaattacatgggaaaataatatttttagtagctaatgtttaatatg

SEQ ID NO: 379723 - DNA, 3333 bp, Cannabis indica
aaaaaattagattaaaaaattgtcccaaatatcgaaacatataagggaacattatgaaagaatgctataacattttgtattgacaaggaaaaaaagtctttgctaagctaaattatctcattcgactataaacatttgagagagttcaacaacattgttagaattggtgttttataacttacacacacatatataaatcttcaccaaataaacatacccaaaagaagcatatcctataaacagagtgaacaagcaaacctcttcttctaagttgaattacacaatcatcattttgttggaggcaaattcttaacatttgagatctcggttcgcttttggagaaagccacctgcaaaagtaaagtactgctgataggaactcatatccgaaaatggctattaagccttctctattgatactcaaaaaccgaaaaatacagaaattctagaatcccttaagcctcccgatgaatttccacaattacaaaataattccacaccacaaaatataccccaactacactctagcataacccctctaattagcttagtctatcactaatcaacagagtagcacacagttctataatccacaacaaaagagtagcacataacttatcaatcaagagcaaccataccttataaaccaaacaaagtagtaaacaaccaacttttacgagttttaatcccaattagggaacaagatttatattaaaaaataaaaatcatgggttatgatctgtttaagcctaagcagtagaaagaaaaggctactccttaaataatttaacttaccttttcttgatataaggttgattcgagagacgggtccttcaaacatccagttatcgtcatctaaagacttcacctctttgttaagtgcagccattagatctgcttttataactgcaatacagaatatataaatcattcttcatactaaataaaacataagagagattgtagtacttttagggatagttataaagactcattggacaacactactcgatcccagagcagagaccaagctataatatactaatcaaactagtcaatagaactgaattctgtcaatgagaacctttacagaagcacccattcttccaacaaactaaaatttcaccttagctttaacaaaccagtgaagtaaaattcacacaaagtttgcaagaatttatttaagttcatgtaaaaggggtttatttgatcatcaaaatataaaacactcgaaagaacctagtaaatggctaaaacccaaaacccaaaatgaaattcgataagtaaagaaaagaggaaaggagtttgaaaaggaagctaaccaagcatggcttcatctttgcggtcttgaatggaaataagatcagaagggaagtagaattcgtcagtggacagagcagcattgctgctgcctccaccaccaccgacagttgctgttgtggaaatcgacgaattcgccggtgatgagctattcatctctctttccttctttctggagagactccaatcagataatctttcttcccttaatagtgcttctatttcttcttcaaagtctacactctagatattcaaatacgttgaagatgatcagttcattaattagttctaagactaatactcttgaaaagatcatgaaataattgataacatagaatgataaatacatcaaagatgatcataaattgtaacattctttttgtttcatgtttgaactagaactctaaatatcaaagatcatacgagaaagtgatttataaacatttccatacgaaatcatctttaataaaagttatacaacaaattatgatgaggaaataattacataattaaacaactcaaaattagggaaattcaatctcaaaataatcaaaattaaacacctgtttggatcttggaggagtgctcaaattgcaaataccaaatccttgctaatgattctgctttgaaatcaaaagtgcccaaaatgaactcaatcccaaaaactcttcaaaattcaaataggcagatcaaactcatagagactttctcaacaaattaaacacaaaataattaattatcgattcaaaggccttttgcaaaaattaaattaaccagattcaatacctggtaaagatttatgagaggagatggtggagatcgacgccggtgatgagcgagagagatccactgaggttgagagccgaagcaatcgctgatgagaggagactgaggcaaagagagagatggaacgattttgggctttttgggccattgatgggccacttttgggccttctaatttttatttatttttttgataaatgctagtattattaggaatattttcataaatacctaaaaatgataaatagtttacaaaaaatattttgaagatttatttgttttacaaaaatacgaatagttatttatacgttgttttaaaaagttaaaaacacattttctttagtgtcgtttattcacgtaagatcgttttcagtcatatttgatcagtctctcacttatccattcaatgtcgttttccacattcttcttcttctttttttttttgtgcaaaacgtttattcatttaaggtcgtttactcagttgcagtttttcttatttattgtcgttttctcatatttttgtatgtcgtttattttaattcaagccagtaattaatcatatttttgatattgagatctcaattattttaaaaattgtacaataataacaaatagaaaaaagtgtgatcagagatttctcatcttcgttatgaggattacatttttagatccactagaagacaaattatgagtgatagttttagataatatatcttaatattattattattattattatttcagataggtttttatatatacatgcagaaaataatatatgatttgaaatattaaatactatgaaaataaagggtacgtgtacaatgcatgcatggacgaccagagggtcagaatatacaaacacatttcatgtagattcgagtataatcaattaattaaatatgatcatatatatatatatatattcacatggataataataaattagattaaacatatttatgagatcgcaatgattgaagataaaaatatacacacgcatacaatatacatacacaatacacatgcatatatatgattaagatttctcagttgtattattgtacaataatattgagtatcgattctgatcagaaatatataactagctttggtttttttggcattttacctaatagtatagtagatggtattctataattattagtgattttttatattatttatttaattaataaaaatacataacccaaaacattaaaaaaaaa

SEQ ID NO: 379724 - DNA, 623 bp, Cannabis indica
ctctaaagctgtttggaaggccttaggagtccccaaacatgatcggggtgaacttcatatcttctggtctgaaacttaattttctttaataatttctcaatgtaatgctagtgatagttgttattatatcatgcataatgggaatgctgatgattgttgttagaaaaggtattgtctcatatcagttggaatatcctcaggtgcttaattatcaaaattgcttaattttattttattttactcgggaaaatttgtcactgctttgaccagtgtactattattttgcttgtacgattatgtcgtcgtttgaaatcttgttagtgcagaagatgcatgaaaagggaccccttacttgtgcttcttcattattaggagaaaatcatagcttaacataaacataatataaagagtgagtccttataagatatgggttttctggttttgattccttatctgtctcaatatctcatgttaatttttaattcatccaagaaattagaaaataactacacctaatttggaaatatagaaaatttctcatataaattcattaaaaaagtccctaatattgaggttttttcatgtcaaatgagaagggaaatttgattttctatacttagaaa

SEQ ID NO: 379725 - DNA, 5412 bp, Cannabis indica
aaaaaaaaaaaaaaaattgatacgtgtatttcattcatgatttgttccagactcttcgaatattttttctctctctccccttcaagcatgcagatgaacatggcttctgcaaattcatcctgttcacaccgaaacccaagggctattacgatgatcaatttctatttttgtttatactttacactataaccaattatactttcatataattaactcatgattaagtaagtttaagtatatagtttgtatgtattttagtttttgttcatttttaatttatgtttatacttcatcttaactaattagtgacaatatataaattagtgaaaattaattaatccaggaaaaaaagtagatttttttttcttttttttttgcaacccaatgactcgcaaaaaccgtcgctgaaaaatacaaaatttataattaagctgaaaattttactataggcgacggtttaaccctgtgcctaaaacactataggcgacagttttaaactgtgccacggttttaaactgtagcctatactataggccacagtttaaacactataggggacggttttaaaccgtggcctgtactattttctcgacggttttaaattctcgacgggaatttggggttttttagtagtgtcaaacggtgaccaagctagctcagctagctccaaccgcccccgtcgaatcaatctgcgcagcccaaaccgtttcagtcgcatcagcaataactcctccggccaacacctcatctcatcttcccaacccagcatttatgagcttacctcagttactcttcttccccttccaaaatttttggtttctgtcaaatcatttctgcaaaataggggtataatcatgatattcaggtacaaatatagaaggaaattcaaatccttccctaactaccccctcgtttccttctgttggtgtagtatgaacaccatcgattctaataaattctctgtttttcactattctaatgaaaaagaaagtagaatgctcttaattactctgagtatcgaaagtgctttgccctctatctgtgttaaatcttttttgcagcagctatactcctcatttaatgtttgtactacatattttaacttctatttcaggatgtgtttatttctgggatgtgatattcaactgctgagcttcctattaattgctcttttaggaaattttactataaaagggactcttttttctttccccaaagagccgaagtatagcttttattgttatttcctttttagtttattcatctgtttctccagtttcttcacagtttccaccccttcaaatttctgcactcatgaagtcaccattatggatgaattaacaaattccctcacagttgctcttaatctcacagataccgaaagcaccattaagaccctttatgaacccaccctagcaatcacaaatgaacttgaaaatgtcccaacccaattcttcctggtggctaaactgcatacagctaagtcctttaatcgtaaggtctttatggataaaatgactgaaaagtggaaccacatttcccgatctgcagttaccataatcgatcggtccaatggcctcttcttaattgagtttggatgcaaaggagataggcgccgagtgcttctccagcagccttggacatacctaaaccagcccctgcttatggacattccaaattctttggatgctcttgatggggatagtcttcttaaatcccactttgggtgcaagtttttaacacaccgttccttaaacgctccgagcaacttgtggagtttgtttcatcctctctcggccacctccttgaagtgtatcgggcatcttttcgtgaaacttggggtccttatttttgcatccgaatcatgtttgatgtggcaattccgcttactcggggaattccaattcacttctcgggcatgaacaaggtggtgtggcttaagttaaagtacaaaaatcttcctgatatatgctttttctgtggtcgaatgggacacagctacaataaaggctatgtggactatatgaaagcttgtgatgaagctcgtcttccgcccgagctcaggtatgacatcaaaactatttctggtaaagttaaggttaccactaattctctgttgactcctgaacagctcaacttttccaacccactggtggccactttcatgtcttctaaccctgcaagtgccatgtgtgtctccctctcggaaaccatgccttcattccccacacatttccctcttgaccaacacccaacccatggccaaacccaacttgcgggcctatacaaatcaggatcttccacacatactcatgactcggtgacatggactcatggagagacccaaccccataccaccaacccaccctaatccgaccataacccgccctcattcacggaaaaaagattttcagttcaaagctcaaattaaaaggcttgagagagacctggagcatgctagaaatagcatcacttcgaacgatcatactattagaagcatcaaagatatccaatctaggcttgatgctcttctatacaaggaagagacgtactggaaacaaatggcctgaactcaatggctggcccaaggtgacaaaaacaccaaattcttccatcgccacgcctcccaaagaaagaaggtcaacaaaattctcaaactatacgaccaatggagaccttatcactacggacaacgacatcacgtgcgaaattgaaagcttcttattccatgcgctgttctcttctacctttctgtctccccacgacatccaatgtgttttggagggcatagattgctctctgtctaacactgataaatcctttctgagtgaaactttctcagttgaggaagttgaaaaagcttttgctcagctccctttgggtaaagctcctagcattgatgggtttaactacaatttttataaagaaaactggtcggtcgtcaagaaagatgtgattcctgctgtgttgagcttcctcaatggatatggaagcatagcacctctcaacactactcttatcactctacttcccaaaaccaagcagcccacaacggtaccaaggacttcagacctataagcctgtgcaacataatctacaaaatcatttccaaagcgattgtgaacaggctaaaattggttcttaacaacttaatctcccctcaccaaagtgcgttcctacctggaagactcatttcggataatatcattattgcccaggaagttgctcactcgatcaaaaccaaatctaggggaaaaaaatgttggatggcggttaagcgggatatggctaaagcttttgatagagttgaatggccatttatctaggccattcttaggaattttgaattcccaccgcggataattcatcttatttcggcttgcatcactacgaccacctttcgattcaatgtcaacggtaaagttgcaggccgtgtcattccctctcggggaattcgtcaaggagatcctctttctccttaccttttccttctctgcgcgaagggcctctcatctctgctcaggcagcaagaaaggaaccaaatgctcactggcttcaaagtggcccgcacggtgtcgatcgtctcccatctcctctttgcggacgatagttttttgttttgttaggcctccatccattcgtgcaatatcatcaaagaggtcctggctctctacgaaaaagctacggggcaacaagtgaacttccaaaaatcatctctctacttctccccgaatgttgccttgcgtgaccaaacccttatctcagactacttgcttatccctgtgagatcctctttcgaaaaatactcgggcctccctcaaaatattggtcgaacgaaaaagcaagtattccattatcttcatgataaagtttggggccaccttaacaactggaaacataaggtcttttcaaaaggtggtaaagagacgcttcttaagtcggtcatccaagccatccccacctataccatggcttattttcatctcccggccgccacatgccattccctcgagtctgttatggccaacttttggtggggtttcaatgataacaactgtgctaagacccattggcaacgttggcaaaagctctgtaagtctaagaaatatggaggactcagctttcgttccctggtccatatcaatcaagctctgctggctaaacaagagtggcgtatctttaagcatccaaactcaactgttgccaaaatcttagccgccaggtatttcccaaactcttctttcattgactgctctttgggtcactccccctcttttgtttggagaagcattttctggggaaaagagttgctgcaaaaaggtcttatcactaaaataggtaaagggcaaagcactttcatctcccatgattactggatccctaggtatcgccaagtcaccactctcatcccggcgtctgatacggttgcttccttaattaagaatgatatgtcttgggatttccccctaattagaaactattttccaactcacattgttcaggaaattctctccattcccctctcccttcaaccttctagtgatactctgatttgggaacacacaaaattgggggtttactctgttaaatcgggtcaccacattagtctctcttccaccgcccctcttgatatcccttcttcctcaaccccttcaccttggtggaaaaatctctggcaccttaatatcccgcctaaggtaaaaacactttgttttccgtgcttcaaactctactcttccaaatcttagaaatctggcctttaggaaaattatgcaatctcctacctgtgatcggtgtggaaacaatgttgagtctgtttctcatgctcttttcttctgcaagagtgttcaaagagtctgtaaaggtacgatattttatgattacgttttttcttcccctcccagtattacttttcacgatattgctcataccatatatgttaatttaacaaaggaggaggtagaatcctttctctgtgttgcttggcttatttggaataataggaacagggctcttagaagacaatctcaggaccagactcatgctatagtggaccttgcaaattgttttttggtggaatacaaatcagtagtttcaactcggaaccctcaagcttgtgcaagcagtaccccctcggccacttcttggacacccccggatcccggtcgcttaaaattgaatgtggacactgtagttccaaatgatccttcaaatgttggatttggaggtgtcattcgaaatagtgatggtttggtggtcgcagcagtggcatcatcttacgcaaagggaggagacatctctactttggaagctaaatctcttctcctttctctgcgttggtgtgttgaagagagctttcccattcattgtgtggaaacggattgtaaagctatctcggatgctctttcgcac

SEQ ID NO: 379726 - DNA, 876 bp, Cannabis indica
catatcatatatttgggacctacaatatttactacgtacataaatttagatttcaaactatacgtacgtattatgttatgttgttactaaaggtttactaagagacgtagatatatatgagggacataataacccaccagataatgcattaattccattgaaacaagttctaagaatggtagtgcctttggctggttccaatatctgtgggagatgattttggctttccattctctctgcctccggttcttggcaattcacgagcatgatgactctaatttttgttgcccactccgaggactagtacgtatagacttacaaatgcacacacacttatatatatatattatataatttgattgcatatatatgatctaagtgggtacatggaatctccataaaagaatacattttatgaatataataatattttcttttccaagtaaagcaactgtatgagtagtctagtgagatgagtagataacccattaatattgcaacataatttcaacgtagcaaaagtagtgttatctgctatttactaaaaaaatagcacactccatttcaaaaataaaataaaaatacaagtcaatttgttttagaaaggagatccactaactcaccaccatataacatatataattgctttagtttgttgggccagtatctcctttctttctttcattctcaatcactttacactacttaaaaatatatgtataaatgtgtgtgttagtctagagatgtgtgcctgatcaatttcgctccaatctcaagcaacatataatacatatgatgattgacccttataattaagtgtaatatgtggtactaattgttaattctattttcggcatatttaattgacaaaaatat

SEQ ID NO: 379727 - DNA, 2869 bp, Cannabis indica
ctatcaaaaatggacaggggtggacgggttaattttaataatttcttttttctttttttttggttgtttatttagtagagtaacttgaatatattttctttaaattttacctgtgtagctcatatctaggggttcatttgtatgcttgactggtaagattattgttatgtactgttgtgcttaagcgtaacaaatgaaactatgtgtgtccttgcaaaatgaatgtgtataaacattgtgaagcaaataatagtggttgctttagaagacctaaccatcatcacttttcaacaggcaaaaggcaggcttcatcggtgggactttgagacagaagaggagtgggcaacatacaatgagcagaaggaagccatgccaaaagctgctttccaatttggtgttaaaatgcaagatgggcggaagacacgaaagcagaacaaggaccagaaactcactaatgagcttcacaagattaacaagatacttgccagaaaaaagaatgacaaagagggtgatgatggtggtcattatgatgatgatttacaaccaggaaagaaacttagagtttgaggttggaagctccctgatatactgtaaaatttatgggaacttctttctctcagttgtacttttaaagttgaggatgcaatttttggatagacaaatgagattaattcaatgctgttcttcttgttgggcatcgagtccttcactccctccttgtgttttttttttttttttttttaagtaaggaaaaacttcgttaatcacaaacaaattcaaaacaaacaatacaagcagctcaaccgaaaacaacaagctacctactatcaattttttctacataacttttttcatgattttttaaacttctttttttggcaatttgtaatttataatacacaatatttcgagtatcctgtacaattttggaagttgtactcaagtaattgttgaagatgtaattgttcctattgatccacaagttgtagatcattgctgccagtattgaagtatgcactctttgtctcttttccttcttgttctgcactaaccaaattttccatctataaaaatctgttggccaacttcgaattcccagccacttacaaaccagctcgaaaacttgtttgtctgctctacaaaccggacatagagtactttccaaagctatatgaaattgagagaatttgtcctaaattaacagttgagcattgatcgcttgccaaaagataagcatatgcttaggcatgtttaaagagcaccaaatactctcgctaaactcaaactggatctggggcaactttgaaacgcccctgccttgattatgtctgcactagcaaatttgttcctcaagtgacaaagtttcctccaataccaactagaatatgagttgggctcttcctgcaaaggagaggtgcctagtagcccaagtgtggagtctttgtttaattttcttaataatcactccacaatcttcagctctccattttgtaggtcttagagggacccccaggtatttgagaggaaaatttccttcaagaagggccatctctctcataatagcttgtttaacgtcttctctcacctctccaaaatagagttgagatttgttagtgttgatagaaagtcctgaggtatcactaaactcatccaaaacatcttttaacacctgtattgagtgtaagtttcccttgctaaacaacattatgtcatccgcaaagcaaagactaacaattttaagattcttacacatggggtgatacttgtaattagaatgacacgcaaccaattgtaatctcctagttaggtgctccattatcaagacaaataaaagaggggagaggggatcaccttgtctcaaacctttctagcctttaaagctcccttgcactcttccattcatcaatatagagtaagaagttgctctcaaacatgtcattatccaagaaataaatatggttggcagattaaaagcattcaaaagggcttccaaaaactccaagttcactgtgtcatatgctttactaatatcaactttgatagtgcatcttggagaaatgttcttccttttgtaatttttcaagagatcttgaagaatcattacattatgagcaatagatctcccttgaacaaaagctccttgattctgattaacaagatcaaaaagcacttgggaaagtctcaaacataacaacttagatatgcatttatacacagtagaaatagcaagctattggtctaaactccactgcctttgttgggtttttagttttagggataagagttaacatggttgcatgaaattcgtgaggcatgatacctgttatggaaattctccatagctttggtaaattcagcacccagttcaggccacattttcttaaaaaatcttgctccatattcgtttggtccaggagattttgaattagatatactgaaaaatgtcctccatatcaatttcacttgtttctctaggttaagacgactccccagatccatacagtcagctcaaagccactgagcaagactagaacttgttcccatatagccttggaagtggctcacaaagtgtcgagttacctcagagtaattgtctataagctccccttggtcattggtgtaagaaacaatactattttccatccttttttttttcttcagattagcatggaaaaaagaattgttctcatcccctttgcataaccaagttaccttgctacgttgtctcaagaaactataatacatcttttcttgagtattgaaatgagtagcagcctcccgcttgttctttactaataaaatgttgataactgttaattttggtatgcctactaatacccaatttacccctggacaccaactaacataa

SEQ ID NO: 379728 - DNA, 549 bp, Cannabis indica
tcccctattatatattatatatattaaccaataagtggatatatgcatgcataaatataatgcctaaatttattcccaccccagaaaaccctactccagttaatgcacacttgaagcctcttaattaagtaattaattaagttgctatatatatatatttggatctaaaaaagaccactttcgattaattattattattatatatagaatcagtagatatgattaagacgtaagtagggaatatttgaatttgaggtgattcaccaggaaatatatattcgacaagtaatttttccccattaatgatattatatatatgcattttttattatttgatttttatattacttaattactcaatatttgtatattattattagatttgagattacgatcctatacagaatcatcatcttgtactgaatgtgatctttggtttgacaatttgttcctttttttgttaagaaaaagaaaaacatgggtataatatatctattttatataaaatgtgcatatatattagaatttttagtttatgagaaattcatg

SEQ ID NO: 379729 - DNA, 1214 bp, Cannabis indica
tttggagagctttctacctggttgtactcaattgaatcctctctttcattctcgaattgtttgttgaatagttagttgtgtatttatagaactagctctttaacaatctttttttgtatttgcatcggtagttcagaaggaggattttctaatgtttgtataggtgtctcttttatcgctgtgatgcatagtggagaatcaattactcatgtctgtgtctttctgagctcaatataaaacatgagggagttatcacttagtagcttcattggtgttgtttctagtgatatatagtagcagatgtcaatgttatttctaatgcaatttatcttagtttttataatcgtctgtctattggcccccattcttgattacacaaatgatgtgttccattcttgcattttaaaagaaaaggtatgattagcattgcattgtaacttcattattggaattgattttttttttatctttttatgtatgtgttgttttggtttttttttataatcttttttttttctttttatttagaattgattttttaattcatcttttattatcaatttttgatgtgtcctgttctaatgtgatattttagttattgctcttgtagtcagaactagtgttatatttatgtacgtgtatatatattaaaattaaaaattctaattctaattcaatatattattattatctatatttcatattttattttatcattataaaaaaatataattttgtgtagaacgaattcacttgttttgaagattttgtaaatttgttggagtgaatgaatatattgctctgttttttggtcaatttgtttattttttttaatcgaatgtttttctttgttgtttgttgttgcagattctttttacgttttatgttttgcaggtcgtcgaaggaatagaagttgattcgatagtggagaagatgattagcactattattgatgatccacgacaacaattgaagctgaggaaggtgattgatagtgaatcaacgatggacaatttgacgtttgaggttgtcaacagcaaccaattacagttatggaggaatctaaagatctcccccgtcaatgtgatcctaattgcaaaaccagcaagaaaaaaatgaacgttgcagaagaagagaagaataacaatagagtattggatgataaaaaaggcagcaaccttgtattgatatccaggaatttgagagcctggttc

SEQ ID NO: 379730 - DNA, 8962 bp, Cannabis indica
cttgagcaagttagaacacttagtaaattcttggtaatttctggtatatgcaaaagatttttaagaatcaaatttttatcaaaacattgacatttaaagaaagcactaccagtatgttgaattgccagacctgagccatttcccacatacagcctctcgtgaccagtgtagtctgcattctgcacaagattgttcacatctggtgtacaatgattggtagcacctgaatcagggaaccactttgtgtttgacttttgagcttgcatagaggtctgagcagcatgagcttgcaaaggtgtgttgctatctgcagtaagaagcacacgtagcttttgtcaaacctgtagaaacactcaagggccaagtgtcctatcttatgacaaatttgacattgtggtttgtttggagtggtttgaaaccttcctccaaattgagtggcattatttcccctgcctggattgacagtgcttgatccacctcgacggagaaaaccagaattagagcccctgcaatttcgattgtagtgagcaagcaaggcttcatatgaccattgattgtccagatctgctcctgcatttttagctgtaagatttgcattcagatcaaattctttatctgtcttctcaattcttgatttagaagcaagcaggagtgcttcaatctcagcaactgaatatccttcaattcgagtcttcaatgagatgatgaacgtgtcatattcacttggaaatcctttaaagattgtagctatatgatcacgtgcagatagaaatcaccaacagatgcaagaagatcaacgtgttgttttaccttaagcagataatcatttagagatcgtggtcctttcttaagattctgaagtttaattctgaactccaagatcttaaatgagacttgcaaggtaaaatgtttctccaagacacttaaaatctgtctggctgtgttgcatccaaccattcgagttagcaagctttcagtcatggaagataggagccaagataccagcaattgatcttgaacctcccaagaattgagctgcctggtctgcatcactcaagaattgaggaggtggagcataatcttgaatgtacttcagcatcctgttacctctaatggcagcaagaacctgttgtttccatataaggaaattgtgatcattcatcttaatcgacaatgtgtgattgaagtacactggtgaagattcatcatctctggatcaagttcgatttgcagtcgagaaacctggtggtcgtctagggtaagtggagctggaattagtagttccaacatttgccatattcgccaccaatcgtgggtaaggctctgatacaatgttagtgttggaatcttttctccccattgttacagagtaacaagaaacaaagaaacagaaagagaaggagaagaaaagagaagaagaagacggaaagaaaaagagaaagagagtgaaaggaaagaatttaccttattacaatattgagctgaagtacacaatatatacatggctcaaggagccaaagataaaccaatagaccataacagaattgtaacaaaattggacagcaacaactaacaactacctaactctctaactgtctttacagtctacatgcatagaagcatttgaaaaaaatagaaatgttttaaaatagagaatgagtttacgtcatttgttggaaggtgttttgctctattgttctttgaatttttaaagaatctttatttgaaatgagctattgggagtgcttgggtagtatctaatttaattcaattaaaccgaaccgatccaatctaattcaattataaaagattagatatctaattacaattgaattagactggatattaaaagttagattctaattagattgaattggttattaatatcaatcttaaaatccaattaaaattgatttaatctaattacatttaatgtaagtaaaaataaattatttatatatatgaaaaattgtttcataagaatttttttaaatcaatatgcatatgcatatgcatatgttttataagaaaagaattaattgtttaaaagatataaattaaactattaactaaaactacctattattataagttactaccattttttatttatttttatttttttaaaaattagataaaaataataagaatgaaaattagtttattagtaataatttcctcaaaatttttataatgatctcaaatttttagagtattattgataggcagcacaacaacttatgacgtgtcattctacttgacaattttttaattcatgagaactaatgtcattaatcttttagaatcattttttttttcttttaaatcaacgaatttcaagggcataattttcatacgttattcattttcttatttcttcacatataatatcactatttatgattatatacattcacattagtttttttttctgagaaagagaaataaaaattagctgttgttactttttatattattttcttactaatagtttcaaataattattacttatttttatatatttaaaatgtaaaatttgatattatatattttttcttttatatatatattaaaaaacaatttaatatcttattttctattttgtaactgtttttaaataaataaaaaagaatattgtctttttgtttccaaattatattgttgacaaaaaatttagataatcattaacctttgaagtcattaacaaaagaaaatgaaatgagatttggagaagaaatagaataaaaaaaattaaacacaatggtttgaggagttagatccctcaaatgggacaaaagaaaatttgaaatctttgtcacatggccatgaattcatgacctcctacaacaagtttttcaaccgaatagtacaatattttaagaaaaagaaaatattttttaaattgatttttttctattttaattacaataaatttttgagaggtaaaagtgtaattttggtttttgctaagatgtatttgtaaggaatagatgtgtagtgatagagatcatgtattcttgtattttttttttctttatttcttttttttaaaaaaaaaaagattaaatggtcattttagcaaaaaaaaaaagaaaaaaagtgtattctcataaagattatattgttggcaataacagtaattctttcaaaaaaaatacaattcaaaatttatttgtgatatatttattaaaaaaatgacaatgcataaaaataaaataatacaaaatttaacatttcattaatattttttattatttttttaaaataactttatcattaattttaattattatcttattatgtaagataataaaaaaaaatatatatctataacttattgctatatctaactagtaataaaataagagttaattgtagtaaaactttaaaaaaattatctcactaacaattaaccgcctaaaccaatattttagcagcaatacccttaaaactcatggtctgttaacagttaatcattttcatataaatttctctgttaaaagccatgtttgactgtaatgaacacatgacttagtttaggattagtatggcaatagacattaattattgttatttatcgattatagcaatgggcattagagttagaatttttcaatctcagagattttattaaactctaagtatattagttatgttatatgcaaattttacaatttttataatttttgcctgacgacgatggaaaatgtgacgaatggccaaattagtcacatgggttagttagaatcttattatttagagggatattcctaagtgatatttgagatatcgagaaataagcgaggttatgatattggattattttaaccgtaagtcgctttatcttttaggtgtgttgaagggtattatggtcatttttggttttggtaattaggtggctactcttagtgggggcagctggccattttctaatagattaaaattaattaagtgtcaattattatgagaaaccaaactaaggggaaaaagaacaattgcaaccaaatatcatctctctctttctcttccattcgaaccctagagaagccaagggaaagctagatttctaggattgcagcaggggatttgtgaaattcaagttgtggtaagaaccctagaacctatttccacaagcttttttgtttttcattaatttctagtatgctaaggttgttttcagctctgtctgaaccctagaagctagagaatattttttaggttaatttaagttggtttaggtttattttagctaaaattaggggctggtttgattgttgagcaagtttgagttcaagaactcaaacatggctcaacaattgtggtttgtgtattttgtgctatttttagttttattgcttggatttggtttatatggatgattgtaggtgttttggagcattttggtgaagtttggggttgatttggttcaaaatgggggccttttatttttctacaataaaaaatgacaggtcatttttgcagaaacggcttgtcgtttattctggtacaatatccaaaaaaacgtctaccattttttgggcagtttccttgttttagggttttcgtgtgtttcttcgatacttaggactttgctatactttttatcgatagggagactttagtttcaagtttaaatccccgaaaagattttagaaagttgtttaccggtttatgcgattgtgatatagggcctccgttcagtgagtgagtttctattcaggtcgactggcacgcttgaatctggaaccgaggtaagataagcataaagtatggtatatgaatgtgtgtattgatattatatgcatgcaattatatgttttataggctaccaacactagtacggtaatggtactgagtgcatgtggtacagcctgagagtacaacccagtattactaacactagtatagttgggtactgagtgcatatggtacaatacttagtggtaatcggggtacgaattatacactaccaacactaatacagcgatggtatgtagtgcatgtggtacagcggtcgtaccctagttaagaacattcttgaccatatgacaagcttagttgataagtgcgagagggcctaattaaaattcgatattacactgtatattttatgcatatcttattgagtttgttgactcgccaatgtgttatatgtgtaggtaaaggaaaggccaaagcggtggagcagtgagtttggagctcagcagtgattgtacatatcgcgacagtacaacatagagggttctggcctgggaacattttgagtcaacttttgtggtcactatgtgacatgtataaaaaagtattattagtaatatgttatgttacaagaaactagttttgaaatcgggatcctaacttttgttaatatatatatatgacttttatggtgtaaatatttaaatgtttttcatgttgggcgttacaagtttggtatcaaagccaccaggttgtttattgaagatcgttaagatatgtacaatcattgccaaagatgagatcaactcacggttctgtaagcttttactattagcgatttgtttaacttataatatattagatatgttgtatgttgcccaaatccataaatgcgatatcagaaatgtatatgaccgttggctaacctatatacctcatgggttcgcaggccaagtcctaaagaatggacgcccagcaaaacgtaagaggacgtagagaaatggttgagactaggaatggtcggggtggtcgaaacccctaaaaccctgtggatgcagcagaggtcatggtcgtactcaaaggggtggccaaggggatccacctcaggctcgtcctgattgggagcagaggtttgctgagatgtaggactgaattaaccaacaagacgatgaaatttgaaggcttagacagcaaggttcccctgcagtgccgcctttacaaccatcagtttttgttgttcctacggtgccaatagaaccacctattgctggtaatcgtatggagcctctatatgaatgatttaagaagtaggcacctctaatatttttgagaggtcccgatgttatgaaagcggaatagtggttaacggtaattgaaagaattttgaatttcaagggagttaccaggaatgacagagagacgtgtgccacgttttagtttcaagaggatgccctagtgtggtgggagatggtgtccctcactcgggacgtcacggtaatgacttgggaagaatttcagaatttttttaatgacaagtactacaatgaggcagtgcgcagtgcaaaaaggaaagagtttactgattttgttcaaggtgagaacatgtcagtagcagaatatacgactaatattgatcgattagcgaaggtagcttctgggatagtacctacagatttcagcaagaaggagaaatattttggcagggttaaatgccaagattaggcatgacttggttatcacaactaatgataccacaacttatgctgaaataatggataaagttgtctgagccgaaggtgcagttgaattcctgcaagagactcgagtgatccctagtgtcggcaagaccattactcttcctactccttatcctggtagggagagaggtgtttctaccgctgagcagaagaagaggacattcacaacttctggtagttcgggctagaataagaggtttcatgggaacaaagtcaaaagagggcgtcagacttactcctatcctgagtgtctacattgtaagaagcatcaccttggggagtataattgaagagcttgttttcagtgcgggttggttggacacctcaagaaagactatcctcaattgaagaaagaagaacataaataagaagtcaagcctgctacggcgcgagtgtttgccgtcaaatattttattttggcattgatcgttaatcgatggttatgatcttaagcgcctattatgaacgaacacaaattgtgtctagttttgtgtcggtggtacatacgttggtcttgagaaccgacggtaaaaatataagtgtctatttaaaagtgacgcctaaaccctttttttttagtagtatttaacagtcccttcatcaactctaccaccaccaccaagactacatcaaaaaatgtttcaattttatgggatttagacaacacacattcacaagttgtatttagacctaaacccatgggtatgatctcccacttaggacattactataatcattagacgaggagaaaaggctataataattactaaattccttagagccactgatcatataaagctaaaagaggttaagaggagacatgtcctaatctgaatagccagccctatcgaatttagtttcatactatttagtaatcccaaagtaggagttattacaacttaactagacatggtgtttaggataccaactatcgaacttatatgtaattaagtcaatgcagtttcagataaagaaattatactgaccctccttaaattgaactaatgttattcgatcagccccaagaatggtaggagaccagccacaaacaccagaattattacctcgggaggcctcatcttcagcttcccgagtggtcatatttttaaagtaatagatgcgagcgacgtagtcacaatcttcttcatccttgggcatagggatttattgccagtttggaaacttgggggtcttaaagtaatttgtacattgatccctaccgagaagggcacatgccttcaagttatcattgtgcaataagaagttggtagctcgcaaaccataaggaaggttgagcaagatattatgcctttctttgatttctggtgtggggatgggtctcctggtgattgctggaaacatgaaaaaagaatagaattaatactattgaaaaaggatagtaactcaaaaccaagatttggagagaagtcagtacttacgtataattctaaatttggtagtattgattggatataatccagtggtccaaaaggaatcgtctttaaattattttttgttgggcagcctcacaatatcttgcgatcattggtatgggtttcgagataataaaaaccttctactccatgcttccttgtaggacaggccttgacgaagtataagtataaaatttctaggggtgttagacacttccatttcaaaatgttgtaaagagatttcaaattggctaggatcctgcaagagttttgtgcaagctaaaatggtataatactaagataattgtagagctctttgaaataatccctaagggggagagctgctccagcccttatatgtttgacgctccatgctctaattttagaaggctcgctggtgatgcaaccttcatcttggatcaaacgttcaggagggtaacagataaactctccttgagcaacaaatcgaatgcgacatcccttctcgttccttatgttgcacaatctcaaaatgtccctaacataagggccaatagacatgaccctggactcaattaattttgccttgaaagtgatagaaaggttctgaggggtcttagatttgcaagctttttgagccatgagttcaaaatctaagtgacctggtgaaaaagcaacagtggctggaggtaaaaatattagcttcgctaagggaatattaactaaactaggagagtcaagtcaggttactttacgcaagtaacaacatttaccctcaatgacttcttctaagaatcgcatataattgttagaaacttcctcttggttagacctaatgaggcggttcctaatttttacatcattaatttcaagtaaggattgaggcttttaagtttaaggtttataaactagagcttggagttgaagaagtctgatttctgaggattctgggagcatatattttaggttaaagtgggacatgaatacagagaataataccctaattcctggaaaaatagagcataaataaaacccaaaacctgcgaatcacgtaaccttaaattttctaagccctaaattacccaaacattcata

SEQ ID NO: 379731 - DNA, 956 bp, Cannabis indica
atctactatagaatgcattttgttatctcttatgattgggtttatctaatacttcttaattatccaaaggcaaaaagtcgatatattcatcaaagttcataaagtaaagcttatagtacgtaacaaattttgtttatttatttatttattgaaaagtgttctatttttctttagaaaaagtttgttattataaattaaacagaatcatttacaacagaaaaaatcacagaataaattttggcttggtaagagagatcggataactgatgtgacacaatcagcaccaaatcttaacaactagaaagatttgatgtagaacaagtcaaagaattaacgagaatcaacgaataagcttctactaagtcaattgacaaaccaagttgtctagcccaacaaacaccataaaacatggcattttgcttccatctcttgagatttataatttccaataactgatttagcaagagcagccctcacctgtccattggaaatctcgaataataacacccaatcccattttgttcctcgaagaatcattagccgcatcgacatttaattataatttgttctttagagaggtcatcaaggcttatgtgcatccattctggtttattgtagcaaggatatcaacactggtataatgcagaaagttttgaatgtaggccatagcttttgaataaacctgaaatgaagtctgtagcaacttgtcatggacaaaattatttctatcccaccaaatataccacataatacagagaatcttctcgatatcaactgtggaatagattgaagaaagatgaataagaaaatctccatctcgcatttgattttccattctgaactcgaatgaataaccagctgctctccaaacagctttggcatgtttactattgggcttagatgcatataggaagcccatttatttttagatatataaatggactaggttgctaaaa

SEQ ID NO: 379732 - DNA, 1921 bp, Cannabis indica
acgccaatcctttcttccttattcagaatatcatttaaaccaccaagaaccagcgatgctcttgagtgatacaatgtgacaaatccttccacaactctacccttccttcctcctcattaaaaccatacacaaacaagataaaaaaaaactatttcctttatcaaatggtctaaccaaaaggtgaattaattggctagaacatttgataatagaaatagagaacatggtaagatttcaggtcaccacaacatgacctccattattttaagcattaattgaagtgaaacaccaaccaaagaataagctcacatacaagggtcccattttatgagccttcactcttgtttcaagaagcccaatcagcccaatcttgtaatgagagattagtttattaaccttatttttcttttgatgggtattaaattccctgacaatccacgacatggttctatcaattggatataagaggcactcaccccctccactaataacattttcttttgaatcatttgagctcttgctcttatctctttctaatgcttgaaagttcttgctaatatcagtagcaatagttaaaacttttccttttgtttccaacctttcgtaattgcctgaaagccctctatataaaccatggtttgcttatctttagctttttctaccagtgttggagccccatgcctttacaatgtctgcaattagttggaacccattcataattcacactaacaaaaacctcttgatcaaactcattctcaaatgtaatcaacccaggaaaatccaaattgatagtaacctcaattaaaactctcacaaaattttacttatctcgatttttagtagtaattggatccaccatcagaggagtgccaaattgactaacaatcttgaaaagagaacgctctccctaatatttcagctctagactagttaatataatccatgttgggaccttacatacattatccttcttaaaatcagtcttagaatcccctagcttgagaataactagtttcttatcaaagaaaatatagccaccctcaatcatagcatctcgatcttcaattgattcaaatcgtatgataaagataacatgagatagaatacccaccttatcgactcctccagacttccaaatccttctggcgaatcccttgagcataaagaaaggtagattcttccctaaaacatagtagacaagagaggaactccaaaaatgaatctcctcttcaatatcctctaactctatcttaatccccttcttagcctcaaaaatcttaattagcaaattttacacttaaaatttgaacaatagatcctgatctaagaataggagtacttgagcacttaccttctcggatatccttcgaacatagctaatatatttatagaaaatatgagaagtcttgcctaatatcatctttcctttgtaaaatctccattttcctctttggtgagtaaaatctaaggttccttctccatcagcgatgccttcagggaaagaaaatcatatttctcttccaacaactcttgttcttcctagaactcaatgacctccactcctagaacttcaatcattaatttcatttttttagcctgatttgatgaggaaggaccacatttcttcttcttcttcttcacaactaatcaaaattttcttcgccataaagccagcttaatatttcattttactttggaattttatatattaatccttaattttttgaaattttgttaattgaaaaaaatatctaaaattatataataaaataaaacttataaaacttttacaaaaaaaaattataaaaccataaaatttaaataaagttaataaactataatattaattgttaaaatcataaatttaaataaaaaaatataaaagcataaaaaagtagtttgtgttatcccaaattttgca

SEQ ID NO: 379733 - DNA, 3719 bp, Cannabis indica
aaatttgataacaataatatcaaaactatacaaaacaagggccaacgcaagaacacactggcgtatatactaaatgtacagctactttttaatcaatataaagggaataacagaaatatatctgtgatgtttaattaatattaacgactgtacgcaaaataatatatatatatatataatatatatatctgtgtgcaagtgtacatattgtcatcgaaaaattcagaatatacttatcctatatactatataatacttattttttgttataaaccaaaatatataatactacttcaaatcttatatataaatatattgggagctatcaaaacactatgattgtttagtatatcaatttttttaacagcattactattaggcaccagtagtgtctagcacattctcgacatgtcacgttgcgattaattagcgatactccctaaaaattattatattaaattatacgagaccaataccacatatagtagggtgctaagcaccactgatgccctttagcatttcttttttttaatcattataattcccacactcaaattacatacactttttatacccacataattaataacgtgattcttatttaaaaatataaatagttaatatttaattagcattattcatcataagtcacagtagaattgcttaaacaatgttcataaaagtatttaattagaatttttcaaattatagtgaaatgttttactatgtaaaattatcattatatttaataaaaaataatgaagctttttcttcttgataaaaaaaaattatcattatatttaataaaaattgagttataataatcgcattccaattacgaaaatctctaaacctatatataagtgcatactatgtgtatatttatattataatcgtttaaggcttgcacgtatatttatttgtctatggatcctaattccaaagatacatatgagatagtttctttgaaacttaaacaaaagtatatggtgtctcaactatataattatactgataattaaacaatagcgtagtactgtccaaaaataaatttaactaaaaatatatcttttattaaaactagaatccaatatatacacacaccaaacactttttcactaaggaataaaaacgtttaatatacctttatccaatcaaatttcgtgtgtaaaacctaaattttatcaataattcattaggatatatgatcaaatcttctagctatatttagtgttagtaccccgacacctagctaataccaatcttctaagataatatatatatatatatttatattaatgcctaccaataaccaaagttcatgcattataggtagctttaagaaaattaaattaaaaaaaaaattatatgaaggaacactaatcttctagacttgccccaaatattatactgatacctatattggttggtaagtccaaagaaagaaaacattattatcggttgggttggtagtgtaatgttggtggtaacctctattctatcaccgaactagctaacaaactatatgtaatatatatttaaatatatatatatatatttctttatatatatataccttgtttgaccctacaaccacaacccactgaacacaaaatcaccacatcattattattttggaaaaagaaaaagtctatttttgcctaagttacccaactcatcgaaaatgaaaaaagaacaactctagctagctctttctttttttcttcctctgaaattaattcaaagtaattatttagttattattataattataaactctttttattaaatcaattttaaattgcaactaattattaaatagcgattatatatatacctgtgagagcttgtaaggtgttctcaatttcacggcaagccatgactgcttcaacggcatggattctcacatgttgttgaagttgttctttaaaagtacataatactatcaagtattgtgcctaaataatataaataaaaataatatatattaattaataatcataactatggtggtgacttaatatcattattaagttgtactagtaatagtagacccaaaagtttgtcaaaactactcaatattttttttttatgtgaaaaaaaaaactactcataattattaaattaaaaccacacaaaattaattttcccaagctttgtaataggaacatgactacaaatttactaagttataagggtaattttgttacgaattaatggttataaataaaaatcaacaacatatataatcaaactttgttatgtaagaaagaacaaaaataatttatagtttagctcttgtgtaagaatattaaatgatatgtttaaaaggaaaaactacttaattagaatatatatgtatagtattgtgtaaaataaaaaccaacaaactttgatgaagaaaaaagagcaaaactttatccaaactaattaagcagagtagtagtgaattaaaaacatgagatcatatgtatagacttaattactttttaattatgtatatataaaagagaaaaactttatattatgaatataaaataaattaattataattaccaagaaattgtcgaggtcttgacggtcatggtgggaaaggttgttagaatgagcaagggaagcgtaagaacggagcaagtggtgggactgagctaactgagcatcgatcaacggcaactgatcgatgggtgtggccacgcgcagacaagacacgtgagccgccaacaactgctcatacaaaggatgagtcacgatctcagccttgacctgccgatcctggtcgccggagatggaaacatcaccaccgccacttgaactaatattaatgttcatattgttcatcattccaagcccacctgcttcttgcattattgttaggcttcaaatttgaacaagaataagcaagagagagaaggggtttattatggttataattaatggcgtaagagagatgaattatgtaatatattgggatctgagacgcaaaactttctgcaccaattctgagagactacaaggatttttcatacacagagaaagagagagaaaaagtgagaaatggggcttttttgttttttttgggttttgtttcgtttgatgtttttgagagagaaagagaaagagttatagaatcattacaattaaaggggttggaagcaaggtcagaaaaagaaagaagataaagctgtttctgtggcctgacaatttgattgctttttgttctttttttttatatatattttaataatttaattattttggactttgttaagaataaaccatctatacatgggtccatatcttattattattatgataagggatatcaatatgtctaatcctgattaggtgtggaaaaagaaaatacaattttggaaggaaaaacaaataatggggtttgtaatttatttatttaattttgtttgaattgtttggtgtttcctttaaatattattatttatttcaactaactattaattaagagagtgtgtggacacatctcggtgtagatttataaaccaagcacacttctttcaaatcggctatttaacctaatattatgagtattatagtaccttaacctatctaatattatacttacatagtggctaatgctcagggttcgccttgaaataggcctatagaaaaacaaatgggaaatttgattttctatacttaaaagttttcaaaaaaatttttttgaaccaatacattttatacta

SEQ ID NO: 379734 - DNA, 4889 bp, Cannabis indica
ctgtaaatatgtcgctcatgtacattgcgtaatctctgaggtatgtcatcatgaatcatattattaattcaaatatttaatataatattttattagtaaatttgtaggaatatttgctataatacatttattatcttttcgttttaactagagatagattgctaatattttattgctaaagagaaatatgtttatatattttctctattttctttttgacttcagatgtcatttaaatatagattgcgtattatgtttttaaaagagttattattattattattattattattattattattattattattattatttgttacaatgatcatggaatattgattaatacaatattttcattaactaatttcaagatgtaagataagataattgacatcttgactgttgagggttgttcagttggcaaaatatgctttagttgtttgttctgtcttccttctctgcctgtccttgcaattaagccattaaagcagaagtttcctcaccccttatcttaataatagttttgtaactccacaagcctaatacaactacttcccaaaaccttccaactatcttaaccctcctcacacttcaccacttatatgtgtgtgtttacatattggtgctttggatgtgtcccttaatttgtttaaaacaattaagcgaccaagtattgtgactgttctaataaaataatgataatccaaagtctcaatagctcttgatcttctagtcaaaaaacgatgaaatcgtgtgtaggtgcaccattacgtggtacaaaattgttttaataaatgaatattggtgtttttcatgaggggcaaggcagtaattgcaaatgtttcagtagtggtacacataatataatattattatctatgtttgcttttgatgtaaggtagtattgccaaataatgtttcatagatctacgcattaacaaccacaagtcaaacgaccaaacaatttagttagacacctcttatgtaattcttgtcatagaatccaatggaaacatcccaaatcatataaaagctataaaattccaaaggtagtctcaaaaactatagatacaagttttcctattaataatacacatggcaactaagcttttaaaaccccaccctctttactaccattttttcatccttttttttttccctccctacaatatagtaagactcttctcttaggaaaaaacaacaacatagtaagacaaaatctaaggatatttattgaaacgattcattggtggagatttagactatacaccacacacaatgtagatttgattatatacaacgtggccaaggcaactccaggtttttttttttttggatagaaatggtcttagtcaacaaaactgtaatatatctcattggcaggcgactatgctgtcacacacacacacccctcattcagtgtcaattttctcacacgttggccggcataaaagaaaagaagggagaaattagaaattattaattagaagagaagaaagagttaggcattgcatatttgaacaaggaattcaaccaaattggtaatgtacaagagagctatacttttgaattgaactccaacccccaaactcaacctatatgaccaaagcaatggccttacatcccatccacgtccatgatttacaggtcaaatggaaaattacattccaaaccaatcttaacttttgcaaattacaaacaatccaagaagaaaaagaaggaaagaaaaaaattaaaaaatccgctatcataatccaaaaaggagtccaatacttgagcattatcttcaatagggtagtgtatggatgatttgattattggttgtacacctgagtgcttgtaagacatctccaatgccgtgtgcggggacctttttcaagaagcatcagtaaacccatactgtttgctgatagcccaaacatgtatctgcagtcataaataaagaatgagcggaaacaatagacgaacatcagatgccaacactaagacgaaagaaagcaatttctattctaaacatcagcctgaatacattaaaaggaacccccttttttattttctttcataaataaaactagtgatcaacgaattgctcaagggtacactctactctttacaagagctatgtgttctgtgttgagctatcacaatgctttccgcataaatctgctacatatttaaaaggcgcataagcatatttcatatgggatactgttttagttcgttacaaatcattgttgttcatcaacttaatcagaaatatcattgatccaatcatcagcatataagatgcattttcaattttatcatcacagaataaaaaaaatgtaacccatgaaaagtaagtcaaaggcctattctttaataattgtgtaagtgattaatgaattactcacttgcttcggcgagctttccttttccagaaaacaaaggatacaatccactgaagatcaaacatcaaaagaaacattgaattagttgaagttaacaaaaaaaacgatgtcaaagacgcaaaagaatcagttgcagtcaattgcaattaccttgaaaacagatatgaaggaaaagcttccaagtacagatggctttttaacagtaatttgtcttgagggtgacgcatccttgcacaactgttgtgctatttccttcagtaacactagttgagctttatctgttccgattgaaagaattgcttgcctcattgattccctgtcagcctcaagtgcctggagcctcatatagagcttcttgatttcgggatctccaatatcaccttgactataagatcctcttggagtgtttatgttatcctcaccattcccaactccagctttaacctctgcataaccattgtaaggcaccccattatggatcgagtcaatcgtataaaccctatcactcatgtcgtctccaatctctgatccataatctgtatttcttgtgttgtactcctctgcatgtgtaacatactctgtcttcttgaaactaacattgaacctaggagattcagtgtggaaatctgtgccagtttctttgaccatgcctgaaaatgaaggtgaatcatttgagtatttcctgaaatgtcttgaccgcctaggagagtggccaactatcaccttctctaaaatgttcttagtacctccaaaatccccttccaattgattattactaggacatctctccatctggtgaatcctatgctctaaatttttcaagtgatctttaccgcgaggtgtttcaccaaatgcatatttttcaacatctgcaacatcgtcatcatcaacctccaaagaacctaggttctcattgatattgcatttcaaaggtgggtattcaaacattggaatctcattttgagagtcaaattccatcatgttgttataacccttctcaccctcagcctcatcttctgtgagcccataactcagcatcctatgcttatacgcctgcacttcacatgagagtgactgaatgacctgctccctcttgtacaacaagtcttctactgctatgaactcttgttggtcatgtgccatcttctcctcagcaaaacgcttaaattgccgcgcctccatttgaatttcagccttctccctctgtagcctgagtatcatagacatggcttcatttgcagctgacgaggaagcatttctctcctcttctaattctatatacaaatcctgtatagtttgctgctggttaccaaccatctctcgtagtgcagcacattcattctcaacttgaacccgagcaaccgataaaggttcaaagcccggtatgaagaaccgcttattttcctcaaactcatcatattttctcttcacagacctaaaccaaggccctgaagtaccacttatcgaggaacaactacaaccacaattacaacatttcaccaagtccctagaagatggacacgcttccaaatccataaaacacttctcatccaatattcaaacaattcaagatcaaagagaacccagtttcactacagatattgaccaataatccacagcaaagagaaaaaaaaaacaataaactgtatcttggagttccaaatctctctcagataatctcaaagcctttaataatgattttcctccctttctttactccatccaccagcaatattttcctccggcacaaatcacatgaaaataaaaacacctaaatccaaaacattaaaaaaaaaaattaataaataaatttgaattttaaagaatgtagagaaaaaaccaaactgatattccagaccaaaaactaaaatataagaaaggttattgaagaataatatgtatatttttcaagtaaaccatagaattcaatcgaaattaactcggagaaaaaaccattttcatttgattataaacgaataaacataaatagttgagttattaaaaaagaaaaaaaaaaaaaaagaaaaaaaaaatcaaaatttcctatttatttggaacaaatccataaaaaagaggcttaccgaactaggtcgtcgattacagctggaaatagagcgaacaaaattcccgggaaacgcagcttttccgagaaaactcaggatctaaaaaacaatgaacaaagaaaaatatgcagaataataatcgaccaccggatagagctggtaacgtttttcctccttgtgataaaactttcgcgggtgtttggagggaaggaaaatcaaaggcagagagagggaaagagagaattggaaaccctaaaattctatttgattttattaaaaagaatataaaatttgttaataatattttgtttttggctttcttgattttcgcgatttgtgttttgatgagagagaatgagagagattcagaaaccaaagaacagagattgataaatttttgaaaaaattaattaattaattaaattaaaaaaaa

SEQ ID NO: 379735 - DNA, 6105 bp, Cannabis indica
tgaaacccttgatcaaagaatggggtgttttctgggatatttcatttgttgcaatagtggttgacgattcagtaacattaggaggcttcaagtttgttttgttgaggacctccctatatttttctttatcaagttcatttttattaacatcattcgattgaagatttacgggaactttccctaactgttcttcttccagtctgacagaatgttttgatatttcaacctccacaagttctactccactagcatcctcttcttcatcggaaaggggaacctcaggttgagcttcattatcattggcactgtaggaaaagagaaatcattctctataagaacataaatatagacatgcaaaaaccaccaaaagtagaagggaaaacaagaaagtaccatgcaacatgatacataacaagttttccttctagtgtaagacacatcagaatgcaataaggcgacagttcttttggttcctcggctccaagttgaactttaacttttccatagcatgaaactttatcagtgcaaagtcccagtatcaaattatcatcaccattttctgaaacacagtccattaataagcatagattaaatactattaactgaattcagagcataacaagaaacaaagaacttcaagtgattaaataaataccttgaagctcgatccttgggagcaagttatctcgctggatatcaacactagcaacctcattcttttcctctccgagtgaccaaccaatatacactacatgttcatctgtattcttcttgttagcaactagtgcaaattccctgtgatcacaatggaaaaaggaaagtaatcagaaattacccttctatgcgtgacaagtgattaatcttaaattaatatactcaaaacaatatcgatactatttatcaaaacaatagacaaatctcatgatgtgtgcgggaaaaaatactgcaaaattgtccctttttggatcatacactcaaacttccactcagtttctacagaaagctaccgctcctactgaatgctttatctacgatttattttaaccaagaacctcttccgatttcaaagaggatgaagaaaagatctccttaaagacaacactctatgatctactaattattagaagtaggtcaaactaagtacaacaataaaagaatataacctatcatcaaagacaacacatagagtgaaaatgaaacaaatataatgacaaacaaaacaccgaaaataaagtacttttccatttaagaaccaacaaaatgtcaaacttttctttagtttctttcttgcattaatgtgcatgtcctggcctatcaactaacagcagaaaaaaattatcaatctaagctcttacaagtgcctaaggtacagataccacagaaatttgaaatgaaaagcacataccacttctccaaatagctcatcaataaataaggtccgcttccaaacggcagaataccatcaacaacacccgaaaacaaatcatagaaagatatggcaactgacttgttggaggcctgcaaaatgaagttccacaaaattaaattaaacatgacaacgagattcacttagtagttcagtgcaacttataagaacagtgggtacatatgtattggatattgtcaaaatagattctccatggattctgagcccctatactttcaagccaacaggttttacgactttaaaaaaagaatttccatgattaaccactgggcaagcacatgatcaaaatttgaattgataaagtttacatacatcagaaattttccctcctttgcttttaataacttgtacaaggtaattttcttcacttccaccttcacccagttgaaagcatcctaatacgatgctatccggacgaacccacctgatagaatccactgatgattacagaaatatttcagtgtcataggcgccttcctctttatatcttgaaaacaatttaacaatcgtatgctatacatcaatagtgtaacactaactagagttatacagaaggaaaacataaaatatttgtcatttaaaatagacaggaaactaatgactgcatactaaaatttgacttaatatagcagtcttagtttaattgttgtatgtttagttacttttttattatgctaactgttgtgtcaaaaccttataatctgattggtcacaaagtaagatcagtcaaagggttgttagtataaataaaccaataaatagctagctagattactctttagacacctggtttgtgcattggtgataaagtaaaattactttcatggagataaccagtcttcaaagaatggtaattggtatttgtaacttttacctttcgtatcaatacagatcattatacagaattctttcaagacagtggtctatcttagtgtttatacttataatgagaatactaacttaactgttgaggagccatataaaatataccaaaacagtagttgtgtcaagtgactgattgaaaaaagggagaaattaaggcacaatcagtaataaaggaaatcaaatttgaatgcacatcagttatatcacatatgaaagttagatacaaagaaataataaatatgttgcacctttcacattgcaatcctcatcagagtcaccaatccaagacttgaatggaagtaccatgtgtgatttttccttaaacttagatgacaagatgataagcatatccttcctcgccaaggcaatataatttcctttcgcattccactcaactatacagcaaacaaacattagaactagcattagaaaacctctgaatggaacaaggagtaaacaaatattacaacaattttttcgaaatgtaaattaaacttccgacagaaaagcaactaattttgtctgctagatatgatgcccactgagaatctttacccaaatatgagtgtcataacaaaaagaaattagcttgataactacataagctacctaccaagtctctttataagtaagaaacaacaaatatcataactagcattagaaaacctttgtaaggaacaaggtgtaaacaaatattacaacaattttttcaaaatgttaattaaaacttccagtcaggaaagcaactaattttgtctgctagacatgatgcccactgagaattttgtctgctagatatacccactgagaattttgtcccaaacatgagtttccgaacaaaaagaaattagcttgatgataataaatctgagcaatggacaaaatcgggtactaataacatcaagatcaatgctgatgccaccttatttgcaagagaaaactcatatggctttgggattgtggttagaaactccgcaggcaagctgttagaaattaaagcttcttataacggaggtctatatgcagctgaggttgtggaggctatgggaataaaaagaggtacttaattgggtcaaaagaaagagttggaaggaagtggagattgaagctttccataatactcaacacatgtcttctgtttctgtctttgggttgattatctatgattgtaaacatttgctttcttctcttcatcatgttactttacgttttatagtacgatcaacaaaccaagtagctcattattagctagacattctcggtatttctttggttatagcattgagcattcatgagcataatgtccgggctgattttcaagcccttttgtattcaaaatgctaaattacaatgaagttgctattttatgttataaaaaaactgataattatataagtaagaaacaagaagaaaacaaaaggtaccagcatcaacatcctccatgacatgtttaatgggaccatcaagagttcctcgatagagacttccagtatttgaaagagaaagataagtattctcagatttctttctccaccgaaaatctttgacatagcttgactcatccaccgagctagaaaaatctggttttgatagctgccaaaaacaaaaaattaaagcaacagaagaaccaaaagtcatacacagtatctataaaagcttcaatatttgatctttccaaccttatctgaaataagcaaatcaacggagaagaaatgaatgtcagctccaacagtagctgcaagagtggactgatcatgagaaagcgccaaaatacgaacttctccaatagcaacatccacaaggctggactgttgtatagaacaagaagaagaagaagttcccttttccttaatttcaagtgagagagctataacatccttagtcctggcaacgcaaaaccctaaaaaagagcaaaattgaacaataagcaaaagaaaagaaactgaatttagcagagagagataaatagagatacgaaccagaagagagagcgaggaagatgaggccgtggaactcggagagagctagaggttgtgaaggaagggatttgagatcgtagttgaagggaggaggtttgagtgggacaggttctccaattcgatcgaagaagtaatcggtggagcagattcggtctgcgtcgagctcttcgtcaatctcaatcaccatgttgttgtttggagaaaccctaagaaaaaaccagaagaagagaaattggggttttagttaagtctaatttgcgcgggaaggaaattaattagttactaaaagtgattagttagatactaatttaagtaataattatgtattttaattatatattagaattaattatcagcaagttgagatggccgagttggtctaaggcgccagattaaggttctggtccgaaagggcgtgggttcaaatcccactctcaacattaaatttttctatttttttcctgtattattaactgtcacaagtggttaaaaagctatcatataacatggtaaattttgtggctgattttatttacttaactcatcatataacttttttttagttaatatttttcaattgttatcacaagtggttagttaaaaatggtaaactacaaaatttaccatttcacagctaaaattaaattttgtggttgatcccataactcagaaacataatatctgatttggttgagaatttcagtatgaataatgctatttggacaggttaaagttcttacatagtgcacttgttttttgctatcaataataattcaactatttggatttgattatctgatttcaaattcagcactgtaattataaccttttttacatttagatcataaaagtaatttctattttcaattgggtcactagaaatgtgtaaaaaaaatcagaatgacataataatgggaattaatgtttaattttgtttgcaatatggatataataacaaaagttagtctcaaatgatttttcattacaacaacacttgtcaataacataaagtaaactaacaacacaaacaactcatattgtcacacacacaaaaacacttacaacagcaacaacaacaatcaatcaatcaaaatataacaaacaaaacaaaaagagtaattctctaaagcaaaagcttggaccaatactaatagagattaacctcacaactagtctcaaagctcaaacacattaattatacataatttcattcttaaagcctcttctaaaatccaagaccctttgaattgataagaagaagaggcttgtgatgacaatgatgatgaagaaagaagaaaaaaaacttcccatcatcattatttcctctcttatatatctatactaattaataataatcttatgttaatgtaacaaaaaacaaagaagaagccttttgattaaaattgagctcctgagtaggtttggccaaagctccaattgggaggagcaacgttgttagagacaagagttcttccatcactagtggtgattttaaaagagagtgattgtccatcaaggaatgagttgctttgccagttctgaccccagtttcttgacatggcttgccatccaccggttttcgagcctttgattgagaccgccactgcgtcccctgcgccgccacgtttgttacgagcacagattgaagtagagtgtccatttatggtgaatcttactcctcccttcttcttgcaactcactctgcatgtgaaaaaaattattagtattttgcatgaaaattggtgttttctaatatgtgattttgcaaaatgatatttttgcaaagtaatgtag

SEQ ID NO: 379736 - DNA, 4591 bp, Cannabis indica
tagtcgtgtatataaaaggctaaaatcaagaatataatattctagactagctagtatcaggaaaagagtatatattacttactaatgctcttccacaagcaatttcttgttgcaatactgcaacttgctttggtattttatcaagttctggttcaagctcacgatcaacatggttagataattatatatctcacttagtttccaataccagaagttcgatctaagtactacagctttttttttggaaataattaatgatatacatacgtacgttgctatttttcaggcttcatcagtgtagattgtgggatagcagacgtgtcaaactacgtagatacacaaaatggcttcgtttaccattcagacgcagagttcacagaaacgggtgaaaacagggaaatattagcatcttacaaagctccaaacgttgacagacagttttatagtgtccgaagcttccctcaagggagaagaaactgttatactctgaatcctacaaaagaagaaagtaccagatatttgatccgagcaaggttcatgtatggaaactatgataaccaaggcgtaatccctgtttttgatttgcatcttggagttgaccactggggcacagtcattattgataacgattcgactataacaaccatggaaatcatacatatcccttcccaagattatgttcatgtttgtcttgtaaacataggcaaaggaactcccttcatatcggtcttggagttaaggcctattgatagtcatatttatccaggtgatgacactatgagatcgtcatcactactactatatgatcatttagatttttcttcagaaaccaatcaaataatgaggtgactcactcccctgtcagctagtcatatttcctttttgattgggtggttcatggttggataaagttcgattctttttctgataaaatcgcatgtacaggtacaaggatgatgaatatgatcgcttgtggtcaccacggtttgcagatgaatggagcccaaatttaaatatatccactagcaatgaagattccattaaaaacgacgattacctactaccattcactgtcatgagcaatgcatatacccaaagtgaaggtaacaatattaatttaatttggaccaacttaacaaaatccagctattatttattctacatgtacatcgcggaactacaaaacctcggagccaaccaatctagagagttcaatatttacatcaatggagatttttggtccggcccagtttctcccgagtatttgaaaactaccacactgaacatcccaaaagccagtaaaccagatgatcaaggaaatcttaatatatggcttaacagtacggacacttcgactctaccgccccttataaatgctttggacatttatgtgcccataaagctcataagacaagagacaaatcaaaatgatggtattcatgacttaattccctccttttcactttttttttttctctctttcattctttgattgtctcctattatataaatatttatatatctacgcatagtgaaagccatcaggagtgtgaaatcggtgtacaaattagaaaaaattagttggcaaggagatccttgtgcccctgaagcttacatgtgggaaggtttgaattgcagtttcagtgacaatgaacagcctagaatcatttctttgtacgaactcacctctttcaatttatattacatatataactgaattgttttaatttggtggatatgatatactaataaattagacatattgcaatctagaaaattgtcatcgagtggattaagtgggacagtttctccttccattgcaagtctgacaatgttaaagcatttgtaagtggttaaatgtcatctttccagatcccatttattcaagatcatagaattatttacttcattatgtattataccaagagtagacatgtttaattattaaaagttctttgacagaataattattaaactattaaccattcaataatttcagggatttatcaaataacaacttaagtgggacagttccggaatttttagcccaactttcatttttaaaggaactgtgagttattttaggttccaaaattggtatcattcattcataactactcattgcctcatattgctctgtatcgtacttattgctctgtttttacatagatacctacagggaaacgaattcacaggtccaattccggatgcactttctgtaagatccaagaatggtttaatattaaggttaatttgcttcattatttctttgtttactgattaaaatctcttgcctttaatgatttacctcaataagatccaagaatattgagacatttccttgaaacagggttgatccaactaggaatactactgaatgcagtgatttagaatcatgtggaaaaaagacaaagtttgttattccactggttgcagcactcgctggattagttttcatcatctcaactgcagtactggtcttttggatagtaaaaaggagaagactgcagcaaaagaaattggaaacaaaaggtgagaattctagttgtagaatacagaatattatatgtatcttttacgctaattttctaatcaggtcatatatgattatatatctgtagaagttgatgacataaaggacgaattcaatgatgtggatggaacatttacaagcaaaaaacagcaatttacattgtctgagattgaaggaataaccaacaactttgagagggtaataggtgaaggtggatttggaaaggtttattatggctccttaaatgggaatagtgtagccgttaagatgctttctaaactatccattcaagggcatcgtcaatttcacgcagaggcatgtcaaatattactcttcactatatatatagagagagatctgatattatttaatttaaacagagatttcctatatatctgatatttttttttacagctaaaactacttttgagagttcatcacaaaaacttgaccacactagttggatattgcaatgagggatccaacattggactcctctacgagtacatggctatgggaaacttacgaacacatctttcaggtttgaaagtttaaataaagtttgaatcatttcatatcaaattatatataggaagttcctatttataggtaatattaaaaacatttggtttgtgtatatatcaaaacaacctagaatagaatggatagatgtcgattttctttataacttgcatggttaacaaatatgttgtaggtaataataatcaaaacgtcttgacttgggaagaaagacttcgaatagcaagagatgcagcacaaggtattagtactatataataatttttcttctcaattgtccctttccaaatatttcaggcctttaatttgtcatatgcttatttattttttttttctgtacatacatatgtgttaatatattaataatgtacaggtttggagtacctacacaatgggtgtaaaccaccaatagttcatcgagatattaagtcgagtaacatactgttgaacgaaaagttggaagccaaattaggtgattttggtctatccaagatttttcctctcgaaagtggaactagcaccactcctggtatatcaacaagtattgccggcactcctggttatcttgaccctgagtaagtccctgtattaattatttatgctagctctcaaattctgcataaattagtagtagaaaacagagtcgattttctaataattgatttggatgttgactcttcttaattaggtactacatatcaaactggttaaatgaaaaaagcgatgtttatagcttcggagttgttttgttggagttactcacaggtcgacctgtgttagataagagccgagatcataacaatgctcacataattcattgggttagctcaatgcttagtaatggtgatattaaaagtataatagacccaaagttggaaggacataattttgatatgaacaccgtgtggaaagttattgaaatctcaatggcttgtgtgtcgagaccatccaccaataggccaaccatgagtattgtcgctagtgaattgaaggaatgtttgacaagggataataaaactcgaaaggatgcctacgttgagggtgattattcaaaagactcctatgaaatgatttccgagcatatatctactcccatagctaggtaataatatgaactattaggaaaaaaaaaaggagatgagaaaggcgattctatttatatttccgcgttgttaatttagtatatgttgtgtttatgacctttttttctttaaattaaattcacatttgattacataatcaacatgatttatagtatatcttcttaaagaactttcttgatcacttaaaagaaacgtagaacattcgttcaaatcttaaagcacagatatattttagtgatcaaagaaaattaatttaaatatataagttaataacaagcccatacaaccaacaaaatttaattaagttaattattcctcacgataagtcggtagttaattataaaattttgggtaaataccattttggaccttatgctttgtaaaagttacagattggaccctgtgttttgttaaa

SEQ ID NO: 379737 - DNA, 3242 bp, Cannabis indica
ctggccgttggattgtcatgatcaattggtggtattattattgtgtgtgaacattatctcatacgtaaacctttacacttcatgatcattcttctttttatccaaataataattaatgaaagttattactaattaaaaaataaaaaattaactcagtatatttataccatatatgtattgtaaagtacacatgattatatgtatatatatcatcacgcgtatgtatattataaagtgaaaaagaatatgtattatctatattctatatatatttattacgtgtgtatgcatgtataagcaaatcatatgtatgcatgttggtattattatatattatgattatttgtcaaaaagtagtgtaaataatatatatagttgagggaaaggcacatgtggctaattaattcattatagtctttctttttgtcatatatagatatatcaatatatataagttcatatatagaatgcttcgatataattagttgatgatgataaggttagctggttaggtaccgaaagattgtagtagataacatgggttgtttaaatgaaagtaccattgaaaaataaataataaatattgacaaatattaataattgcataagtaaaaaaatattggaaaacttacacaaatactgtaaaatgggctaaacttatttacaaaaatattgagactcgaaaaatttaatatttatactgttccaatataatttttaacttttatactgtgtgtgagtaaattaacactacctaatctccttaaatatttgcaaccacaatcggcaaacaccaatcaaccacgggacaattggaaaacaattataatttctagcgatacaaattaaccagaagtcttcaaatcgacgtgaatcaacaacaaagaaatagtttaccatttaattactagtggcatgctttccacaatgcaatatttactattaacaaattgccaacactagtattgcaccaataatctcctcttgaatttttgtttggcactgcaccaaattatactctgtattaaagccttttgggtgtgctatcctcatttgaggccttataataaacacaaaatggaattcaataacagagatgtacttttctgggatatactacaactcgcaaaggccatctttgtgaaaactaggagggtaggctatatatatagcttgaaatgttgtctttgatgaagagtcatttctaacaatggcatcaacaactacttctcaggtacaatctaattctttaaacaatatgcctactgcagttttcccactgatcactttaatactatattgtacctgtaattaacactctacattctggtaatgatgtctctgaatgttccctaccatctatcatcccttccatgtccactacagataccccattttcaccttccccttcaccagatatgtccccaattgctcaatcacctattcactcaaacacaactctacaactttcttcagttacaaattaaatgtcttacatgttgaaaccacaaattctacaaatctgccacaagctcctcaacctgaatcctcctcaaccctaccaccaattattctaaaagctcccccacacacattgaccccacacctgctcatgaaacatcattaccaacaggtgccaaatctcattgaatgaccaccagatcacaaagtggcatctacaaaccaaaatcctattttgctactaaacatcctctatatgaatcaacactgccaactaagccaaaatcactcgaagcagtcttgaacaatcctcaatgaaatgcaactatgcaccaggaagtaagagctctggtcaagaacaatacttgggtattagttccctatgattcatccatgattgttattgagtgcaagtgggttcatagagttaaatttaactcggatggctctctcaacagactaaaatcaagactagtggccaaaaattatctacaaacaattggaatagattttgatgaaatattagtcccgttgtcaaacccacaacagttcgacttatgctttcattggctgtttccaacaattggagtgttgttcagctcgatgtcaataatgcattccttcttgaaactctgtctgagacaatttttatgtatcaactacctggatttgaggatgctatgaatcccacacatgtctacaaattaaataaggtcatctatggcctaaaacaggccacacgggcctagaataaaaaacttaaaacaccttattgtcatggggatttcaaggttctaaagctgatgtctctctgtttgtgtatggagttggtcctactcttatcatcttgctggtatatgttgacgatatattggtaactggacccaactcttccttcatttctaaattgattacaaacctcaataagactttctatctgaaagacttgggacaagtttattattttcttagagtggagatctatcgaaataaaattggtatgtatttatctcaaaccaaagtatattattggtaaagttaaaagtaaaaggaaccaaacctagtctgaatctaaccaatgttaatgtgaaactctcactaaatgaaagggaaccatttgtagacattactttgtatcgaagtacattaggggcacttcaatacctctctctcacacggcttgatgtggcttacattgttaacaaactcagccaatttttgaaggcttctacacacttacattgtaagaagttacttcgataccttaaaggcattcagagatggtatccatctcactcctacatttgaaatgactctcacagcttactctgatgctgactgggcaagctgtgtggatgagaaaaggtctactggaggttacttggtatttttaggggataatcctataagctggtcagtaaagaaacaacatgttgtggctcgatcaagcacagaaagtgaattttgagcattggccaatgcagctgatgagttaatgtggattcaatcactgctgcaagaattacaagtacctattcttcatagtcctatcatttgggttaatgatcaaagtgtaacagctttggcagataaccccgtcttccatgctcggtccaaacatatcgaaattgacctctattttgtcagggatcaaatcattaacaagcaattgtctgtccattatgttcctgctcatgataaggctgctgatgtcctcactaaagctcttacagcaaaacgttttctttacttgaagttcaaactaaaaaatggtgtccaca

SEQ ID NO: 379738 - DNA, 6129 bp, Cannabis indica
atatatatagatagatatggtaaaatatgtggggattattttaccttgttgctgtggtgacgaggagggagtgcatgaagaaaatgacatcgatgaccataaggacaaacggcaccgtttaagaccatcctgcaaacttgggttttgtaacgagggtggcgcatcacagggcgaagttcgtcgactccatgagcgaactggcagttatctccatatggacactcaccagtttcctgccatttgttacagatctcagtcttcaaagctccttgtttgtatacatcaacctcaattgggttttcattcccattaacatcatcatgattatgattgtgattatgattatgattctccttcttcttgttccctcctccaatgtacaccttttgctgcatgtcattgtaaataatacacttgtcaatttgtatctaaacagaggatttgccaagaaaaattgtgaaaaattatgtaagaaaattagataaaaaggaactgatcagaaagtgttaatataatgcacaatgtttgttcattgttgtatcacatagtatgatgtaaattgattattgtaattgttttcaatttgtatctaaacaggggatttggagttccacaaattatcagatcaggatccttattacgtcaagaaaattagataaaagaactgattaatcaaagagattgataactttggatacaaataagttttcctccattgtagatactattgtataatacataatgttgtacacacatatgcacgttttgctgtatcactatcatcagtctaatatgatatgatgtaaattgaccattgtttctattaaaaaaaattgaccaatgtaaataggggattagccaagatatagggaaatttaaaggaaaatttaaattcaaagatgtgaaaatttatgtaatacatgatcagatcaggatccactgattaagaagtgattaatcaaaaggttgataaaattggttttccttttgtattatacacaaacatatatgatacatatatatacacagtacaatattttttttttgacgcgacagtataatatttatttatagggaaatttgaaagatagattgattttaaagatgtgaaaaattaagtaagtcgattaattatcaaacaataaatgatcattcagcagaaataataataataattgtaataataaatgatcagatcaagatccattacgtacctaaaatttatatattaatgttcagaaagtgattaatcagaaagattaataaatttgggtagaaaattggttttacttagattgtatattatatataacgttatatacacaatatattatatattaattaattttcttaacatatatagcacacgtgtgagattattatctttgctttactaataagaaacaaacaggtaatcgaaaattaaaaactaattaacaatcaaaatcatcattaataaaattattgaaaattaaaatcattattacgtacagagattaattaaaaacaacaatgaagaactatttcgattttgatattaccttaactaaattctgcagagtcgcagtagtacagtttctggaccttgaagaagaatctcgactactccttccgccatttttgataacagccggagctgaaactttcaagtaatcttcagatttcactgaaatactcttaggcaatcgcgagtatatatccctatcgtctccttcttcctcatctctgttccaaacaccattaccaaaaccaagacgattctgtaaagccgattgtaacagaagacgaaactgctttctcaactccacattaatcgatctgagatagctattctcgttacgaagagaagcaacctcgactgaaacttctcggagccgattaagacagagactacgtcggttcaccatttcttgacgttcttgaacaagaagagagttgtagtaatagagtctgcgacgacgatgatgatcgtcaatagcggcggcggtggcggtggttgatgagtttgatgaatctgagtcgaactcatcgtctccaccgaggaagaatgatgagtttgatgaaacgacgccattgttgatcgagtattggctttgcatcttcaattcaaacaaatcaataaagctgagagaatcggtcgaagaattttcctgggaaaatcagaaagaaagtttttctgagagaaaatggttaagagagaaaatgggtttttatagatttctttttatttatttgttttattttttattttttattttttatttatttttggagggaaagagagagagagagagagagtcagttaggcttggaaggagtgtcaattgtgtaggaacaacgaatttcgaaccgttattaagagagaccggaacccattatttttttctaatttcctattttacccttactcttatctatcttttacattaactgaggaagggtattttggtaatttcgatggttttctggtaaaatgtcaataattaggttgaggtgcttggtttggacctgttttattatcatatgataatgatagtgtagtgactatagtgagtgaatataattaataagatttattagtgattttataaatctatgtaacataaaataatggtacttacgtgatatataaaactaaaaaatgcaataaatatttttgttgtatttgatttaacttttccaataaaaaaattatttatttacttttgatataaacgcacatgctataatgtgccacttttacatagtaaaatttgtaattttattaaataaatataaggtacttttataatacacgtcattaaaataggtgtactgatccaacttctaattatttcagtatttataagaattttttagtttaattttttccatagccgtgtaggttatagttatttaagatatctgtaaaattttgagaaattcgaaataatttacaatataaaaatcaatgtttaaaccgtctatttcacacgcgtataaaataaaaaagttgcatatgtaataaactttttgaacactatttttgacgtgttaaatttttttgaatttttcaaaattttgctaaatgtcttaaataactataatgtatacgaccataaaaaaattagatcaagcattttttatatatcgaaatagataagagtgcatcgatacacttattttaaatgatgtattgtagaattttctatgaatatataattatatattttattgtaaggctcttaataaatatatttaaatacattaacaaataaataaataaaaaaaattgggtgatttgaataaagtccggttggtgttagagagaagcataatttgatttaagtttttgcttggtttgcaagcttttaaaatgcaatttgtaatattgtaaatgaacaaagaaaagggatcatttatgtgtgtttttgaccattttggggtttgttttgaattacttgaacaatatctataatactattttaaattctatgttttctattggaatcttctattttatttaattacaatttgaatgaattctgtatttttaatataacaataattaataatagtaatttaaactgtttcttgtcaaaaaaaaaattaatattaacccgatttaaagatgatatgaaaaaactagttataatttttacatctgttcgtattaggaattatctccaacctggttatattaaaaaaaattgtcgataattgagctatggatcctatttgtactgttttggataatatagggttcattttgttattcaatagaccagatggttcaatcggtaacttttgtaaaatacagagttcaaaataggattaaccccatataaatatagtgtgattctacaatgtacttttttaaaaagagatatactgatgcaccatctatttgtttcggcatccaaaagaatttcttattctatttttttttatatccgtgtacattatagttatataaaacatcctgcaaaatcatgagaaattaagaaaattttacaatataaaaaacaatgttcaaacaatttatttcacatgcatataaaataaaataattatacacgtgtaacatatagtctgtttgacttctattttcgatatgttaattttttttgaattttttaaaattttataaaatatcttaaataactataatatatacgactatgaaaaaaattaaattaaataattatttcgaatacagaaacaataagagtacaatatttttccaaaaatatatcattatcatcttttttttttttggcaattggagtgtggagtttgcttctttatgacaactataactacctagctccaccatcaacatctaaatgaaatgttaatgtttggtgaaataatagaatgtgtacaaaaaaacaaacaaaccccacacttataattattaactcattccatttggttgctaagttcagcaaaacattattttcaatataagctaataagcctatagcctatatatatctcaatcgttgaacaaatgtgtcttttttttaggttaatttatctttcattttcattacattttccccataatatattttctaatatagtcctagtaaaaaaataaaagattataaatttgtggtataaattaattaatgtctaaatttaatttttagttaaagataaatttaagttttatttttaacagtgataatacttaagtgttaagtcaatgactacgtattaattcatgattttcagatcattaaatttttattttgtatttaaatataccaataataaaataatatataaatagtaactttaacacttaacgattagatataattaggtattattactgtaaaaaaataaacttagatatttatctacaaacgagaattaaacttaagtatttacatcgcaaattattactcaaaataaaataattaaaaaccatattaattaaatagcttaatatgttttcatttgtttttatctgccttagaaattaatcaaatcatattattagcctattttggtttgttgataacacaagttcttaagtactctagtacgtatacatacaaaattacaaatcccattttgtctctttttgttttattttgtccattaatttttaattatataatacaactacttaatataaaacaatatttcagttatttgctttatgtgtacttgtaaaaactgctgtattatattattcatgagctaattaattaccaggttatgattaacataataatatgttctacaagtacactagttatttgtactattttcgagttgagttgttctatcaaaatctgtttcgatattttcctctcaactttaatatgttaacaaattatgtgttttgaatattttagaccattaaaattttttgttgaaatttgaagagtataatttggtatatgatttgataatttattaaaattcgaaagacataattttgtatatatataattactgcattggtaaaaattaaataaaaatcattaaattcaacaatttcaataataatttaaaaaattctagcaatgataacttaatacatctcaatttttatatatatatatacatattttctaagtctcattcatataataacctcaattatttaaatagtactaatatatgatagatctggtgaatcaaaaacataataattaagtagaaaactatatatacaagatgaaagggactcagccatgaactactaactgattcaaaatgataatcgaattgatatatttcacatttatattaatataaacaagacaagtactaattgagactatatatatagtagtgtacacaattattattgtgccaataataataattttggagagactagttagctatagtatacttattaatttaatttacatccaatgcagtggcattttttacaaacggatggtggcggtggcggtggcggtggcggcggtggtgttctttagtagcttcgtgcgacgtcggcgctatcggaattatagccttctctcttcacaaaacgcccttttactcttttcctcacatctgcatttactttcctagatgggtatcgaatttggttatcatgtctatgcctgaaaattatatatataaaaacaaaaataatataaatataatagacacatt

SEQ ID NO: 379739 - DNA, 1922 bp, Cannabis indica
ttgatgcccgtggtgcagccataagaatacttcaagaacaaaccagtagtagtgatcatgatcactctcctctccttgatctcacattaaaaacaggcaatgcattctatgcccgaacgatagcagatttcgctacatggttagtatgtggtcttcctgcaagagaagaatatgtcaagcgagctcctcatgttcgcgatgcagtttggagttccctacgcaatgcagactcatttactcagctacattactactcaaacatctgcaggctgtttcggttctcagatggaaaggaaatgtatgtgaagttcaagttgaggccttatgatgaaactatcaatgaagattctggtaaagttgagcctattgggattcttccacccgacacaggtgcaattcctagagacgaaaaagacactcgcccattacttttccttgcagaagatttctgcaaccgtgtgaacaaagcaaatggagttagttatgtctttcagttacaattcagaccagttccaaatgatgaagccaaaagagatgttgcacttgattgtacaaagccatgggatgagactgaattcccatacattgacattggtgagattaacataactgagaatttatctgcagaagaatcagaaaagttacactttcacccttttctaaaatgtcctgagattgatgtcattcatgcctcatcatgttcccaaagtgcttcaattgatcacggccgttcattgatatacgaaatctgtcagcatttaagaaatggacaaccaatcccagaagcctggaaaatcttccttgaacaatctgatgtcaaagtagatctttcaggctgtcccatggcaacaacacaagctaagaaagatgaaaaaccagtgacactccaaagaaatcggtatcaaacactttgggcaactttattccaacctttactccaaacagtctttcctattttcgtcttgtcattagtgatctttgctccattgaaatatgttcttcacttaaaggaagctcatgaactctcacttcaatggctactcccattgttttgggtatgttcaggttacatagctgcattatcttgtgttgtagccaaatgggttttagtaggaaagaagaaagaaggcgaaacggtactcatttgggggaaagaggttttcatggacacaacatggcaagcattgagaacactagttggggattatttcatggaaatgacaactgggtctgttatgttcttgatatggatgaagctaatgggctcgaatatcgagttggatgaaggtgcttatgtggacagcatgggagctatgttgaatcctgaaatggtggagattgaaagaggtggttgtgtgggaagagaagctttgttgtttggacatatctatgaaggtgatggagggaaagttaagtttggaaagattaaggttggtgaaggtggttttgttgggagtagagctgtggttatgcctggggtgatagttgagagtggtgggaatctaagtgctctttctcttgccatgaaagaagaagtgattaagtcaaggtgatatctaagtacttattgataaagatcacatttttatacaaatacatacatatatatatatttatatatagttaccaataacatatatataatagaactaaataagaaatctcatcaaattgtacttgcattcccatcctacaaattgttatatggttatttaccacacacatatatagataataaataaaaggtgatgagatatattcattatgatatgatttgttttcctcacacatgaacaaattatttgatagttattgtttatatagttaagtgttttttaaagaagaaaataaaatttttattagggtaaattgcggcataaatacttaatgtttccgattttatacacttaaatacttaatgt

SEQ ID NO: 379740 - DNA, 3771 bp, Cannabis indica
gattatttagttaaaattaaaaaaaaaaaaaaaaaaaaaaaaaacatatactaactagcattattttgatcactaaattccacaaaatcatcaacattagagctaagtgttaaaccttcacaattatcacgagagtgatgcagtggaggtgaaagataatatggttgaggagattgttgcataggtaaaatctccacaaattgtcgagtctgtggatgaaccaaagtagtctgctgttattgttgttgttgattctgtagagtgaaaaaatgaccatacatagactatacataggttgttgctggaataatgatcttaattgaccatacatgttgttgttgtgataatcctccgaactagctaatcatatgttgttgtgtttgggattctcctgcgacgtgagaaaaataaattggaggagactgagagagaaacccaaacatgtaatataattgaggcgactaaaaagagccaccagacatattaagaaaattttattgttgttgaaataattgggacatgttggggagctacgtagacacaattaaaactttaataacttttggtaattttggcccaaaaaaattttattaggtacttgttagttacaaacctaaaatatttgctagttataatatctcaaaaataaataataatctttaaaaattaattgaattatctctcaaataatttttgataaaaggttcaaaatagacaataaaggtattgtgtattttattcatctcaatagaaatgttacaaatattttctttcttacaatttgttcacattcctcaaattccacactaaattataaacaaacaacctacaactttcataggttatacacataacagtttgtgccatttttgcaacataaaaaaactatataatgaatgcatacaataatttaaaaaaaaaaataataagaaaaaagcaaatgttttgaacaattagtaattatcttttttttattttgcttaacaacaattagttattattaattgttattattattgttaacacaatggaagatccttaggtggaggcagaaccgtttgatctgatcttggtccatcctcaacaacaaaagctgttttcaatccccatccagtgtggagctccaaatgacaatgcatgaaccatactcctaatacaatatcaaaaatatataaacattttggtaaaacaaatggttagtatcttttaaaacacttgtcccacattgattagtcaaattaatattcaaaaagtaaattttatatattactattttgaaatagttatatttaaattattattattataaatcattaatttcaaaattcatgtacttaaattattttgttgattttctcctatgaaccatcaaaatatgattgtataggcattttaattttgtgaaaagaaatttaaaattgatagtttatattaatttggattttagtggtcatacctggattatcagctttaaatcgaatggcggtccaacctccagtaggcacgccaacagtatttctttcaacgggatcaatcaagttgtacttagttggatccttagcaggatcgaaatttccaataccagttcccaccacgaaaaagttatatccatgtaaatgaaatggatgagactcgacagtcaaaagattagtatcttgtaaaaccaactcaacagtagaattaaatttaatcttgctaactctagtacccactaaagtccccaaattggctgtgagtggggcaccagtataattaaaaggagttgaaggtttatcaggaaaatcagtcttaaaaactcctttaatgttgaagtaatgggcttgaagaagcccaatttgtggcatattgaaggagatgttgttgagcgaagcaacaagtcgagtcccattgagacaagtgggacaagaatcttttcctaaaccaatagtgtaaaagaggtttcgatcaacagttaacggaacattagcaggaaattttggtgtgtttaagctcttgagttttttattgtagttcaatgcaaacgaactgtcattttgtgcaggaagttggggtagagttgggataacagtgtttgggatacccttgtattggaatatggcggtggctgttttgttgtctatgggaagtggcacatctaagaatggcctagctgctgcaaagtatcgaccaggtgcttggttagccttgaccaaaacatttgtcgtttgacctggtgctattaatattgcttgtgtcataaagggttttgtgtaaactgcgtctacttcgaccacagtcatgttatggcccgcaacagcaaaaaataattcgtcgtttagtgcagcatttactattctcaataggtatgtcttcccttgttcaacctccattgcaaaagtatctacacatatataagcaagtctttattttcacaatcaatccatttttgtattcatctcttgaaaactagttttgaaaaaaaaaattaaaagaacctattttaataatatatttaataataattgttgttaataagagtttaattatctagctaaagatataaaaagtcagaatgcaaagcaacttatataagaccaaattattttggaaattatcttagaaatttaaacaacaattatactactcactacaaagcaacctattttaataatatatttaacaatatatactcacttttttatttacatttttacccttaattattatttcttataatttattatttagcatatatatattttcacttaattaattattttacttttaacaaataagttaattagaaaactatatttttttacatgtatgcaataaatattaaatcaatattgttcaaaaaaataaatattcataataattttatcttctttttttaactctgtaattttttgtgaaatacaaaatgacatatagaagatattaatatagcttggtgtaaatttaacttacgtttctcagagcatggaaatagtggtcctggctttccatttatggtgtgtgcatctgatgaatttggtggcaaacccattgcattcccttgcttaacaattgtttcaacatcagagttccaccattctcctagcacaacttcaaattccctgtttggctgtggaaatgggaatggagttccttgtttgggcatcacaacaattgcaccatacactgtggctctcaaccaaagaatatgagcatgccaccaaagtgttcctctttgtcctgttacattgtaatcataagtgtaactattccctgtttggattggacactgtgttatgtaagccggtccatctgcccaaccatttcgatattgcttcattccgtgcctataaattaaaaaaaaaaaatcaacaataaaactttaaattaatggttactgactactcacgtgatgtcacatgactagaactgttcaattctattacgaggacggaggccgtcccatcagttaagggagtcaaaatgccaaaaacaaattaagaggagccaaaatgcacttttttttttttttttcaaataattatgtaatattatataaaattttattagaaaataaaattcggagagcaaaggctttcgtttacacttagctctccctttcaagggtcggccttgagtattaatggacttaattttatttgtgtgtgttcagttagagtattattaaatttatttaacaaaattttacaaaaaaattactattttttcatgacataaaatatagggtaaatactattttggaccctgtgttttgcaaaagttacagattggacc

SEQ ID NO: 379741 - DNA, 2934 bp, Cannabis indica
gagagagaaactgaatatgattatgggtatccaattcaaaattaaaactagaaaatagagaaaaaaaaaaaaaaaactttgagtgagatagtcatgtataatgtgtgtaagaagtattttagtaaataaaacaataataaaagtaaagatattatttaagccttatagaggtaaaaatgcactaaaagcattatttcgtatttttcatgtaaattttactataatgtaatcataattacattataataccattacatttaagagtcaacccatacattgtaataatgggtaatttgatattccattacaatacctattgcaataaattaaatatgtcataacaaaaatatgcatcattcgtgcttggtattacttaatgtgtcttttttttagtgtagcgtaatgttattttacaatcaattaatagtttatagtttaaaggtcttgggttcaaacccataacctctccctttttcccattcctctctcactactaaactaaccttagtggcttgtattacctactgtattatattatattatattatatattttgtttgtgtaattttatcaaaaaaaatgcattctacatgatttaatattattaattttgcaaaatattactaatcatttttatgatatcactcccgcctcatagtaatgctctaatattaaatcaaaattatgatacttaaagagtatctcttatagaaaataaaaaaattgaacaatttatgggacaaaaagtctgtattggaaatacttttacattgttactatgttccttcgcatcaataatttaatagaccaaacatgtgggaaaatgctctccgtacaatgggaaaatgctctccgtacaagtgggtttcttgaatgattagtaatggaaaagtttcatgtcgtatatgaatttcagtgaaaagactgtcgttttacgtgtaattcatactgattcattgtgtgatctaagattttttcccaatatccctactgtatctttctgtatacacgaaagagttatttgaaagaaggttcctctggtgcctggtgtcttcgtgctcttttttgttgcttgtctaaactttctgctggtatagttcttttcgtatctttctgctggtttagttctctttcgtttggaaggtgtacctgtgatggcggctcaatcggatgagatggagatggagctttgtgggttggaggatttcaagattacacttgaagataacccagagcttggggcagaggcgtagagaaatcggtggtggcgaaatgtacactactaagactgttttcaatggtctcctgcgcttgatactgggtagaaagtggaaattggctaagggttggaaactccaagaagtggagaggaataccttcattttaagattgactaagaagcaagaggcggtccagattgctaggaatggtccttggaatatatgtgatggttttctcgtggtgaaatctatgcctgaaggtggaaaatggacttctgcggatctgaatttgtctcctatttgggtaagggtttatgaggtgcctcctaggtaccggaccttgaagaatgctaatgctctcaccaagaagattggaacggtgatatcgattgacaggatgtggagaaacggatttcctactaatgaatacatacggtttcaagtgaatatccagttgaataaacctataatgctgggggtttttctgccaatggaagaaggggtgagtctttggtgctatttcaagtatgaaaacatgccctgtatctgctacaaatgcagtgtagttggtcacaatgagttccgatgcaggcgtaagaggaggatgattactgatgattgcaacagaacgaccccaatgtatggaccatggatatgattgggatctcgtcaaaagactattttttgaactatgaacaatatgagcaagaaaggttgaataaggaaatagcagatgcccagtttcaagcagaagctaggcaaaatttgatccttggggaggaaaattttgagccagcattaataggcacagagatacatatggaagctgtagtggagacatccaaaagggaggtggaagctactcccctgcctgtgactaatggtggtcaagaggcagagccagtgttagaaacggcggaggaggaatgtttgagtctgggccatatgccggcgtagagtcaagggcataattgtcaagataattccaatgtgcatgggaaggacgacgaggtaggtggggtggtgttggcgcaaaattgtactggtgttgtcagtggtcccaccactaattcaaaaaaagaggataacattaacggaattggtgaggtggattcacagcacgtggatcatcttgccatggtatttaaagctactttgggctctaactctaaatcggtccacaaacaatcaaggcccattagacctcttaaagatggtaacctattccctaaagatgggcctgtgatagaggaatgttctctgggtaatgggaaaaagaggcgcctaaactctactgaattgggccggggtttgaaaagtattattaaggagcaaagggtcactaatttgaggaagaaagtttgcccagggaatgtgaatacagaatccaggcatcctttgaatgcttcaataggttccaacatggttggaaaatctcagaaggatagagaagggatcagtgcagaagaggggagccaagatgttgaaaggaaatcaggagacattactgctgatgtaaggagcattacagagaatggaactcagaaagtggacaaggagaaggaggattttggtgtggccgaggaggcgggccttcacatgccccccaatgccccatgttagtctttgcctggaactgtcatgggcctggcaaacctgcggcagtcgatgccctccgaagtttaattcggagtgccaatcccgacgtcatttt

SEQ ID NO: 379742 - DNA, 1620 bp, Cannabis indica
aataatgattgattggtgactagatcgtagttggtccttctgtggaaaggaatagtactttcaactgggaccattacttcgcatccatataccattggaaacagagagtgtccagggattcaattttttctttcttcgaaatctgaaatataaatagcttaagtacccagtaatttccccatcaacttgatcttcagaattggatcatcagaggctggaccacatttcttttcctttttattcagtactctttgcaatttcttatgtagaattcttacatggccgatctcgacctgccatagcattagcttgaagttgagattacaatcctagccctaacagagcaaaacagaggaaaacaattgaaaatatagaaataaaattttgaacataagaagggatagagaggttaaatgttataaaagataatgaataggagattttatcactgattcaattcccttacaaaatatatatgaacataaataatctttaatttgttcatgattttagtacattagttacactagtttgcagctttgctcaactgttgggcccgtctcgcaactttgctcagttgttcagagttttatgcagaagttaaccggccagccttattttttagggcttggccggcctatgtactcttatggttggccaggtactgctcctgtagcccggaatgtgcttgccaactttctatgtacttgtcagccttttcatgtgtttgtcagctttcccatgtattttgccaacttttccatgtgcttgccagcttttctaatttctttgcacattgcataggtcagatttctttgatcgagccttttttggtctaatagtcaccatttggctaatgagcttgtgctcaaagtacaaaagagtatttgtttttcttcatattgtaactaatgtaaatataaaaaaacttatcctttataaattaggtgtgtgtcatcgagaatatattattgagagttcccctacataacataatcatagccatgttcaaactaattaataacaagtccaaactaataacttctctctcaaaaaaaagtaccaaaacgtaataacaagaaaaattaaaacaaaagttattattagaatcttatattcaaatggcataaaaagttaaaactataatgaaattacatgaatcttctattacttaattattactctaaaaagaaaaaaaaatctttgtttcgaaggaatatgttgtaaagtccagtttgtattctccttagatatatattttcttttatcgaaaggagactctcatgagaatttgatgacaccaaatttgaaccttaatttgtcttgaatatgaaaaaatgggaaaatttaatcggtggttatgtgaagttagcataatttctagtaccgaccacaggcacacacggatggtggtcactagttatttcacatcaaaaatcatttgcaagactagtatatatgaagactagttccacaaaataaaatttttgaccaacttatcaagatcaaattgcagttcgaagtcgaacacactatactaagaaatttctaggaacagttaaaaaaaaaaaagaattttctaagaagacttttagagcatgtttggtattattttttatt

SEQ ID NO: 379743 - DNA, 1786 bp, Cannabis indica
aataaatttgagaacaactccacatgacacgaacctgacacaataacactaaaaacaataatttagcttacaacatgaacacaacacgagatttggcaggttcaacacgaactgaaacttatgcgagacgtgttcgtatctgtgttgtacaaagttttgtgtcacgtgtcgtgttcgtgttgacaatttttaagtaattttaagatctcaacacactgagccaacatgaattgcaactcctatatcatcaactaagtgcttctattaacatgtttggggtgtggaatttgatctctgtgtgtagtataggaattttcatcctattttgttttccagggcatgtttccagatatcacaaagtccttcgagtgttcggaattttcttgaagagtttcttagtaagtggagatttgtggatgacgattactatgttcttgctaatgatgaaactagtgttgattatgtaaaaggatgcagtgggcgctttaggttgagtgttgatgattatcttgatgttgttgaggtctatgttatgaaggttcttgcaaccactttaaatgatttagaccttgcaatccactgggttgagaaagccgagctatccgaagacagacgacaggtaaaattcaattgattgaagtgattatacttgagttatgttttgcccctaacatgaaaattgcacaaaactcttgaatcccacattcttgaatttgttatttggaaccattcactaatgtcatcttcaagaaccttagactcaagttcaacgatgctcggtttatcttcttgtttttcctttgttgattatgagattacagctgctgatgctaagttgaactatatgaaatccttaatttttatcaagtttattgaaatataagattcatgaacacagtttttttagggacttctaagaagattacactccctacattctgcgagagcaacaacaacttcgtcaagaggatcctcagctttgttgggagataacccgaaaaaacagataaacattcctaatggatcgccacaagtgtcagacaacaattaccctctaaacgatgataaaattggaaaacaatcagttctaagattttccaaaggagtgaccccgtacgactggtggtaccgcaccttaaatctaaagctcggtaacattcagatagccatatcaaacaagaaggttgcatttggctgtttaatcgtgcttgtgtattggattttaagacgaaaacaagctaggctaaaagggtaagcttgtttccgttgaagaaggcacctgaatctttgtggttatcatctgacatgttttatcttttcaggattattaagagacaagctttgaacattaagaagggtgttgtagacttgtggcaacttgcattttcttaccaagtgaatcctttagctgctatgcagtctcctcctgcgccattgcgtggagctcaaagatgaagtgctacagaagaatgattcaatggaacttctctttccttgtttctgatctatgaatttgtgatgcttacatttgactgtatctcgaattagaataatcaataggtaaaataaatgagtttaaaatataaaataatcaaaaataatattttattatgtttactaaagtgtcttggaaagaaaattaacattattttatttgcttacataactaaaaatataattggaatgtaaaatagaaatgaagttatgaagataaaaggcatttcctattgtagaaaatagtgattcgaattgtgtgttgatttcatagaataatacatatttatat

SEQ ID NO: 379744 - DNA, 2433 bp, Cannabis indica
taacaacatacattctctacatctactaattttctatcttgtcacgtaccaagattcactatgaacaaacaaaggacattgcacgcctacaactactacaaggaagtcgaaggaaacagagaagatacatcacatgatgatacaaacatatatacataaggtctcctatctaaaaaaaaaaaaaaacaatgcctcaaaagacttgtacgtttccattggactctcattctaggagtaacatcagcatcactttgttgcatgatgtacaattactccttcaaaaatgccatctgatctgaaattaggagcaaagagcctgggatctacaggtcctgggagactgaaagacagcgtgaatggtccaggtgggcataactgttggaagttcatctcaaatatgcgcagaggtttctttatacttttgcctccactcaccaatccttcaacatgaactttcccatcagattcgatctcacagctaaatttacctgccacagcaaaatcatatactacactcagaggagctactttgaataccatgtacaagtgtaaataagtcaaaagaaacaagaaacatacagtagtccttcctgacccctggcagagcaactcgaaaataatatgcatctttgctaacaccaacatccacaactcccactggtggcccaacttttccttttctagcagtcccagaaatagcaatagaagcacctggttctgaggtacaattctccaattctgggagagggtgaatggacatgacggcttgtccatcaaatatacatgttctttggaaatctccttcttggatatgatgtttagccatgggagaagagtatgaaactgcaggcatcggaagagggtcacattcccgccttctcttaagtttatgttgatctcttagtgacaaataatcaccctcactggaacttcctcccatcattgtctcgttcccattcacgcaatttttctcaccattacttcggtgttggtgctgattctcgtgttcataatgaagtaactcgtccatttctatcctaaaatcacttatgcaagataaaaccttaaacttatttaaatcattttgttccatgcttgacataacaggatcattaataagtacgacccctttcacaatcctaaagcttgcaggaaaccatatctgttcatgaagatccaaaggaaaaaggcttgtgaaacgccatctttctgcaatgccttttagatacttatgaaacatatttggcttcaatctcaggctagggtgagcttttcttaagacatagtaatataaattctccagcaaaactatactaacataagatgagcctaaatcacttgatgtatatggtggagaatcttcagatactctttgaaatgcagatcttcttgggttatcaaaagttacatcaggtcctaagtacattcccataatgaagtgaagcaaaaaatgctggtcatcatcagatgatgaatttcgatgttccaagtccatcactttgagcttctttcaaagtagaagcatccaaaaatcaagactagccaggcaagaaactaaaatcaaacagtgacactccaatccaaatttttacttaaaaagataacaattacgaaagtgaaaaaagaaacccaaaacccaattttacaaaagaccccccatctgtaaaagtaaaactagcttaattaggctgaggcattaacatgaatatcaaaatctcaaaatgtatcatcgaaaactaactgaaatcagaggctggagcacaaacaaattccaatcgaggctataactaaaagaacataaaaccccaacaaataaaataaggaaaaaaaaaagtaaaataacctgctgctatctcaattcaacagagacagcaaatgaaacaacagcaacgacgaacttcaaccgatttacacgatggggagaggttcttaaggaagattacaccaaactcaataaacaatgtaggttaatattgtaatgattttttttttggtaatgcaatattttaggttgatttattactctacattctacaaaagtgtaatttaggtattttaggtgtatgtgcaccgtattggtgaaaaaaaaaaacaacttttaatctcaatttttatgtgacaaacgccactcaacaaaaagtaatcgtacaacctttttatagattttcaaatgtatcctttattttaccatatatttttatatgaataattaacaattttttcactaaataaattcttaaacttctacgaattttaattcttctattaggttacgtctcattatttcgtttaaatgctaatgtgtctttgtaaattaacaattttatctcctaaattttgacaactatcaaattgtactcttcaaaataaaaagagaaagatttaatatttttttagtaaatcttaaaagaaaattattttaaatgattaaga

SEQ ID NO: 379745 - DNA, 8914 bp, Cannabis indica
ttggatttagtattgactattgagacaataattttataaatggtagttcttaggccaaatattttaagggtggaaaatcattttcacactagatttttatttgggttatcatattattaaatatagatacatttacaaattgtataattagatattatactaagatgcatggagtcaagaaaatattagaagtgacactgtaaatttcttattacaatcatttagttaattttcgtactcaaaaatacatgttaaaatattttttcgattttttttatggtagtattcgttatagttataatcattataaatttttaaaaagttatgaatagtttacaatgttaaaaataaatttaaagtttttcgaacatatgtaatagactgaaatattaaaaaaaaaaaaaaatgaaaaaaaaattaaaaaaatatatttctaacatataatttcaaacgttaaaattaattaaaaaattgtaattcacactcctcaagactttttaaatttattttcttgtcctttttgtttccctaaaaatttgtattagttataagaaaacttatcaaatgaagggaaaatttctcaaactaatttagacatacaaataataataatatttctaattttggatcttcatttacaaattttcgagcacatatgaacattgtcaccgtatttgtattctgatcttcttttatgcatgagaagttcgaaatagaggtgaaactgcactgttttattatggggacaccgagtttcattatctactgacattctgagcagttctgccgaacatcttcagaaaaatctaattcgcaactcaactaagtaaattttatcagtaattgtgttctaatataatcttcttaactatgttacaaaccataaaaatcaactaaaattactcttacaaattacaatggattggtgaaaagtacttatatgtatatgtaaaatgaaatcttgatcatacctaattatagagttgaaaaaatttacatgatatacttaataaatttgtacaatgcttgtgtcaattctatacttcaatggccataaacacaatctatagtagggaccaagaaatggattttaggttaaacatcaaacaaattaggcaatgtgtttaggattttagttaccttcaccgatcgctcgaagactcctatttcggtgttcaaagtgtaagctgttctacattcttagaatttcttgataatccattacctaatcttccatcatttggatcgcgataattagagcttgcttcttcattgtctgaacagcctggtctttcggttagaaactgctcccaaaacccgtcgtttgctttaccaggagcagctactgacccttgattagtatttgcagcctcttgggaagaggatcgatttataccttcatcaagcacggttttcttcatcgtggagactctaatatcagattcttttggaatggcaccgaaccttaattcgagtggtttcttgatactctgacctagttgggagacaccagctgaataaggattgttgtggtttccttcgaatggagaagatgctagactcagatttaacagacaagagatttggccgtcgccttcttcgctagaaatcaaatgtggatgcaatgagcgcaagccgggggttccattagttgcctgttttcgtgacaaagatgaatccattttaaaaccaaatgatgttcctgtatctgaaagctctaatggttcgggtgcaaggaagaggccttctgttcttactcgtgcacctctaagttcgggttcagatattttcctaatcgaaatttctccatcttcgttggaactctgagtgctatttgaaaccaagtgaatgtctgaaacagctggtgacaattccaatctcagtttacttgagaagtcttggtgaaaaatagtcccgaattcggttcttgaactactctggttttccacaaaaccattttcaacagctggttgtgagtaatcaacttcaggcagtcgccttttcttattatatgctccgaaatccatggattcaatcttctgaacaagaaaatctacgaaagctggatctttaacagctttctctaaataagattgcaaactttcttgccttttctctataccattcacccgctgcgacacattttccagttgatgcttttccattagctgctgtttgcaatgagaaatattttcctcgagctgagatttttcacgcgaaagcttctctatttcttcatcaagagccgctctttctgaatcgggtaaagaaccttgaggattactgtggctatgaataggttttcttcgatggatattcttaagaagatgcttttgatctttcacaaaatcgtcattatgaaattcccatttctcgggatcaatctttcgaaatccctgtcaccataatagaattcattactcaaccgtacaatatcgtccacagaactataaacacccaatgagatcaaagacactgcaaaatctaaaaatcttgaaaacactaatgtgttccaaaagagataaagaaagacatttgaatgcatgagaaataataaaaaagaaacatttccatttcataatttaagtcttgatacaatcacaaacatacatatgttaaaatcattgatttaacaagaactgaagcagagtttctcaagtttacaactaacatggtagcattcaacttaaactacgctaatgaaaggatttcgcccttgagaaatttcagattgcaccaaaatctctataacaagtaccgaaacactacattttaatatttcctgcaactgtattaaaccagctaaggacttttcctcatcattcttatcattaaagtttactgctgcaacttacttattaaaaccccataagacatgacaaaagagagggttttatggctgcactcatttgaacatagaagacgaaaccgagcagctcatttgtgagaagtacataaacttgaaatcgaaaaagtatcaaactgacatcagtttcgtgtccctctctcgccaacaatcaacattatccaaataacagctccaggggctttattaggccttgtttgaacattggattttaagagaataagaaaaaaggaaacctaaagaatttcattttctcgtgtttggattgaatcaagaaattaagaaatctatttttcagaaaaatttaaacttgagtgtagtataattttatgaaattttagaacaaatacaaatccaaacaaagattaaaaaaatcattcatctttcattcccttctcttctcttacatattttcttcataccgggtcttttttcagcctaattttcttttgataaaaagtagaatatacctatcaataaatgacaacagagattcccagaagaaactcataaccaatttaattgaactattccctaatcacactacattttcaagaacatcaactcaataaatcagtaacaatccacaaaagaatcaacaaaaaactcacattgaagaatgaatttcagaattaaatgttttgaacacgaaatttaaccatcaaaactcaattcaatcaatatcacacacatttccaagaacatcaactaggaataggatctcaataaaaagacactaaaataaataatgaatttcacaattgaagattttgaacgcaaaactgaaccttcaaaactcaattcaagcatcacaaacattttcaatcaagaaaaaaacactcacagaatgaatttcacaatcaaattcatttcagtcaattcaaatttcacacattttcaataacatcaacagtccacaaaaagaagtaacaaacaacattcacatcaaagaatgaattttcacaatttcaaacaattttttattttttgatcaaacattgtgagcacgaaattgaactttcaaaactcaattcaaacatcacacacatttccaagaacatcaactcaaaatatcatcaactaaatccacaaaaagaatcaagaaaaaacactcaaattaaagaatgaatttcacaatcaatcaaacatttcaaacacgaaattaaaccttcaaaactcaattcaatcaattcaaacatatcacacacattttcaagaacatcaactcaatattatcatcaacaatccacacaagaatgaatttcacaatcaatcaaacattttgaaacacaaaactaaaccttcaaaactcaattcaaacatcacacacatttccaagaacatcaaagaacgaatttcgcaatcaaacatttcaaacacaaatttaaaccttcaaagctcaattcaatcaattcacagacgcaataaaataaattttcaaacaaattcacagaaaaaaaaggaataactcacgtaggtattgagctgacgaatgaagctggagaaattattatgcttgaaataagtcggaagaagaagacgactaaattccgggggattccaaacaacgaagctgttcttacttgcactccacgaaacgatctcatcggtagcagaatcatcaaccatatcgtaagttttcaacaagaacggagccggaccacttccgccggaagcggcggcctgagctggttccatgggtagcgatcgtaaggagtaagggggttgttgggattggattttgaagatgagattggaggaaggaatcaatgggattggagatggagatggagttggagttggggttggggttaggattgggttcttcgtcttcttcttcttctggttccggcagccatagttgactctctgaatctgtattagattagattcggttgtgtacggtttggtacaaaatcacggttacatcagattattatccctacattataacatatcactaaatatattaacatttttcttaattactattatttttttattaatttgcattatatttttagaactttgtaggtatctgttaaatattaagtcattatccacatataaatttaatgacttagaccaattaagaattattaaatggcaatttacttaacacttaacgaccagtacctacaaaagttctagaattataacttaggtattattaccgttaaaagttaaacttaagtatttatttgcaactgatagatttatacctcaaattactcctatctttttatacaatttgtgtaaaaaattaaggaataattacataagggaccaatttctgtaaaaaaaaatattatatttttacgtttaatttttttttttttacatttttacggttttccatagaaataacataaaaacaacaagaaaactacataaaagaaatatgaaaataacatctaaataacaacaaaaaataacatacacataacaaaaaataaacaataaattaacaagagtacaacataaaaagatcgtattttctgtaaataaaatcaaaaaattcgtaaaaatatttgaaattctataaaactgtatttttgtaatttttttattgtatttgtgtatttatgaaataattccaaaaattaaggatgcaaaatttttccatagaaattcctcttctacatggggaatagggcgagaatatgaattattttttgttcttgaatgttaaacagggtgagaatacactttctatcccgatagtgactgattaatacattaacatttttcttaattattaggtaatagtttttaagaaaatatatattttaaggggaaaaaataaaattttaatcctaatttttatgtatgcatatataaattgaagtataataacataaatttatttactcatttaaaataaaaaaattatttatttttcattaataaataaaaaatttaattaattcaattagatattagatttttgaactcctagttcaatcgatcgattgtaattaaaaataatatttaaaagaaaaaaaggagagttggtggtgggatcgaaattgtgatgggttattggggaagaagagtgtcatatttattattgaattttgtttttgtgaattatttttattattattgtgaagatacacatgaaagaaagagtgtgacatgtatgtatagataataatatgtaacatataaattttgtgccgacacttaggtcattagatttgaggagacaataatgttatagcatgtgatctctctccccaacacaacacctaccaaagtattcactcacttaattacataataaatacttggcctcacaagtgtcgagcattgctataaggcaccagtagtgcctagcatcttctcgatatgtcgcgttgcgattgactagcgatactcactaaaagctattatattaaattatatatgacctgatacttagttggaccaacaacgatattgacacataggaaagtgttaggcaccactggtaccctttagcatttctccacaagtgcctagtagtattttatacctcaatttgtatttaagagatgctaaaagatattggggaagatattgacattcacgattggttagtgatattggggaagatattatttttttaagttatacgggatttgatatttaattacaccaataacagtatgacaccgaggagagtgctaggtatcagtggtgccttttaataattctaaatatttttttaggtatcatattattattgttacaatcggtacaattcaatattaagcctctccattttttataagaaaaaattatcaagcataaataaataaataattatgctcagctccctagtgactagtattttatgccttaaattgtgtttatgaggttcttactttattacttatctctctttcttttttcaaaagttaaaactaaagtgtggccaaactcaactttctaagaggacccctcccaaactcttttttgacctttcaatgcagccacattgaatttttcttactttggtttagtccaattccattttttatgtaactttaagcaaacatgggtacaaaattcaaaataataattataatacacaaacaaaaagaaaatgtattagaaatagtgttatcattatgtattttattgtgattttccatttgtttaatcatctcaatgaaatttgtgtgattttatctctgtctaatttttaaatatttatcttattataaaaaattactaactacttacaatatgctatattaatttagtgtttggtattaggcatgttaacaatactcaatttaaaaaaagaaactattattggaattatgttatattaagtattgtgtgtatcataattaataacacaacaagctattttttttccaaaaataaaaattaataatagaacaagaagtaaagaaagaaaagaatattgtatatttttgtaattgaatgagtaaagtgacaagaaatttagattttattaatattaataaaatccttgtacttattcaacaaatgagctcatattctaaatatgattataataagaaaatgtaatattataccatagatgagctattagtgttaaatcgatataatttccatttgtttagtcatctcttcatgaaatttgtgccatattttgttttagtctaacttatagaactttgtcacattaaacttttttcctttcaaataaataaataaataaaagaaaaactattagtagaactaagttatataaagtattgtgtatactataatatttgtttctaaataattaaataatttatcgttaatctcttattataatctattagtcaaattttgtgctaaaaaatacatgctgaaatatttgtttatagcgatatttattataattacaacattatttctgtaaatttttaaaaaatttcaaatagtttacaatatcaaaaataaatttgaaattttttaaacacacatggtaaactgaaatatcaagaattcagttttttggtactgtaaataatttgaaatttttttaaaatttacagagataatattgtaactataatgaataccattataaaaaaaaaatttaaaaaaatattcaaacataaaatttgattaaaaaattgtaattagcactcttaaaaaaaataactagtaataaaacaaactaaataaagaaagaaaagaatatacattacatgacaagaaattcacattctattaatgtatactccactgcaataaataaataaataaataaaagaaagaaaaatctattagtagaactatgttatatattaagtattgtatatagcataattaataacacaacaagctatatttttccaaatataataacaaaacaagaattagagtaagaaagagaaaacaatatgtgtatattatataaatgtaattgaatgagtaaaacaacaagaaatttacattttattaatgtatactcaactgcaataaaatttgttatttttttcttttgtatataataataactaataataataatacaaagccttaatactaattaaacaaattaatgaactcataatattctaagtatgattataatcagaaaatgtaaacttataactatcttcttctgcaaaaccaacactaggatcttcaccatccttaatcactttcctaatttcctcaactctttcaataattcccttaatagacaaatcaaaagcatcttcaacagtctctaatctcaccattggatcaccataaacaatatttggtataagcttaatcacctcatttctcatactcaattcttcctctttagaaattccaaccaaaactttctcaatggtaccttctttcaaatcattgatgacatccttaacaggaatatacacagaatactttgtgtgattcttgggaaaatgccatttatattgagaataagcagtacctggatgaaaaaaaaaacaggaatacaaccagctaaaatcgaatcgaaaatcgatcttcttgtgtatgaatcaccaggaggttgtaaacaatagattgagctttgaaaaacttttcataacactaact

SEQ ID NO: 379746 - DNA, 6956 bp, Cannabis indica
cacatgtcctctactgaacacccggtcccttcaaagattctagcattcctttccagccacacaacccaaattattgctagtattgtcgttctccaaatctttgttttgcgtttgcaaccatttaacttgctaactatcagttgtggtacacatcttggcataacccacgacagattaaattcctttatcaacttgattcataattgactgatgaaactacagcctaagaacaaatgccccacgtcttccccgctaactttgcagcaaacacaccaaccaggtgatatggatatataaggcatcctcttttgcaccttgtcatgaatgttcactttatctaaagacaagagccacccaaagactttgactcttgacggaacacaacttttccataagggccttgcccaatagactccactgccattcgggttcgatgtaaaccaagagaaggttgacttacaagaaaaaattccggatgattctggtttccatattcggctatcatttgagatattgagcactataacatgttccaccttttgcaacagcgaggagaggcttgggatctcccgctccagtaagttccttctaaatttgaaatcccagctttcaacccaccccccaggctgaccttcgtcgacaatcagatctttgatcgacacatttctgtccttggaaatcactgctaagtcaggaaaggaccttgatagggaagagtcaccaagccaaacgtcttacccaaaaccgaatactgcctccattgcgtaatttgaattgtactaatccaaggtattcatcatacaaatctgagatatccctccatgggcctttgggagaaaggcgacttccttttcttgtatcccaaaaattatcagcctttccatatcgactcaacactaccttgtgccacaacaaatttggttctagaggaaacctccacaaccatttcataagcaagcccttgttcctcaactccaagttcccaattcccaaaccgccctcctcacgaggtctgcagacctcatcccaagccactaaatgatccccacccgacgactcgcagccttcccaaagaaaatccctcatcatcttctccaaggcttttgttacagattttggagctttaaatggggaaagaaagtagatgggaagagaggatagaactgactggatgagagtcaacctacccccacgagataaaaaagagcatttccatccatctagtcttttagcacacttgttcaaaaccggctcccaaaaagcccattttctaggcgagccccccaagggcatgcctaagtacgtcaatggccagctgccaacttcacaccctatctgatacgccaaccttgtcaccttttcctcctccaagcaaatctccaataattgacttttgttcatgttgactttaagcccagaaataacacaaaaggcttccactagtcgtaccagcttctgcaatgagtcatcatctttgatgaagaacaaggtatcatctgcaaattgaagatggctaatataaacctcttttccaacctcaaacccggagaaattgcctgaacttactgccttaaccaccatcctccctagaacatccgcgaccagagtaaacataaaaggtgatagtgggtcaccttgtctgaggccccgagagcaagagaacttccccctcggtcttccattaatgaatactgagaatgaagtagaagacaagcatccattgatccattttctccaagtgactccaaaacccttcttgcacaataccaaatccaggaaattccaatccactcgatcataggctttttcaaagtcaatctttaggaccaacccgcttttgcctctgcttctatagtcctctactgattcattagcaataagaaccgagtcaagaatttgtctaccttcaacaaaggcagattgagtttcatgtatggtcttctccaacacccctctaagcctgatggagagcatttttgcaattatcttatagacgctcgttataaggctgattggtctgtaatcttttaccctacaactgttgagtttttttgggattaggcatatgaaagtctcgttgatgctgccttggatgattccttctctctcaaaagacttaacaacttcccaaaggtcttccttaactacctcccagtgagattgaaagacagccaaactaaaaccatctggtcctggggctttacttccttcgcagttaaacactgcctccttaacttcctctatctcaaaaggcctctccaggtccatggcagaatccattggaatcttttgccaatcaataccttctacgctcgagcctcgtcttctttcagctttatacaggtttgaatagaaagacactatctctgtgactatttcttcttctctatcaatgattgagccatcttccctttcgagtcttgatattgtgttcctggctttttttgcattcaagagattgtggaaaaaccttgagtttgcatcaccctctttagcccatttgcactttgatttgagccacacacttctttcctcttcaaatgcaagctgctgccattcttttttgatggcttttctttcctccattaaggactgattccactcctcagaggcttccagacgatccaggatcaacaatcttctttccgtggcaatcttagcctcgcgtttgaatccatagttttctttgctccactcctgaatgtttcctcttactgctttaatttgctcataaatttggtgccagcccaccctaacccgactgtctttttccaccaagtctggaatttattgggaaacaatttatgttccaaccattggttgtcgaaagggaaagggctaggaccccatttaggagggtttgagtccaggataaccggactgtggtccgagacaatcctcaccaacatttcctgtctcacatacaggaaaacgttgctccaattattggtgaataggaatcggtccagtctatagcaaataggtttatctcggaaattcgactaagtgaagcgtccgttatttaatcttggatcaataagctttagttcccgcactatctgatcaaacatcttcatactcatagtccaagaagtactatttagtttttcttgtaccgttctgactacattgattttaataatcttgaaagactgttttctcattaatatatcaataaaaaatccaatgattttcattgtgaagtgtgttaacttgcaaaacatattagaagcgtttacacaagcactttttacaatccttctcaacctttttcattgacacatagtgatatttggagaccctaaagggtaagaaatattaatggctctggatggtttgctcctttatggatgaccataacttggattcctcatgaaagaaaaatctgaaacggcatccattttttaaagtttaacagataatgggaaggaataattcaactcaatttcttgtccatacttgtcagatcaaggaattgttcatattagttcctgtgttaacacccctcaacataatggagtggcaaaaggaaaaatagtcacctctatgaagtttttctcgatccatcttgttttcatgataaaagcattttaggtggagaagctttacttattacctcacaaaccatatgccttgtcgtgtcttaaggttcaaaacccctcaaaatttgttactacaagcattccctcatctctccactttctccttgaaattgcctctcaaaattttcggctgtaatgcctttcttaatatctatgatgactgggatgatgatgatgtcaatgatgactttccacagcagctaaagaaagaattggagagcaatgttgcaaagagctgaagttcacatttgaaaaatttatgttgccttggtactttcccttttccttgatattagtcacaccttgatggtagcttgaaatgtatcatagtattgcctcctttatatagtgagaagctatctacccaaactttgaatgttaacttttagatagagcaaattatcagaatatctatgatcacaaatgaacaaaacttgaccccaaattgcataagtgcatttttattgggtattctagctcgaaaagggtacaaatgttaaccacaataagtgtctcatactttggatgtcaaattttttgaacaccaatcattctttcctgttaagtataaattatacagatgttaattagccttattctagtttactaatggtttatagtttcttaagatagatacttagtattgtatataccattcttttcaattaaatatatgagaaagaactttctttaactctcatataacatggtatcagagcatgatgaccgatagaaaaacgactggaataggacagtgcacggactgacgcatggggaatgtcgctggaccttttggcgacgtgtagggctcacgcgctaggttgttggccaccaaacacctcagttttgtcaattggtgattgggcaatctaatggtgctgacaatgagagtccaagtgccaaatagggttttcgaaaagtggagccctaagaaagataaataacaaactctaattgctaatctcaattttttgataaaccctaattttgaatttcaaattttgactattagttttgctttgatccagccccaacgatgatcttcccattgcattgtgtaaaggtaagtgtcaatatacttatcccatttcttcatttgtttcatatgacagtgagttgtcttctttttgtgcttttattgcctcccttggttccatctctatttctaacacttttcgtgaagccatatctcatcttgattgatataatacaatgatagaagagatgaatgcttttgatggcaatgatacttgaggcttgatgaattttcctttagggaaacagggtataggagacaaaagggtgatcacagttaatgtcattctggatgggtcaattgctcaaacttatggagtggatattctgacactttttctctcttgcgaaactcacctcttgtttacttatttatttagttggcagcttctcgtgattgatctttgcatcaactagatcttaagaatgcttgtcttcatggtgatctttaggaggaggtgtatatggagcaacctccaaggtttgttgctcgagggagagacaaggtgcatttgttgtcttcaaaaatcattatgtggtttgaaatactctccgtgcttggtttggaaaatttagtcaagttgttgaaacatgtgatatgaagaaaagcatgtctgaccattgtgtgttttacaaacatttgaaagtttgcattattttattagttgtgtatgtggatggcattgttataactgtaagtgatactacatgaatctcatctcttcaagttttttgttcatacttagtttcacatgaaagatttggggtgctaaagtatttcttaggggttgaagttacaaggcttgtctagttgtcaaggaattcattctatcacatggtgttgattatcatgagacctttgtcgctaaactcaatatagtaggagttttattatcatatattgtaaattgtgattggcctttatatcagttggatgtaacaaatgtattcttaaatggggaattggaagaagtctacatggaaaatccaaggtttgaagtaaacctccattggtcgattggtatgcaaactacgaaaattcgtctatggcatgaagcagtcaacctcgttcatggttcgataggtttacaaagtcagttataaacttaaggccttgtttgtgaagatcccttcaatagggaagattggcatttctcattgtctcttgattacataatcctaacgggagattgttcaggtgagatttcaaacctcatctgaatttgaaatcaaagatctagaatgtctcaagtactttcttgggatagacatagctcgatctaaagaggaaattgttatatctcaatggaagtatatcatagaccttctgaatgaaactagaatgtttggtactaaaccagcagatactccaatagaccctaattaaggaaacagattgcccacatgcctagaagctggtacaacacagattgtgggagactgtagatatattaaaattaatgtgtatatattttaggatctgtgattagtgatttacttttattctttcctagattataagattttctgatcacacaatactgtattagtgcttgtttgttatgataaaatatttaaaataaaactaaacaaagaatagaatgaaaattaatttatttcaattccatttattaaccccttaccaaacgtacctttggtgttttgagaaacataatccctttataaaggtcttattgtattaaatagcaagaaacaatatggttggataaaactttatattgtattaattattacaatcataaattctaatacaatgtgaatcctattattgtataacaaatgatccgtattagcatgtattataatatttagaaagggtctgtggttggaacccaaattccgaccccagacctggactctgacctggacacagacttggaccttggacctaaacccagcgccagaccttgactcctgacctggacccagaccgaactgcaactcggtccctagcacaagtctggcctcggaccctgaccccgggtctaaggtcgaggtatgcgaatagggtccaagtccatggctagagatgggatctgggttcgggttcgggttgggatcgagtttatagtaaagatagtataattttacacaacctattaatacaagttaatatcaaagatagtattgtattaaatattactaatacaatctaatccaacacaatactatacaatattatgcaatacaacacggtgtaccaaatgaacccttggcgtttggttggaggtaatgaaatggaatagaaaagaaaggaaacaatcttcattccatttttttgtttggttgcatattaaa

SEQ ID NO: 379747 - DNA, 2163 bp, Cannabis indica
ttattacggcccataacacagggtagcgtcttacaattagttagctatattctaaaaaaattattatattaaattatatgaaattagatatttaattatactaatagcaatatagcacattaaaaggtactaggcaacattagtctgttttagtatttctccatcaaattattaaaaaaagattaaaattgtcatttttgacacggaaataatcacataataataattaattaattttattaaatttttacatccgtctagtcctccttggccagataatatatactattgatccttctaatatatactttttattattagataaaagaattaatgtgccaaacaaatagttcagtaaagcatgaaaaataatcctttaatctattttcctatagaatttttttcttaattcaaaagcaaacttttataataataaaatccagtacaaaatatcctgcaactcggcagagacatcagaaataaggattcgacgatcagttaaaacacaagattgtctagcaacaaagtgaggtactcagttagcagactgttttacaaaacgtaaagtgacattagtcatagaatgaagtaaacaacggcaatcttgaactaaaagaccaaagactgacttcatgatcgttgaactatgaaccgcttgaacagttagcttactatcagtctcgacctccacatgataccactgtttatcttgtatccaattgagggcttccttgactcctatcgcctccactgttgcaacatatccagatggccgggaaacgactggcaacgagcttacaaattgacccgtgcaatctctagccaccatcccaaagccataccgacccttttcttcaaagatggctgcgtcaatatttactttaatcacacttatcaaccggtttaatccgaagctcaattccatcattttcctatagttcttagtacaaattagtaagcaaattaatagaccactcaataaaaagacaaactgaaacagataaagaaaacaaagaaagtcccaaacaacaaaagaaacaaaatcaaaagagccaaagaaaagcagcaaacaactccctcaaaaaagccatcaagtatggaccactcttcaaaatcatcatcaaataaatgaatttggtgagtgattgcgagattgtaatgcccgttgaataatccattttgtctcgtgaatttttcaaacattaattgcatcgtctcacattttgccaaattgttgtaaactagcaaattttttaattctacaacaaaatgagagaaaattttatcatttgttgaagtagattcatcatttgagagtatatactatagtaatttattatatttttaggagtaaataccattttggatcatgttttatcatttgttgaagtagattcatcatttgagagtatacagtatattgtgcttgcaaaactatcttatctttctaaactacgtgagattgagaaatttcataattcgatttttcccttaaaagtaagtcataaaaataagaatgttaaaactctaagctagtgatatatggattgggattaatcctcttatgtgaatctttagaacaggatttacctaattatttgtaatcgtttgtttgaatgaagaatttatgttaaacaaagttatggggtttcataacttgttttatgcatcttatttatagcatttaagtttttacatattacctttttttaaaaaaaatcacatgttttttgtaagaaaaaatattaatataggaccacttgaatgcatgaatggactttacatagcttgtaataataatagtagagcgatctaggtcagatttggaattttctactattcaattattttatataagacaacaaaatgtcaattaaaaattgttatgagaactgttttttttaacaagtaacatttagtttttgatattaagactattaaattttcaaaataacaaaaaaaaatataatgcatctaaaccctccacgtgtctatattgtctatatttatgagttaacggaaacggtaataacgaatgtaagaaaattgtaacattgagtatttttgcctccaaaaataaaaataagatatttaagtgtataaaatttgaaatattaagtatttatgctgcaatttatcttaaaatatatattagtttttttt

SEQ ID NO: 379748 - DNA, 952 bp, Cannabis indica
tcctataacgtctaagccaagggtgaatttgttggttaaggggtttattgatgtaaatggctcttggaatatacaggctttatgtcaagtcttcttgccgatggatgtagaagtgattcttagaatccctttggtgagtggagcttgtgaggatcgttggtgttggcattatcattataatggatgttacacggtaaaaaatggatattcactgtctttagagttggtgagtgaggataagggttgttctacgatgaatttgagtacttggtggaatgacctttggaatttacgagtgttgtagagagttaaaaaaaaattttgtggcgatgttttatcaagttatcccaacgaattatcaactaattaagagaaaagtacctgttcaaccagtttttgagaggtgcggtgatgaggttgaaacccctaagcacgctttggtgttttttcttcattgatttcagttttgcatcgattaggggtttggggtcagctttgtccccatagaaatggccctttctctaagctgctagtgtggctgttcgaagagctgggtcgagataatttcgtattggttgctttggtgtggtagtggatatggtacgattggagctaggtgttgtttgagaaaaagaagtcaagattggaggtgcttgttgaccttgcagcagtggctttagaggagttttaagctattgatttttctggtgtgcatcagcagttggatttgaggggaaggggagtcgagaaggggagttagagggtgtttgcaagggttcgaggcagagtttttctgctggttttagcaagtgggttcctcctgaacctggtgtttttgttctatcgactgatgtagcagtgacccggggagaggttttgctggttttgaaggggtgataagtgatgccaaaaataaataattctataaggttgaataaaaattctattaatc

SEQ ID NO: 379749 - DNA, 2430 bp, Cannabis indica
attaaaaagaaaataaaaattcatgtgcagaagtatttatggtgtgtgcaattctccaaacctaacttttttaactaacaacatgctagattagtctagattgttatgtgtggctttcttagtatttggtgttgtataccaatgcttatatactctaaagtccaattccattttcatttagaccgaaagaggagagaaagagcaattgggctcaacaattgaagttctagagagaattgaaagaaggggattgagaagcactttgagagatttgtatgggattttcaaaaagagagttgtaaggcttgagtgattatacaagttcttgggtgtaaaaggttatttagtttctcatgtacatgtatacattgtgtccccaaatcaatctttgctgatctaagattagtctgtaacatgctttgctcatagtggaacttctgaaaggaactggagtaggccattcattaggccgaaccagtataaaactggttgtgttttgtccattgctttcattttgtttctgcattactttgttgtttattgctttctcagatagaatctaccaaactttgatattgtatgtgttatccgcatttttgcgaaacatgacacgtggcatttaatgagaaaaatcaaattaatccttccttgattaaggtccctggatatcgttctgtcatggaaagacttcctggaagcaaggaatatctaggaaggaaggatacgcaaggacttgttcatgcttgcctctattttccagacgtggaagagaaaaaatctctcttagtcccaaaagggcttcacagggaagcccgctcagtttatgtccaagccggcaaacgcaggacttaaagcggatatcaaccctcatgaattatcacagacgtcgaccttttacgcatgccaggttaccaaagtgacgattatgctttttctgacaaggatcgaatcttgtctcccacatttgagcatggtagtccgcgtaccaccaccacctttttaccggacagacattacgaactgctgcctgtaaaggaatgagctttgagtaacacatgtccccttcttttaaaggttgaacttttgcgtgacacgtgtccaagtggtacaaaatggtccccattatccagttgttgcacgcacgggcataatgcaacccacgggatcatccagtcagctctcacactgcaagtaatttaccttaatagcgggatttaagcagaaactttacgtgggtcatgggcctgtccatacccaccacttagctataaatatccttcacttttcacaagagagagggaatcatattttacattagctaaaactctatcgagattgctctaggtcttcttcaaaatgagaaacttagagtacataactagggtttcgtgctaacaatattgtaaacacatcaatacttcccttagaggctaatagactgactcatggactaaagtttattaacacctgaaccacgtaaaaaaatttcatctctttatttcttcaagttattattcctttaactcttaattaaattttcaatttttgaaaatcttagtaaatattttggtgctttcattgagagataaagaaagacgtagatcgttgctactttccatggtgttcacacgaaagaaaattcttaaaaagactcttcagggtggcctcgagacggtcatggaggaagtgaaccccctctcgccaaagcacgcccagccgagtaatgcgagatgcaggaatacgtccaacgtgaatgttcgaagggaaaatctagaaaaccagcatgatcatgttggtggtgacaagaatggtaagaggaagaagatgatgaaaattacgtcaaagatatatattacaaagatgacgattgttatgatcaagacccttaggtggtctgagtgtctaacgagctacacgaaaccaaacaaaagttagcccaataggagaagttttctcgtaagatggaaaagttaatagatcacctttgagctaagctcagagatctaggcgaggaagattttgacaatgaccccttggtggagtgcgttggaggaaatacaaggaaaaattatgttgatgttggaacctttactcctttacaggacaagggaaatgcaaaagtaagtgatctaaagaactcgcacgctcttcaatctcctcaaaaaaatatgaattaggccagcaagccttcttaagcgtaaaagactaccaacgtctccgagcttggacatccttttgtccaaaaaggccccgtggcaccaaaaggggttggtatgaaagtaccaaaacccaagggaaggaaaaacaaccctagtgactctgtaacgtccccgcttcaagcctccattgggcccttacacccacggaatagcagctttatacacgagtacgtcattctagctgcttcatggactgatgactgaccctaca

SEQ ID NO: 379750 - DNA, 868 bp, Cannabis indica
aaaataaaagcaaacttcaacccacatgtcaaaacccatcaatcttatgagtacgataagccaggcctaatatgatttgagggttcagacaaaattgcatctttttagctatgcactatttttttaaacttgaagcagctgccatctcgtcgtgtgctccttcttctccctgaggccatcttcttccttttcaatgtgtgaaccaacaaaatatatgtattgtatgcatattcttcgtaagtgaatgaatgaatacagagaaaggttttcgacaactcacttctccaatttgtttctgtaattgggcgagatcatgctacccttggtccgccaatttcttcacgtgccaatagtcaccctgtcatatccagtgtcgttgagctttacttgtcgccccagatcaaagacccatatagtaaatattaacagtgcttgcctttagaattattcctggggtgtgccatcgtcagccccagaaacgtcctctagaacacccaaagcgccatgaagattcgatgccatctttatctgctccaactatggtgttgtttaagaacctttcgttgttgtagatctaggatctgcactacctgaagaagtcatgggaatcttccccgactttagtgttatgcttcctaccgttatcatcgttgatcaaactagaatcgattgtgatctacctcgatcagatgcattagaaatgtttcttttgacgagatcatgaggctttttcaatggctgattgtttatcactagttgaacagggccatccatgtagtcctcgaccttcggctaagtaggtgacacctgagatgtctaaaccgaagatgtctcccatcaatgtgagatagctttgaaacttggcatc

SEQ ID NO: 379751 - DNA, 1396 bp, Cannabis indica
atttgaaaaaaaaaaattaggaatacatatgctctagattcgaaatatggaaatttctaggataaccaaaaggaaatagcagaagcataaatacagtcaaaatgttttcacaactcactacataaatcatttttagatacaaaatcaaagcacttcatagtgtcaataataatcacacacattatcaagcctgtgttttttaatcaatcatcgtcctcaagaacactccgacgcctctgaatctggaaaagaaaaggagattcaaaggaaaattccaaatgcttttcgtgaattaatttgcttagatagcgaaaaatggacttactgtgactttggtttgtttgcttgtttggctgttgatttgttccaatagtgttatcagtctttcttcggaaacctgttaatagagcattgagcataactttcttctgatcaaatttactcttaaagaaacgtagatcggattgaaaaatgaagaccttaccttttcagcaatttggcccatttgagcagctctcagcaaaacatcttcgacgccccttgctttctcgggtttcaccagagcgattcgagcaactgcatagacaataatgtgttaacaaattaatgatacacattgctaaagaatcatgtctaattgcctatactcgcaattgagttcaagaatggtgcttttttacaaggccaacaattttcagtccctttcaattacaccgagctaaatctagtcaccagtaccaagaaagaactacaaaatttacaagtgtttctcacaagccaattatgtagctaaaagtaaggtacatattaccaagatagatttcgcaccaaattaaatgaactgagttaattctaattttacgtttctttttgagaaaactaagaacaaacaattacccaaagaaaatgtgacgccacaattgctaattcaatggaaaattggatgaaatggaattttctattagaaccaaaccaatagagggacagacttaaatatggaacaaccaaaacaagcgcagatggaattatcacttacttaagatgagaaattaagaaaaataagcttccaaaatcattacaacgtaaaagcatgaatgtaagcttacttctttcccgtgcttcagaagataaaatttgactaagcatcatctgccttcgttcatctgcctctctaattattcactcaaaaacattacaatcagaccctaattcttaacaaaaagcaaaaacagcattaaagataactagatttagttagaacctcttagcaatcttcctgtgacattactgctgttcaggatttgattgatttgcctactcatgaatacagtttaacaatgatcagcaatgcaatttcagataactaaaaaagtctcatttttcagtgaaaaaaaaa

SEQ ID NO: 379752 - DNA, 2559 bp, Cannabis indica
tatttgttttctcatttttaattttctcttaatttctctcttttttttttttgttgttgttgatataattgccaagggggagattgtaagaatcatggttttgtatttgtcaaattatgagttttctactatctagacattcagtagttccatctgagtttgtcttttactggtttatatataactttgacatatcagcattttcatgttaaaatatcttagacagttgtcaatgagattagtattttcatgttaaaatatcttagacagttgtcaatgagttgttagtgagttctcaaagtcagttttgtgtgagttggtgttatacatagttgattcttgaatattctaaccaactcccactcactttgattctttgatagagatttttctctgctagggcagaaatatttttcttcttcttcttctttgttttttgcaggtttctccattgttaaagagttcaagcttctgtgacgaaataataatagaggttgtttcatctaaagggagttcagagtcatagccaaagggatttcaactaaatcgaagcaatgagagcttttcttcgaatccaaggggacttagatttgaatcttggttggttaatcgagatcttagggtaaattaattagtgtaagaattttttgttgtattgttttacatacatttgatttacaaactagagttcgtatcttgacattgattcttattggaagttatttactctggttaggggaacctaagcactaactgcgtagaacgtattcttagggtaggctaagcttgtaaattactttctgtttcttagcttttaatagtcctttttaatttatagtaaaactactaattttatattgtgtaattgaataccattgttttaattagtagcttccattagattggttttacactattgagacccatttaatttttggagaagaatttatttgactttgaagtcaacacaatcaaataaattcactcacaataaattcataattgaagagtaacaactacaactactactcatttactattctgacccacattcctctactaggaacaccattaaccacaacaaacaacatataatacccaggcggagcaaccgccgcactcgacggcgcgtgaccctcactcacatactcataccatttacccttattcgacttccctttattttccaactccctcatatccaaaaccaaaactctttggttcattgcaaaagaatgtgtagtaaacgatggagccaccaaattgaccgaaatacccttcactccgttgactttgtagtttgaccgaaaatgtacggaaatcgtctgattataactcacctccttcttcactggtttcatcgaagttatcaatggccgattaggactactcaaatatggtgggtaaaacgcttcaagacttagctcagtcggaaaaagtgtggagaagttgtaactccggttcgggttgctgccgccgactaaaacccggccgtcggagagtaaatgagctgtggagtggtagagccgtgggattgttgttggagctagggtttcgaagcgggtttcgggttcattcccgggtcgatataaaaccgggtttaaaaccgggtcacgagcagaatcccacccggccgttccttttccggcgccattgataataagaacatcaccagtgggaagcaaaatcatatcacccataactctcccaatcggcatttcctccatttcccacttaggattcacctccgtgatagtcaaccggccacaactcctcgtcgccggaataaactcaccggcaacagctttaagattagagtccggcgaagtacccccacaaatcaaaatcacagctttaggaatacccacatttccgtttaaatcaagaggaagcatagccgaagaaccagtactgggataattcctcgaaactccaccgggcatggcggcaaatcgccggagaatcttgttagaaccataatcaagcaaaattccacggtcattggcgaagataaagagggaaccatcaggagagagatgaagaaatgggtaaagattattaggaacattatccaaatacctcgtctctttcaaaaacgacaagtcgtacagtttgagatcagattcagttttcttaggaataaactcataagaaaattgataccttccaccaacgacaataattttaccgtcgtttaagacttggttagaagcgtaccaacgtggcgtaactaacccattaggatcttcaacccaatcggtattttgagtaaagtaacgaacgacgcgttcgcctctttggtaaccgccagattggattaaaacgccgtcgtttgataaagcgccggatgagcaccacgtgtcggtgagtatagtgagaggtcgtacggtgcgttttgatgggtcaaattctactgagtgaacgtaacaagaggaagaagaatcttgttgtggttgtaatgaattaatatttgggcagtttttttttggtgagattggatggaccaaaattggttcgatcaaagactatgattttgttgttgggcattagagccatgtg

SEQ ID NO: 379753 - DNA, 4378 bp, Cannabis indica
ccccccccccccaaaaaaaaccctttatcttttatcttttttctttttctgtaccattttcattttcttcaattggagattttatacatatgtgtaacacattttgcagtaggcttcttcttactatagtttgtaatgttatgttcataaattttccaccacattgacttcatcgtagcttatagccattgttttatccttgtaaacatgaaattaattaacgtcatccatttcgaggaggtttttatatagttgataatagtgcattgagctcttttttctttttgtcttcattctctcctgttattcttacagagatgcaatgttatgacaggaaattcatcaagtcatttcttcaaggtttccttcctggtctcgcacttaaaatatttttgtacattcttccatctgttttgatgatcatgtcaaaaattgaggggcatatagcactatccactttagagcggaagtcagcagcaaagtactattattttatgcttgttaatgtatttttgggaagtatagtgaccggaacagcctttcagcagctggatgctttccttcatcaacctcctactcagtaatcttctatatctctttctgacttaaaagtttattgatctctatagttcgttaattagatttaatgtagctttattctgttgaggtgatagggttttttctttgatcaagaaatgcattgccaggatttcataggttgtatgttgtggttccaatttgttagtgcttttaaaaaataatcagagttaagtactttcagttaaaatctttatgtattgttaattttacatgcattaagttgctttcaaaataatttatttaatgaatgatttaagcctgaatgttaaaataataacataaatcagaagtagtcagattagcagctcttggtgattcctttagcagacaaatttttggaaaatcttttgaggggaatctattaagttgaggaatccccattcatgtgccaaatatagtaattataatatgagctcaagtttaaaaccctttaatgaacttaaatagggttgtgatttgaggtaatgaagctaaagttgactgattcttgagaagttaaaaaagtttgctggtgttgttaacactagtgtgccattatagctttggcaaaataaagctctgagtatctcttctcttgtccttatttatttattttgaagagctggagcttttgtactatgtgtccctatgttatttgtttcatcattctctcaagagcttgtatttggaactttcaatatgaaaatatacacatggaaaactaattttagctattaatgtcactcaatggtttcttgaaagctgcattgactgtaatcatcaaacaaagttaactgacacccttaagtgatagattgattattttattcttgatttagaaaatctaatgatggcaattctttccctaaccatacgttcatttttgttcttcaacttttggttgcttgaagtgatatttagatgtttttgttttatcacaggattcctagaaacattggggtctccataccaatgaaggctactttctttattacttatataatggttgatggatgggctggtatggccggtgagattctccgtttgaagcctttagttatctttcatctcaaaaacatgtttttggtcaaaactgaaagagatagagagaatgctatggatcctggcagtgtagacttcccagagactctcccaagtcttcaactgtacttccttttggggcttgtgtatgctgttgtaactccaattcttcttccattcatactagtcttctttgcatttgcatacttggtttaccgtcatcaggtcagtttattgacggtgcttgattcttcctttttctttgtgtaaatcaattttcatagtatatgctactgaaatctaaattcatattttatccttattctactttgacaggtaattaatgtctaccaacaacgatatgaaagtgctgccgccttttggccacaagttcacagccgcataattgcaagtttattgatatctcaacttcttttgatgggtttgcttagcaccaagaaggcagctaattccactcccttactagttgttttgccgatattaactttatcattccacaagtactgcaaaagccgctttgaacctgcatttaggaagtaccctcttgaggtgagatataaatcttagcattggagctgaaatttcttattttgctcttcgtagaaaattggctttcttgtttcattgagtaggtttacgggttatagaccagggatactttgaattttgaaatttgacttatttgttaatggtggttatgatattggtttcttagttatccacttgtatatcatggaaagaagggggcacttagtttaaaattacagtaagtccaatttgatctggttccacttggtagtttatttcctattgtaccaagtcttacttacatttaatgtaggcttaacatatataatcagggtctgttctaaatctccaatgtaccaactttagtgcaagaacataatctaggggttaaaacggtgtaggttgcaaatttactagacatgcatggggagaatgtttcaaagttaaatacttaataacttcatgtcattttcttcgtcaggaagccatggccaaagatacagaagagaaaggttcagaggcagacatgaaggcatatttggccgatgcatatttgcatccaattttccaatcatttgaggaagaacaagttgaagaagaggtgatacaagttcgagtagacaaaagtgaagcccacggtgctagtcctccgagtgaacctggttcctcttccccaattaattatattcaccatctttcacctccacagtatgttcaccatcctccttcccctcctcattacccatatgacgaatcctatccaccccattatgcctatgctgctccaccatcaccaccacgttatatctaccaccatgaagaccattaatcttactagttcttgttagtttgcgtagaacaagttctaacctttgttcttgttaatagttggttaacaattgtatgctttccttgcggtcttgcatttttctaattgtaaatcgttactttgtttttcactgcaagttgaattgtacgtttttttttttttccttttgccgtatgaaaggttgtataataattaactaggagaaagagagtgccctagggttcacgaatcttcttatgccatcaatgttgccgtcgtcgtcactgtctatcgacgttcatgtccgtccatgggttttctcatcgagtgacggttcgatctccacctccctgaagccgtttgtagctaacatacggaatccaccattaaagtcctttgtcttctccctcactggtaaacttctaatttgtaataacttctgggttgatgtcccatctgtgattaattctccactatatcgatcttttctcccctttaaacttgtctataaggaaaacccctttactgcttatctattaattagccctcaatcccctgaaccgccttggatcataattaaatctacactcgtagagaacgctagaattcctataggagccactgtcaatgttgcaggaataatcattcgattacttgacatgaagaagttctccttcgctaccttacaatccctcacgatactcattctttgctcagaccactatatatctgactatcctctgcttctcactgcacccagtacttctatgtcaaatttccttttttatatatattctgcaatctgtcaagtttccctttccgttttttgctctcgtttaccctgctatcttttgaaaatggatgacttatccaacactttcaatgccaccctcaatctcactgctttagaaactcaaattcactctttctctgaaacccctgaccatcctcaagatgatgatcgtgatgaaccctctgcgtccttgctgtcgagcttttgaccaaccgccactacaactctgaagctttcaagaatcggcttaggcaaatgtggcctgaacgtttctcaatcaacatccttgaaaaggaacccaacttctttactgttgagtttggatgttttggtgatcgacgccgtgttcttatcggtcaaccgtggcatttcgattacaaactaattgtaatgacacctcttgaagcaggttctgtggtaatggctcatatgcttacccacacacctttttgggtccaagtttctgggattccttttctcaagagatcccgtgctcttgctcataggctgggcaaagtcttagggcgctttatagaagtggatactgcttctctaaaggagacttgtggtccttattgttgggttttgtgccctaaataaaacccttt

SEQ ID NO: 379754 - DNA, 2584 bp, Cannabis indica
aaggaaaagaaaaagaaaacgtgttggtggaccaatgaccctcacttcataggacatttttctttttctttttcccttcccctcatttatgttttttggaaaaaaaatgggggttggtcctgttcaattgttggacaaaaattcaaagtgttggaataaagtgttaatgggcataggatttggaatgtctggttcagtgttacttgtggcctgtgggcttctagataatgtctggaaaggcccctttctgtaagtgcattgctatggggcagtaagggcctaacgtctcaatgacatgacgttttataattagttagcaattttctacaatttttattaaattaaagtaagtgagacccaatattgaattacaccgatagtaatgttacacctcataagggtgttaggaataggcaccatgggtgccttttagcattttctctttttgtacatgcaatattcttggggatgtctttttttatggtttttaaggtggaagtttgcaaaatgtagttttttcctaaaaaaaaaaaaaaaaaaaaaaattaaaaatttaggggaatttttaaaaagataagaaaacatgggggaagcagtaggtaactggttctctgtctgaggtaaggttaccttaactgtttttccatattttttatttattattttgaatttttcctgtaaaaacaaccttttttttcttgtaaaaaaacattgtttttagtttcaagctctaattgtaatttatgaattttgggcgtgagacagtgcactaaggcgatctgtcttagtcaaattaactcaaatttagatattatgatatttaaacttatcaaatttaaatggcaagttcaaaacgtcaatggagaattcgttacaaagaacaatggccatcattaatgaagtaggttttagactatagtagaagagtatgatataggggaaagcattaggtgataaatggaataagagtatgtagtaaggcaattgtgattgaatgggtaaccgattgttctttctgttgagggtcttggtttacccctttgtgccaaacttccatatttgaccttttttattacattattacattacagaagtagtattattattcgacactttctcattttgcatgtactatactgtacttttgtcgaaagaatcatccttccaaagtgcaaaaggacctttaaattttagggtttaggatttcgaagttgtgatattcaatgaaacttcactaaattagtttcgaagtaaaattcaatttgtgaaaaaaagaaaaagaaaaagaagtaaaactcaaacatgctacgcacttataaattcaacaaaacattagtttccaatttagttcttataattggtatgcttgaagtaaattacatattagtaggcatcatatatagctaatatattttttcactcacaacaatatgtcatcaatgcctgattactttgtctcttacaatactgatccaacacacgcccatcaaagagtgttgcccttcacactatcgatttatatataagtattgctatcaggcattagtggtacttagtaccttatcgacatgtcgcgttgcgatcggttagcgatattttctaaaagttttatataaaattatatgagacatatacttaattagactaatggggcgatattgacaaataaaaaggtgctagacactactggtgccttttaatatttttatatatatatttatatttatatttatattatcactaccattccaaccgtttctctcacatttgtactacttgttagtctccttatatcttacactcaactccaattacattattctatcatacttttagcaccatcaataatttgagtatatgacttttatttaaatttattcgatatatcattatatatatgtttgtgttaatggtatattattaattcattagatatatacatctagttaaatatattgttattgtaagtccacgggattcagttgtactcaattgtctatccatgtaaatagtatgtaaagacttgcttgcttgtgtatttaggtctttcataataattgtaatttttttaagttgtttctaaatgagtgatataatataaatgtgacataaaattatgcactaactttattttttacttttagcaattagatctgtccaaatatgattttttatcatttctatagaaatgatcaggtcatgtgataaaaaataaataactcaatatataagtttacccatattgatactaatataatatgtatcctgttagctatttctataaaatagttaaccatgattaataataatgttatgtttcacagcgtataagataaattaatttaaattttaatattttattgggctgagatgcaaaatgattctaaatttagaaactaaattagtagttaattttttttaaaaaaaaaattaaagaaataaacaaatataataaatcagctaatagaactatacatttagtgcatatatatatatatatatatataattttaaattatagatataataattaaattaagttatataatcttttagtattacatattattatattgtaataaaa

SEQ ID NO: 379755 - DNA, 1796 bp, Cannabis indica
attaaaataaataaataaaaaagcctaatttttaagcatcaattgcaatgcatgtgggtagctttgattcaaagtaggtgcacccacatggccccccttcccctcccagaattaaaactctattttcctcatcaaattaatctaaacgttctactaccatgttaattgttatgcacttttataaattccttaaatgttgcctacaaattttttaagcatgtccatatctgaataccatgaggaatatgaagcagatttgtttatttttccttttctgttttacacaatcatatgatatgttatgatatgatgtacattattattattattatgtgtgccatgacactgtttttggttgctgacaatttcttgtccccatttcccttttctaacagtcaaaattggctttatttatacttaagtccatttcccctagtaagtccccatccacttataattatatacaccaaagtccaatactttatacagaaaacaggtctactttttttttgcaacccaattaaggaacaagtgcttaagttgagtctagtgctacaccacttgagtgggccaattaataacttatgaagtctcaattctcattaaaagctttatatagatcaatagaagaaagggaacccaattctaactataatctatctatacatacatacatccatattgtttcaaatcttgtttttatttcttcttacttatagattaattgtcacaatccaaatgggatagtaccctcaaaacttgacaaatttggtctgattttttagaggatgatcacattcacatggaagagaagggtgatagataaggattggaaatgaatgcataaggaattatttgttgtgggtgacattgacttgtcccttcagccaagctatcgtctaacccacatggctacatattgataatattgctatcttcccttcttacccacatgcagcctttgcatatgtggcagtggcacatgcacaacatgtgattggaaccctcaaacttaaatccccaatccatacacacatagtgttcttccttaacttatccatttcatcattcatatatacacacattaattcattgaaaaatttaaactaattataatatgaaagtgcgttttttttttttttgagggatcaaatatgactgcctttttcattaattattaattaagagagacaatgtgaaggttttgactcaattgcatttatatatataaatcatataatcaattgagtggggactttatctaaattttgttttagggtatgtgtttattcctccaatcaagcctaaattagtgggaaaattggcaaggccgtagttaaaactaacttaaagtcatttccctctaatatttcgcccttcaccaaattaaataaggacggactacatctataatgtagttgttgaaacttaaaagaggaaaaatcaacaaaatcagttaaataaattataattattatagaagtcagcaaaaatggcaacaaccatatataatgcctgtactacttaacaaaccgttacatgttgcatatcacctactggtgttcattggattacattcaatatttttaggtctatctagatccgatccaattatatattagaggttagattttatcatccgatccgatccaattaattacagtcatccaatcgatcaaatatgttggattagatcgattttatccgttggatgtatttcatatatatttattggtttaatttagatttattcaatattttagacctattattttttagatcggatcgaatccatc

SEQ ID NO: 379756 - DNA, 6774 bp, Cannabis indica
cgtctcacaccttgctaatgaatgaagtgtacaatattaatacaaattctaatttaggttcactgaataaattattactcctgcttgatagtaaatgtgagagctaaagtaaattatgatatgtgaaagctcaaagtaattaggatttattccacctaattttttaagtttgtgtttttgattatttttttatttattttattttttgtatggctatttctttattttctctcttagtagatactcttattaatagaattctaaaaattttgttttcacaaattcattaataattataaataaaaatattatttctctctacttttactacatatttgaataaattcatctcttttttgactctatttatagtagtatgtggttcaacagatttggttttggattgaaatttctaatcggaaaagagagcttaatgatgttcttaactggattcaaaagtcaaaagctttaagaggtaaaagaagagttcttttgagtgtcattatagtcacaatttatcacatttagcatgctaggaacactatgctttggtatctaaagttaccttctattcaggtcacttttaatgtattgttcatagtgcttgttctagattgaatatttttttttgaaagaactaaaagttcattgaagaaggtaactgggaatgacaataggggatccctctctttgaactacatcaaattggtggccagccatcttggccaacttagccaccctatccgcacaaaaattatcagttctatggatgaaaacaaaagtacagattcgaaccaactagccagctgtcatatctccgccacaaacggtctagccttccaacaaggagggtaatgcttactttgaagtgcctggaccaccagcagagcgtccgaggcaatgatgatggagggcaaccctgcatcacaatagattttcaacgtctaaagaattgcaaggatctctgcttccatagtagaatctaccttgcacttcttggtgaaccattctctaaaagccgtatttctgtccaattttcccaccgcaagactggccacccctccaatccacgacgcatcagtaacacagaacacattggcagagcttgggatcacctccctgccatggaatatcgtggtacctgacaccgcctggttatcaacagtagcacggattgatacaaacatttggtatcttaacatgatcattttcctaagctggagaatatcaggtttaatattacggaaaagcaaggagttcctagtctcccaaattgatgtaaatagacagccaataaaggtaaacaacttccacgactcatcttgggaaagaccctcatggagctttagcacaatattgataaggtcaaggtctgacaagtcgtggggcaccaccaagaaaggaccagagaacctaagtgctttttcaaggggacactcccaaaacagatggaaggaagattccacttttgcattacacaacaggcatgacttatctggtatgaacacgagcttctcacgaactgggaaggccccaatcaaaactctccacaccataatggataacctgaagtgcatattgcaattcaagattaagctacagaccccgtttcctcaatccccatcccactgaatacactccaaatatgcccttttacatgagaagcacccatccgacaccttcttccacgccagaacatccttattatgaggagggaatctttattttagcgatttttttccctagatcaggcccaaaaattttagaaagtttaggcacattccactctgagccattaatagacagatccaccactatcctcgaatcaggcaattcggtctcaccttttacatgacacccttgaactcaaattacgatagtcaggggatccaaggttgtatccacgcgtcgatgatgtttccatttccagggatagatacacatctttttctaaagatgtctcttgagtcaaggattcctttccacacataagagtcactcccatgggtattagttgcccagaaggaattattcttgcaatatttggcaaaaaggcatttcacctaaagcctatcatcaccattgggcatctgccacgccagtttggataacagagctttattaatatcctcaaacctcctagattgaacattttgaatattaagaatttgagtataaaagggagagtggatggaagatttaaaaaaagctttgtaagtaattttatcttatgtaattatttatttgtgattaatataatttattgaaaaagtgttactaatttctacttaaatataatactttattatatatgttactgtacttaatattttatgtctaaacagatataaatagtcgtgagggcgcacaaccgtacaaatgtattgactaaaattagattcatttttattctactacatcttattacctccaccaaaaaaaaaattaactgttataaaatgaaagtaaataaaatacaaatttatggctgtagaaaaataatatcatatataacataaatgaatcattcatttcattgttgattagcttcaagataaaaatttatgcaccttaatcacacacattactaaattttaacatagtatcagagtaaattaaaaacttttatcttcgcctttgacttctatttgcgagctttcaactaatgtgtgtcagtttctagtgttgagatctttgacctctttcaaaaaatctataaattttctgacgtgtacactacaaatttctcgatttgactttgtgagattctttcaaatgtcacattcgacattattgtctcttaattaggggtgttaatgaaatatccaatctaattcaatctgcatgatccaatccaatctaatgtgcaaagtgtggatattcgtacctgtgtagatttgattggattgtgaaatataaaattcgtacttgtgcagattggttgctgacttacatgaaaaataaccgatctattccaattcatgcctatatttaaaatattataaatctattttcataatttaaagaaaaaaaataataatttaaaaaattaatacatatggtacattggtatattagtacatatatatttcaaaatttaacatattaaatgtatatatttatatatattaaaaaatataatttaaaacataaaaaacttttctttctacatacaatttttttttgtttttcttggaatttgttatttatttattataacatattgttggagacataaaacaataataatatattttattttgttgttggttatatgaatataatttatattttaataattattaaataatttaaaataaaaaagttaccaatctaaaataatcgatccaattcgtattattgtgaatcggatttgattagatttgagctcttttatagattggattggatccaaaatataaaatatgtacttagtgcggatcgaatgcactataaccaaaatagtacggcttggatttgatgaatatctttactctcaatggttgttcattatacctactttctaattaagcccaagaaggtgtaagagaattagtctcagatcgctaatgtgttaaaaataatactatatataagatcaatgagctagttttcttatcgtcaattgaatttaaaatgaaaccttatgcactttactatacatgatcatcatctttatcctaaattataaccaacaaggatgaaaagttggagagattatcaaatttttcacaaagagaccatgaataggtaatgtaatattttcttataaatttttttgaatagtttaattaacactaaaatgattaattcctataaaatatatgcatgtacctcgaattaaaattgaggggtataattatttacttataacagaatgaagactccgagtcagagagaccttagcgagaatttatggccttcaagattcttcccttttcacccaagttaccttcaatttttctctaagaatagaaggctacatgttttgctattcattgcaggcatcattgttctcagcattatagaatactagtgcgattttttcggtgcgatttttctgatgcaattttttttgtttgcgattgttgctggtgtgcgatttttttctggtgcaattttttggtttgcgattgttgctggtgtgcaatttttttctggtttgcaaatataagtcttgtccttcatgacatggtgtgagagtctaggttttataattttttctggtttgcgattgttactggtgtacgatttgttcctagtgtgtgattgttgctggtgtgcgatttgttcctagtgtgcggttgtttctagtttggcttttctggtgtgcatttgtgtttctggtttgtgattggtcctggttaggttttttctggttttgcgattttttttctggttgcgttggttcctggttttatgtttttgatagtcggtttcagtcatggcttcatcgtcttctctggtagaccttagcttgaagcgtgtgtcgatcattcctctacaggaggaggaagagcttgcagtcagttatgaggggccccttattgatgaggctgaggtagatacccgatggagtattgtgggacgtttcttgatggatacgccaattgattacatggtgatgcaaaacctaatggttgtgctttggaagcctggtatgggcatgtatgtgaaggagttaggaggtaacaaatatatttttcaattctatcatgaaactgacattcaaagggtgatggatatgagtccttggacgtttaaaaatgctccttgcatatttgaacggctgaaaccaggggatgttcctcgggaggttcctttgcatcatcttgatatatgggtgcaactacatgatattaggtcgggcttcaaaacagagcgggttgtttgggatgctgggaaatatattggtggctttattaagtctgatgagaataattttaatgggttttggagagattatttacgggttcaggttcgtttaaacattgaaaaaccattgaagcacagaatgaaactgcaacagattggtggcgactggttttggattaagtttcattataaatttgtgctaactttctgttttatctgtgggtgattgggcatacggatcagttttgttctcgattatttattcaactaacctcatcaatggttaaaccttatggcacattcatgaaggcaatgtcacgacgaaatcagtatgcgataggggctaaatggctacggtctggggcacctagctcatcaaatgttggtggcacgatggtggttgaggccaggcagtcggcgatgagtgcagggacgaattttcagggttccgttggtggtgttaacctgattgtcatgaatcatggagtgaatcgtgggcttattttttctccaatagttttgagcgacaataatgggagtaaaggatgggaggcactaggggatggtaattcaaatttggaagaggacgaaatggtctttttggactctaaacgtaaacgaactgataaggaagtttctattaggcgtgttgggccgaaggagggtgttgatgtgtgtatgggggatgctcttgctactatttcaaaaaaatgtaaatttggcaggcacgggcgagctcgctcgccagtcattatgagtactctaagttggaattgtcgtgggcttggtaatccaaggactattcaattccttaaagatatgattcatcaaaagaagctcatgtttatttttctttgtgagacgctatgtttgaaagatcggttggagcttctaacatcacaacttggttatgagggtcttttttcggttgatgctgaggggagggggtggattagcaatattatggaaggataaggatgatgctgagatggttgggtattcccaaaatcatatagatatggtcgtaaggcatgatagctctcatatctggtgccttacagggttgtatggagaacctaatcgattgttgcggggaaatacttggaatcttatgagggtgttgaaggaagaaaatgatctcccttggtgtattattggggacttgaataatgttcttagccaagatgataaaaaaggtggtaatccttatcctaattggcttatagatggttttcaacaaactatctctgattgtaatcttgtggatcttgagcttatgggtcattcgtttacttgggagaagactaggggcaaagacagtttgtttcctactgcacggttgattaacatggtcctttccacatcgaatcattgtcctctatttttggatctatcatttcggttccaggcagcttctaggagggtgtttcgttttgagaatgcttggctacgtgattctaattgatttgctattatctaagagtaatgggaagcttgtgtatcgggtaacattattgacaaagtggcggctatttagggccctgttgttgtgtggggaaggagcttaactgataattttaaggagagaattcaaagttgtaagaccagaattggtctccttaaaggccgattgtatgtggagtctctttctgaatataaggaggcgaggaacaacttactaaaatttatcaccaaaaggaaatcttttggtggcaagatcgaagcaattatggcttagggagggtgaccaaagtgcgaggtattttcacgctgctactagctaaagaaggaaagataatttcattcatgaattaaaagatgagactggttcttgggttcattgggggtcggtgttggaaatatatattttaccaggaacttagatctactcacaagtat

SEQ ID NO: 379757 - DNA, 6276 bp, Cannabis indica
tttgttttaacatttttatgttaccattgttttgtagaatttttgatctctcttcaaatataattcaaccagagcaagagtattatcttcaacctttggaaccaggtagacacaggaatgcgacatcaatttgtgctgttgatttttcatttggtggtgaccacttgtgggacaggtttagtgtaagtaactgttcaaattttgattccaatcgacttgaatttgttcaatgaatattttggatgaagctctctttataatgctggtttattctggtgctttatttcttcattttatggcattctttgagggtaactattagcttttaggttttcaaccaaatttgtgtttacatcaactaatttcatattaatttttttagctcaagaactaatttcttgttacttattttgcgccgttgtacaggtctttattttgttcagtgatggttcaatttataccctttgcccagttgttccttttggaaggtaggcattagataaaattaatttattagaaggattgcttctcattctgaatagtctttatgtgataacaatatatggtgtagctagcataacgtttaggctaagttactattgtactggcttgcttctttatacatgatgaactgctttttcttaaaacagtgtttacaaatgggagtccattacggagatatatagtgatgcccacacatttggtctgaaatcagcttatccagtcgcagttagcaattccagtcttgcaatttcttggctggaggcaacatttccagatctagcaaaccaaacatcagaaggggtggacctttctacattaagagctcgtccatttgcattatttgatgcatcactttctttgcaggtatagatattgtgctctcatgctacgtacttgccctgcacttattttccaaaatgattgtcttgtctatacaccagttgtagctaccaatattctgtaaaacacaaatattttgtaggcaatgtcatgtgtgtcagttggacttttttttggataatattaaattagagaatgtaacctaattgagtcaccttttcacaatggcgagcacttccttttcaaagatcacaaatttggtttaactttgaaaatcaattaaggcattctgttttattacattatagggccctcttaaaaaagtttgtcatgaaggagaagaagatttatccattcgtggtgtagaatgtgaaggtcgtgcagttagtcttttatataatatagtcagcaaagactcaattttggtgactgcttggagtggtggtcaattgcaaatagatgccttggccgatgaaatccagccagtttggaatgttggtagtccatctcgtctccgtgttgatttccatgaccatattgttggtatggctatgatttgcgagagaagccaaagcaatgattccactgttaagcttgatcaatcacttgaaaatactgtttggttggggcatcctcctcctctactgagactagctatcgtggatctggctcttccaactaaagcagaaagtggttctctcatcacaatgtttgctgatccgcttatgccagaaagaatatactgtcttcatgagggagggatagattcagtagtgttgcattttctcccatttacgagtcagattagtggcaaaaatgaggttgggaggataccatctgtgcatcctgttttgagtacgtgccagggagaaacctcctcgccatacccactttgtggttttgtgtcattatcggattcatttggatattcttggattgttggggtcacaattgcacgagagtgtgtagtgctagagatgaaaacttggaaccttttgctcccaattcacgttgacaatgagaacaagcctacagaactaaatgagacagaattgccagatatcattagcaaagaactcctcagtggacctaaggtggttcttatgcctcaaacttcaaatctttgttctgttgccgcagattctattgaaggtcgatcagcacttcatcagtacttcaagcttttccatgaaaattatgtggagtatgcacataaggtaatttactaccatgccaagaaaataactaaactatactgttcaatggtggtgcattagcaagcttttttttttgctcgccagtaatcttagactgttttagtgttaccatctctcttacctattttagtgtttctatgtgttctgtttttgaaaattgtttatttctagcaactcaataaaaactttttttagaacagttggaagattctaaatggcaatcttcgattaacttacgtttgtcaaacatattgcggttgataagttataatatatctatgcatgggttaagaaaacagaagcttggataaaaagttgatgcatgaaacttgtgaggtaccatatcaaagtctatgagatggcaacatgtttttcaatgttttcattttatttttgtatgtgtatcttcttctttcctttttgatgggatgtcagttactttgccacttccatgcatttgttttcttttacctatcttgctaataagcagttctaacttaacttgtaagagtagcattgatcttgtgtattggtaatttgatctgatgttaaactgataaacatctccatactttgcaatctcaatgctgtttttttgtgaaatgtttgtccacttgtttaggtgtactttgagctcaagcatcacgggcttcacttgaagagaattattgataaccagcacactcgtttagatgaggcacatgataaaattttgaaggttgaggagaagcagtcaacgctggaggataagcttgttcatgcaatgcatcggcatgatctcttggaggaacgcttgaatcgcttgaggaacttgcctggggcacataggaaaccactctctagagctgagcgggatttcaagtctgaacttggtaaggatttctataactatttcttttctctcttttgtagtaaagatttctatactacatgctaaaaaataatgccaaggactacttgtttgtccactttaattttgaagatagatttgctgctagtgttccttatttgggactcgtgtgccaatcatattctgatttcacctgctacggtaccagtagcaaatcattcttgtatagtattaatagttctagaaaaataaggcaaggaaaaatatttcaatcagcttgataagaatgtgatcctcattctttattaaagtggagaattttgagatttgtcaagggtttcatatctccgcccctgtagctttttccttcagttttcctttgtatatatctgggtgtttatttatatttaattaggggggcaatttgtgttaatgggtcgtgttcgtgtcgtgtcgaaatgtcaaaccctaacccgattcatttattaatcgtgtcgaaaattaaaaccctagcccaacctatttataaatggattaacctgactcgacccgtttaacccgtttatataagaatcatgctttatttggttaagatattatctcattaacatgtttacaatctttttataacacatttatgagaaaatttaggatgcttatgtcttattgaactaaaaaaatatagttcacatgtaataagtattataaatttaagagtgtatactcttacataggtaattgttgtgttatttttggattaggcgtgtcaacccgaaaaagacccgtttaataaacgggtcagctgtgttaacccggagatgacacaaacccatttaaggcaaactcaaacccgtttatttcttgtgagtttcgtatcgtgttatcgtgtctgacccatattgccacccctcaaaatatacatgtattaatctatttttcttgtccatacctaaagaactttcactattattccttgcatgaatggagtaccttctcagaaattaactgccctctttcgtgtctacagaccagtttcgtggggttgaactggattcgttgcattcttcaatatccgctttaacggccaggttgagaaggcacacacaatctcttaagggcaatgcatcagaccaacgcaagttgatttcagggaggaaaaaacattcaagatactcaagtctctcttctgaaatcttcacttgagaagctttcacttgttaatagcgagagctcagaaaaggttaagcttgttgagtctgtattgaagggccgggagagcggcaggtgatagatatctactcttggttgaattatatgattggataactagggtgaagggccttgtgccaatttcgggtttgtgcattgctctttgaacagctgagaaaggcaaacatggtgtgtaccatgcaagatagtaagcttctttatagatgaatctgagcaaaagatttacatattctcatcaccctgattgccatatccttgttctaagatgttaacttaaatctgtacaaaagcgtttgcagcgagattctttagaggcctttctgtttttacttctcacgaaaagttgaggctatgctgggcaggagagttggtaaggaacttgccccttttttgtatcattgaatccttagtttttaccgagaatgtcgaaagtgttttaccttataacaatgattatttggatatgatgatatagtaaaaaggtggtacttgatgccaatgattattaacacttgtattcaacatttagcaagctgaaaagtacaagcacataatagcataagatacgagtaatatagtatataaaaagtcaggaacatttgattctcaagtatttgcagaaagcaagaaaatgaaagtaaaattttgaggggctcgaggatagatctctttttttcttcatcaaaattttcaattacaactttatgaattaaaaaatagggtttcaggtagttcagttcacatgtcgtgcacatgcaaaatgcttctcaattctgacgagaggccattgtggaatcttatttttatttattattatcgttggttcttgttccatgctcaagtaaaaacatgtgtaaagtgaaggtacaaaagggataatgatcatataataagaagccctttatggagattatcatgagggcaataatgaactctcctccatttttttggaccaaacaatgagattcccacttaactatcctagagaagctcaagaccaaccaattgaacaaaaattaattgatttacatataataataaaagaaaaagatattagctttatttcattaggatcacaaagatcaaacaagattgcatagccgagctatagctatagctacattccctgaagcccatatcttatcttgttttcttttccactttctttctttcattctctgttttggatctactctttacatgggtactcaagattcctaggcttcacaatgatagggtaccttttctgagtcctagtagttggaaagaacaccaacttatcttcttctgctggaacccaactgtcaaattcaaattcaaaatatttgaaaaaccaaactaaaaaaatacactatattagatgctttgaactctttcatgctctatgctctatgaaattgaagactattcattatgtgtacactaatattatatatttaaaataattttgatgatatatttaaaataagttaacctttaatgtaatgtaaaaatttaagataaaatggagaaagtgaaattttgataatgtattctaaaaaggatagagtagagctctctaatattgttttgttatgcatcaaaaggacataaaatatagcctattttaaaataaattcaaatatgtaaaatccaatattttctcatatttaaattttggtatgatacctgaaagtggtggttaaatgatgaagaaaaacagagagttctactctagcaagttcataaccaggacaaagccttggccctcctccaaatggggtaaacacattcaaggaacttgttgatgttcctgagttgttctgtcaaaatttaataaccaatgagcaaaatatatagtttgtccaaaaaataaaaaagaagaaacaaatttcagaaaattactctaattaatatgaaataattacctgccatctccatggattaaaagatcgagcatccttgaagtttttttgatccaaatgtacagctcgaaacgatgcaaaaactttccatccttttgggattgtgtaacctgttttgatcccatatcataagaatattattattttgttgcataagcctatgtttgtgtgaaaatataatataatacaatctttaaatataattagccactgattctttttttttttttta

SEQ ID NO: 379758 - DNA, 4684 bp, Cannabis indica
ttattttccccactaattacaaaccaatccccccacaaccccattcattcaacttgacgagcttcacagagaaagaaaagagagaaaagtacagcgttacagctagtttacaggtgtgactgtaactaggttgttattgttgttgttcttctctctaatcactctttcatttttaagctccaacttgcacaaacatggagacgctaaacctaaaaaggctactaataaagagataacggaacctcatgtcaaacaccacacactctctctatctctatctttctatttcttcccgccattgataaccaacctgagaagctctgtttcgggtagatatacttcgtctcttatatcaaacagaggatctgattcaatccaacagttctctttctccctcgatttaaccacgattagttagagtcttatcttatctgggtaagtatgtccattttttcaccgctttttctatttcaaattcagttttttcttttctttgttacggctgcaaattctattcggattttagcttagcttatctgggttttcgttaaatttttcatttgtttttttgttttgggtgacagagctatggctgaagtgaacagtgtaatcaaaattagtcagacggagttttgtaaacagaagtacgaaaccccttcgaatggtttgtggggatcctcgccggaaaaaacaaaccagggagatacccagttattccttagctctgaagaaccggacctgaatctgggactttctttaaacggactttacgccagaagctctaaagaaaagaatctgattcggtcatcgtcgtccgtcgccggattccttgctcaagaccgagttccggtagactcgacaatccgccgacaagaaaattctttcctttctctctcaagatcgtgctcgcttccggcagagacgaacgagacggcgatcaagctcagggacttgcagacgatgagaagaatggcggccaagaagagattggttgagaaacagagaaattgtagagatgcccttgacgaagataaacctcccctggcaccgacaccggcgccggacatggcagcttgggcggcggcttctgcggcgaaaagtgccgcacttagtcgcgccattagtaagatcaaaactcagggatatgtttccagtaactatcggcaattagatggtacaactattctcctttttttttttgaatagtattctcttctatttttcgttcttaaagatatttgtttatttacttcttttaatgtttgggagttgaaattgaacttcgagcttttatgataaattaatatatgtgataggtagttagaaatggacaaaaaaaataaaatgtccaaaatcaaaacattacactaaaattattgcttaatagaatggttgattatgaaattttgtatcaaaacaaataacacattaagactacaaagaaaactgtctacttctttgaattggcatcttaacatgttctgtgaagtctttttcttgtaatgctactgactagaaaagttaatgataaggattatttaagaaattcccatgttgaaatttcctaaagaagcccttttttccttggttttgttcaacaggacatgaattcctaagtgctgcaagggacaatactgagtcgcactcgccacttgagcaaaggagtggtgtgaaacctccgatggttgtttcctcagaggaagccaccagagaccgaagtggtcagtcttcggacgatgagccaaaggagaatcccttgaagaagctcaaggtttcaaatggcataaaggccatggacaattggatggatgtgatgaacaatatgcctagtgtaacaaccaccggggatggtcctaatgggaggagaatagaagggtttttgtacaagtacaccaaaggtcaagtgagtattgtatgtgtttgccatggaagcttcctctccccggccgaattcgtcaggcatgccgggggcaaggaggtcacaaatcctatgaaacacatccatgtctgcactgcctatcgcttgtagatgaaagatcagtcaatgatggtggtggcattattttgtcaccccttttatcaacattgttttaactagtgaagagagctaagaagtttttttccctttttctttgttttgttttaggatttaactatttcgtcctcgtatgtttaggttagaattaatattttagatttctagtgaatggatgaatcagctctttgatcatgttctttcttttggttgtccttcctctgaaacaaagaggtacctcaaaagatagagaaaagaaaatgtactcaaatagtcaaatcaacaaatgatttatgctcatcttctcatgcgacgagttttacattgtcgttttctatgtatcatttcaccttgtgaattgtgacattgttttatgattaagttggtacttagagcacgccacagccactgaggccagctcagttgtgagggagttcaacccaagacttaaaaatattaaaaaattatattaccactaagagaaatgctaattacagtcatttattataacctcttagtcaatttttatgtctgaaattacatgtcgaaatattttttttcaaattttttttcatagcggtattcattatagttagagtatcatccctagtaaatttttgaaaaattctgaatagtttacattaccgaaaaagagttcctgatattccagtttaccacgcgcgttcaaaaaacttcaagcgtattttcggtactgtaaactattcgaaattttcaaaaaatttacatgtatgatgttgtaagcataacgaacactcctgtaaaaaaaaatggaaaaaaatattctgacatgtgttttcgggcgtaaaggttgactaagaggttgtaacaggagattgatggtagcaatcctcaaaagttaatctctaagtaaaacatgtttgatctaatctaattatgtactaattttcaaacttacggttgaaattataaaatagaaagtgtgtttggatattgttttaatcttatatgtattttgatatatataaattttatttttgtgttttagcaaaagagttattaattacacataaaaataatatattaaataataattgtttaaaaaggataattaatatttttgttttataaatttttgatattactagattattatgccccttaaaaaaaattaacttgttaaaaaaatttcttcaaatattacagttacataatcataacatttttgttagattctatttattttaagtgttaaaagtgttattcatgttttcggataaataacacgtggcctctcactaaggcccaatagacatcagctccatcaacaggtctaagaagataacaataagaatttttactaaatatttttaggggtgtttattggatcacatctaatagatttggacccaatctatccaatccaattatttattggatattgaatttttttattcgatccaatccaatcgaattgagtcatcggatctccgatccaatggatgtattggattagatcaccattggatgcattaattgctattctattaaattggattggatccatccaatccattttagttaccatttaagttgatttcattgaaaagaaaaataaatataaaaaatataatttaaaacctaataatcgaacatacagaataaacattagtttaggccaacttaattctcatgatcccataagaatcctaaattggataggagtgccctcagggatcatgagaataacgacaattgcacactccgaaagatcaacgagacttaccaaaatcctaaattagatatgagtgccctcagaaatcatccaggaatggaagttagaagggtgcttgggacaatccatagtcctaggagttgcttacgtgtcacatctatgatatgatgctgagaatctaaggacatgtccctctaccaacctttggaaagacacacaacaacacaaagatcaccgtttttaggattgcacctcatctctgacattcctttttctaacaacgggacacgactctgtttgtcactatcaacaatactgtactttgtacgatagattgttttaggaattgggccttccctactcagcccaataggtcagataatgctctaatgttgcattttactctattagtggaccattttctacacaaacaccttaattaggccatatttgtccaacccatttagcatgatagcctataaataaggcattatctcatccatgcaaaaggttcacaacctatggaaatcaccaagaaatacaagagttgtaaaaacttcattgctaaaagcttataaaactatctcgtgaactgttataatattagttgtaaattaactagaaaatagggtcaattgtaattatttctttttctattttctcatactttcctattttagtttctcctaggttgtatatgttgggattttatgccctaaataaaacctatttcaatataatcagatttactaattaataaagatcagaaatatcattttattttgcatggttcacatgatttatttcatgattgtttaatgtataaattctattaagttcataacatatgtatttgttcatgattatagttgtaatatcctgaaattaagaaatggattagaaaaaccctaactagataattatgtataattgag

SEQ ID NO: 379759 - DNA, 2649 bp, Cannabis indica
ccctgtgtattacacaaaatcattggctagtcagtattcaaagcaatcgttcaaagcacaatgcaaaagttcttaatgttagtactactacccaaatcgctccagcatcctaagctcattgtcaacatgatgcttatgagcattaacatgaggacctgtaataaaaataaaacaaaaaggaaaaggtgatatcaagaagtgcctcaaaatgaaaccaatataattaacattcaaggctcaattttcagattggcgctcatttctatatactagtttttcactctaaatatttgagaaattctgaattcctaaattacatgatctgaatacaagggactggaatttgacatctttgcatgtcacagtgaaatttatacaatatactaaaatgaagaaatgagaattctgtctgacttacacttaatggcaacagtagttccatctttcttacttcttgcccggtaaacagttccataaccacctgcaagtttggatgattaaataaattttactccaataaacacgtttctaaagttgtagaaagtgcaattcatctacaaaacttttctacctgagccttcttcctcctctgcaacataagtttcaaagtttggaagtatcttttcttctatttggtcctacaatataaacaccatcatacagtttttcttgtgttaaataaagaagagaaatcccatacagtatgatataaacattattaaggcaagaagactaacatttgatcaggtgaagcataccttaggggaaacgacgttagaggttctctttttttcaatatcctgccctattttccgcctcttgtctaattactttgcaatctcctttagtttggtgcttctctttctgggcatcaatagccttgccacgcactccagatttgcacagctggttctgtcttggggatatcccctcaatagcctcctcatgctttgatagcttctgagaaagggccttaggatcacagctttcaacatatatctgctctttctcaaaggatggcataatatcttcaaaatctatttctttcattccgccacttccacttggtatattcacatgtatagatttaaatggtagacatacattttcttcttctccaaaaatactcccagaagccactgatctcgcttcctcctgacctcccacagttctttccttctcattgatttcaatatctaaagctgtgaaactctcattagcgtttccattcttcataagtgacatatctatcccttcactatcatccgggcacaatgtgaccacacaatttgttctaatatccccatcttcaacagttccaccacttactgttagattatctaaaatgcttgtcgacaaaactagctctaggttaggtttaaatgacattgattcttcatcacccttacttttaatagacacattcgtatcagtttcaccctctaaatgtctcatctccgtcagttgacaacttctttgtcttgcatcccatatgcaagacgaatggtttgtaaaactaaacccatttaccatttttaacatactaagtggtatcgtatttatgcctcggcttacatagtcagtcacctgaaattgaaaagatacctgcgcaacacatttgcttcagtagttattaagaaaataatttggatttcaagggtatgtacaaaatccatgtagattcaggaatcagagtgaaaatcacagtagatcttgtctcaaacaaaatcaagagctcgttaaaaaagaaagtaatttatattttcctctttcacaacgcacatcaaatccaacaaaaccaagcagaaataaattagcagataaacccatttaaatcaaattgcatcagttgtacctttggggaagcatactcgagttgtaaaggggatcgattcgctacattcgctgaaatcgataaattagcagctaaagttagtacaggttaaaaaaatgaaaataaaaaacattaaagaaatagacaatgtaattcttgtaactaccatattcggtatttaaaaccaatcttcttttcgctgaaggtacgaattcgcagtctgaaactagccatttccgcttctttaagcgcaatccaactgaatcagcaccacaaaaatcggtcacaaacggctgcgacggctgccgcaaaagagcgttaacaaagtttgtgatcgcagcggactggatgaaagccctagaagcgacgggagaaggaatgacgaacagatctccggttaaagagatcggcgagttggggatcgagcagaggtagtgaacgaggtcgggcgaggaggggaatagcgtgcagagagaagcgagtagaggagggcgagccggacggccgaatcgtaagagcaagacgagaaaatgactggccttgtggtagtcggaggtagggacggtgctgagttgggagggagtttccattgaagatttgatgaggatcaaatccaaatctagatgcagcgacaaagagaaaaagaagttagtgagaaatggagggttttttttggggagatagtgtggtttggggggcgggaagaaaaggcgccaaaatgttcgcacgtgtaaatttcaaagttaccacgtgcaggattcgcgccataatagtatttacaactggaaaaagattcgcgcagtggatgagttttt

SEQ ID NO: 379760 - DNA, 2235 bp, Cannabis indica
atttatataataatatttttcacttaattaaagaaaaaggaaatacataaggctataggttcgggtccagagctggaatccaggggtcagggtccgtgttagggcttcgaggtgtagggtcgagtcttggtctaggtcatgggattggggttcaaggctgaggttttggggtccgagtctaaaatctatatgtctgaggtcgggtatggatccaaatatcgaatcatttctaaatattataatatatacaagctaattaatacaaatcatctgttatgaattaaataatacgattcacactattaaattttattgtcgtaataattaattgtacactataaaattttgtctaaacattgtgttttttgttatttaatacaatacgatatttataaaacttaccaaaacaatatatataattttttacgtaaaatatttctcatatatttataacacatatataattaattaataatttgcaattaattattaattaacaaaacttataaattatttaaattacacaaattataataaaatttaattattgacataacaacgaaatagtacacacatgatttggattcatatacattattgcaaaacaataatatagatataaaaccacacacatatatagatatattaattaagataatatataattaataattaattacatactcataataggatttattggtagttgaaatgattgaattagggtactaagatccattgggtgagagtctgatggatcataagctttgtaaattctattggctgtgattaaattagaagcctcagttggatgaaatgagtcccaaaacacatactctgtcctattctcacatggcttctccaatttcttacattgccctatctcattcaccgaacaacacccaacatcccaaactttgaaccctaaaaaaaacgaaatcgaaatcaaaatattagcgaaatgtagaaaaaaaatcgtaaaaaaaataataaacgagtgtacatgtaaccctaaccgagtttcttaccagcttcagtgggatctccagaccccattccgtaagagttaatatagatgaatttcgcatcagcaaaatcactgttgaatttatcaacgagcgtcacaagtttttggttgaagagctgaactgcgtcgttcatgtaatctacgcaggtagatccattacttgctccgtaagtttttatcgagttcggagtacaaccaatttgccctaatccatttagggctaccattcttgctccattattgtacaagctctagtaacaaagaacaaaaaaatgataagtaactatatacaaagcaatgcatgtataattattactacataattttaattaattaatgataattaccatgatttgatcactatatttttggatgagaaggttggcatattgattagggttataaagatttccatatgggtaaatccaaggcatgaagtaattgttaatgtaatcattatttcccattgcaacccaatacaaacacttgtttaagtactctttggctaattttttgtcccctaatttctcaacaatttttgacaccacaatcttgtgattcttcatttgtttccccaaaccaatattgtcaccctgaaaattaatataaaataaaacaaaattaattccaatatactaaaattgataaaacatttcgatttataaatataaataagttaccattctaattttatcataaatgaatatgttaattatatagttacaataatttctcaacaccttttcatgaaaatctaaattattattagagagtgacaaaaatatgcttattttaaaaaccatattttgtgcatggtaatattaccgaaagtaatttttttttctgacattttaaattattcataatttcacgaaaacatataacgtattaatcagctaaattgaactaggcgtggacctagggcccactcatcctaaaagtccaaaaataaataattaaaataaaaaatatatatatacataggtgtcgtttggtaacacttttttaatcagttttttgtttttaaaattgaaaaagtaaaaatatttttcaaaaacatgttctataaaactgtttttacttttcaattttttaattgagaatcaaaattttaaaacaaaaaaaatacactttcaatatttttttaaacagtttttttttttcttaatcaatatcttggacttcaatcccaaatcccccacggccct

SEQ ID NO: 379761 - DNA, 4557 bp, Cannabis indica
attttacgattttattacagtcgcattcttttttggttgttaagtaagtgcctattaaacccgttaagtgtcagctcaaaaatacgtggcgatatatatctttagcttatataatacgtggtctaataatatattgccacttgtttctgagctgacacttaatggccaaaaaatggtacaatcgcaacaaagtcacaagataaggtacttttgctactactttctttattaaggtcatatgtgtaacaattataaatgttaagagagttttgccgtaaatatccctaaatttaatgcatgactacagatttgatctcttctgctcctttaattatgattctaagaagagaccaaccaacaactgctgataaaaaaatgtatgcataatttactacaaaactctcttgctaaattcttgttgcaaaccaatccaccagaccatctttacagtggatactgatgtttcaatccccagaagactcatttcgcaatagatgagttctttcgattttttctttctttcctttatattatactagttcttcattcaatttacaatttctgcatctaacataagctccgccaggggtagaaaatcggcaaggcttttctgtgttagcgacaatgataacttaccaggtattgtaaggagttctaatggatcaagaagctggtcaagaaggaagtacagttatcctgtggcgaaacaacttagccaatgttctgcgctcgcaatcctgaaaaataatggagaaagatgattggattataatttgtttcggaagcaagcaatgatcaagaatggatattgtattttaacatatgaaaaatcctcacatttcctaatacctctcaaaatctaccagaaagaattataatgtatcctttggatctattcatctcgtagttgtctttgcaattctcaagatttttacagaatttttaatgatgaggaagaagaaatgggagaattttaagtattgggttgctatattgatcttcaacaacaaagagtttaaggcctactttgtgtttgtgatcttacaatcttgtttaattgtatgtatatattttatatattcaagaaaatgagaagataccttgaacatattgaagttgaatggtttatcaggattcattctcttcaatttcaggtaagtatatgcaaaacttagttgatcacgagaggtgaatcgatcaacttcattaaaccaaaggcaagaaaatagatttgacattggcgtatgagctcgaactatgaatgaaccttcaggaacatctgtaaaataatcagcacacaaaattaggaacacaaactaagatgaaatgagttagaaaaatccagggatatgttcaagagacttacagctcggaagaagtttatttgggtcagaaggatcgaactttgttaggccatcagactggtaaaaattaaactgttcgtctatggctgtatgattgtacttattcaaacgcttattttgaagtacttcttcccatacacaatgtcgatcataatggtttgaaatggcatattctgacttcgttcgccataagaagcgctcaagaattagcattggatcaatgtgaagtcgcatcttactgtcgagccatattgaataccttgaaaggacattgtttaaagagaaaaaaaaggggtaagagactcaatcgaaggcccaatgaaacaaatgttcttcctgtaactaaatatactgaaactagttgtggtaaattaccttgcggaagggaagagtctgtgtgacaaaagcttgggaacttttccagttcttctcatgtccttgtatggtaaatttctgataacaactaatctccataacccaatctttcctccatcatcaggaacatttccttccatagacaattttgacaaagtttgttcatccacaaacataacaaaacaaacattgtccttggaatatccacttatctatggaacatgcacacaaaaggaagtcatatgaaccatgttttgataagaaattagcataaacacatccacaacactcaaaccaaattaactgttatgggaacaagtatgtttctgtcattgagtatattgatatgaaacatatattcttgtcatcacttatgatgattgtggaaaacaaaaccaaactagggaagagaagatttacttgttgctagtaggtctcctcaaaaagtcagagttgccaaaaatgcatgatgaaacaacaatcttacatgtgttcatgtatgccttgtccttttcatttatctcaaatccaatgcttgcgtaccctggtggtcctttgacaaagccacaatgaagagtctgattctttgcatagaaggattgttgtctttcctcaagagtctggtgtcctccaaatctcagatcaaaaacattgttcgaagaagatttttggtctcgatcaatgtattttaatgaaaactgtgtaaaattcgtgaggtcgctgggttcaacaagataatcaactgatttagcaaatccaatttcacaaggaaaatctgaaaagcaaaattacaaccaaaagaataagtaaatttcttaagccatgatagtgtacaaaacatgtagtcaagtgtgtataattgggcacagaaagtaaagtgctaccaaaagaaattttaaaaactatagatgtagattcataaagcataatatagttgatacaagaaaactcatacaaccacttggctagaactcacccccgaaagctaccctaagagaggagggcgcccgagtatgttatatactaccatctcatacttagtcactgtgtgatcctaacaatacaccccctttagaggggatgtccatggtggcaactctacggtgcccactatgggctcccttctgcaatgtcggtcctacttgagggtgcatatgactctaatcccaattgatataaccactaagatagaactcactctcaaaaactagcctaaggagttcaagtagttatatactctcatacttagtaaatgtgggatcctaacaaaaacagacaagaaacaattcttacgctgtctaccacgtttgctccttggcggcggcggtggcggtggtggtggtggtctaccagtctcagattcccaaaggtctgggtgagcttgttgtagtattaaaggactttcttcaaatttttcaataaggaatatgattagattaacattgatgaagaaatgtcattaaaaaaacaaacttttagaactatataattccacattgcaatgcccatttcttgaaatggatattctaactaacaaagatcaaactttaacaatatgcatacaaaagggtgatagaatcttaccatgaaaggggatcttgtttaggttggagaaaaccagaaaacaaatgagaaatgtggctccaaacaagaaggtccaggtggataatttgtgtctgggaaagggaatacggccaaatctttttcctcttcgaacaaaacgaatggcattgtcattggaaagacctcttttctccaagtaacgataacaattcattgcttggtggtacacaagtaatgggcttacatggctatgtttgttgtgatagaattacaaatccaggttaggtttcagcagtgaaccgtgaacgaactcttccggtgtgagcctgagatctgcggctgcccctgcgccggagctctgaggagtgtggagagagaaagaagaagaggattcgttggtgaaattactaatttgtttttgtaagaaataattttgttaataaatttaagggtaatatagtaattttataacaacttaattttctatcttttgtttttatattaaagcaaaatagttagatcttatggtcattatatataaagttcgccggtatggaagatggatcgatcatactagaaacatacttgggaaaaactcacttagccacattatagacaacaaaattacataatcttgaaataaacataaaattacaactaatcaaacgatttgagagacttttacatttaagcacatagttaccaataccccctacgaaagtagttcccttcagtttgttgataactgtctcaaaatcgctctcaataatcacaaaagactgtttctaacgggtcgctgatttcagggctaacaagcaggccgcagcttctccaatgagaggatcagagaaattgagaatgttgctagccacccacaaaaccgactccttgtgatctctcgccagagccaccacacacattgaatcactaccaatgttaacatcacaattaatcttgactcaatcttattccaggagagaccaaaaaaaaggcgcatccctcaccggcgtaaaaaaacaaaatctgcataacatataaaaatagagtcaatataatacttaatgttacatatataattattattataaactttatcgtttcgattcttccatatcgtgtccactataatacaggcatacacaaacaattcttaaacttctactcccttatcttacataagaatttgacccaatcttaatcccataccttgttttctttctttggtaccaaacttagtattgttgggttttatgcc

SEQ ID NO: 379762 - DNA, 4095 bp, Cannabis indica
  modified_base (54)..(54): a, c, t, g, unknown or other
ttttaggactttagcctatgtccaaaccattactctactccttatcctttttcncttcctctcaccttcaatactcgaatcggcaaccaccgccgccgcgaaaatgtgccggacaactgttcagagaagcaccccagttctacaactcaccggactgccctgccgtcgagggaaatgcggaagcggacggtgaagtggacccagacgaaaacgacaaccccatctgttctgaccacgccgtccacgtggcaatgaccctcgacaccgcctacatccgtggttccatggccgcaatcctctccgtactccaacactcctcttgcccacagaacgtactcttccatttcgtcgcttccgcttcagccaacgcgtcccacctacgcgccacgatctctgactccttcccttacctgaaattccaaatctaccctttcgatgactccgccgtctccggtctgatctccacctcgattcgctccgcccttgactgcccactcaactacgcccgcagctacttggccgacctactcccaatctgcgtacggcgcgtcgtttatctcgactccgacctaatcctcgtcgacgacattgccaagctggcggccaccgagctcggagagaactctgtgctcgccgcgccggaatactgcaacgctaatttcacctcttattttaccccaacattttggtcaaacccgtctctgtctttgaccttcgctaacaggaaaccctgttatttcaataccggagtgatggtgatcgatctggaccgttggagaggtggagatcacacgaacaagatcgaggaatggatggagctccagaagaggatgaggatctacgagttgggttctctaccgccttttttactggttttcgccggtaacattgcttcggtcgaccaccgttggaaccagcacggtctcggaggtgataatttccggggactttgccgggatcttcatcccggtccggtcagcctcttgcattggagtgggaaaggtaagccgtgggcccgcctcgatgcgaaccggccctgcccattggatgctctttgggctccctacgacctcttacagactccatttgttttggattcttaattcatttcattcagtaaaaatccaaatttgaaaaaaataaataattaagtaattacaaaaaaaaaaagattgttaatatttttttatttttttggtggggaatgaatttgtgtgcatggttcgttggtaattagatttttatttttactttaatttgtagattataggggatgtgaggggaaattacacataactacatctactctacttattgtgtaaaaaaaaaaatatattgggcataaaaatatcatatatatatttcaataaaacaaggtgctgtaatttgtatagcagaaaagaaagctattttgagtggtacaattttgtgattttttttttcaatgaataatgacattaataatatatttccatacttttgttatttgtcgatataattcctgtatgacttttattcaaaacatttagcgtaattatcataatgaaatatgattaatcgaattatcttcttatatataagtcttttacactattgatttattgtgttaatgtacactaaactaataaatatatatatatatataaatattaactctaagaacataaatacttattctcataatttgtatttattactatttctattttttttttgtttagactattaaattataccatttttgcaccaaattactactacattaacaaactgaaaaaattaacggaatttaatcaaaatgacacatttgaaataatttctttctttattcaaaactgtaataataatgaaaaaaaaaaaacttcaataatattctacaagaggtatatcgttcgggagaaaattttatatttgtacttttcaaaaaaattttgttgtaattgttatttgtgtaatgcttaactctgatcattgttgtgtaatcgctctaattatagtgtaataactaattattgaagtatatcatagttcaacttcaatatattgaaatatcattaaacttaagctagtttttatatgatgttattcaaaattattacttagtttcgaatatagatacataatgttcgttaagttgcttactagttaagtattttgtatacaaatatctattatatatgatattatattatagtaatatatttgcggtaaaatttttttaatatttataattattacacatattattttaataaaaataatagcaacaaaatactttattttatgattttgttaagacgtattattttttggccattaagtattaactcaaaaatacttagcgatatattattgaattatgtggtaaataaactagataaatatgttatttttgagctaacacttaacaataaaatagaactataacaaaatcgtaaaataaaatattttattatgattatatgtatatgtaacaatcataaatattaaagagaattggccacaaatatattatatgtgaaggtattcaatatatatatgctttggtacgtgaaagtatgattaaactttttctccactcaataattggagacatacaatacagtctgttattattatgtgaatgaatatacaagtagtagagccattaattaatctagctataatgttttatctcactttattatacgattgtggttgatttaattggattatgtgtctggaaaaggaatgtgccagctaaacatatattagtcttttttttcctttattaattaaccaattaaaaagacgtaaccattaacagttacaaaaggacaaaaatgtgtggttatactttgtaccaatatatatgtcgtagaatacaacattataattgtatacatatatacaattcccttttggctagagaataatagtcacaaattgataataacttattatatatataaactaaggatctcaatattattaatatctctggattatatgtagaatacctcgttcaaacaaccaaagagttacaaaggaattgggaaatctgctttgaggagtaagaaaatttatcaattctaactaacactaactttgcaatttaaagcaaaacataaatgcttataatttagatcaccctcatcaatcaagattttaatagtatagaatagatcatcaagctcgagcctttaacattggcacaatctgattctaaggtcatgaaatttagcaagcaacaagcccatcaaaatagcccacaactcatctttgactcatcaccagaagcaacaacatcactattattgtctcaaccagtgtccttaaagttgacgttagcatcaaaattgatcttcacctcctggtagggataatttggcctttcaaggatataggggcattaattagcaacaagaaaatcaaatatataatcggaagttgatcactttagaaagcaaagagaaggcgtcagagtcacgagtacattatttaatcagcttccaaaactctatttccgactgaccatctgaatgaatttcaatacaagaaagaacaatgctagtgggaagtcaaaagttgcaaaagttttcaaaaaaagaaatgtttaatttttcgaggcatccagaagaaattccaccaactcttagttttatgcatatctgaggcttcaactgtgattttgaaatccatagcaactttgtactcccttctgtcttatcatcaagcattccattttcaactggtaattcaaggattatagaagcatcatcatcattgaataatagtctaataaaaagctcctcccaggcagctaccatcattgatatcaacaaggtatagtttgtcatagatcttaaagctaaatggcttagggagccaaggatcctaaaagattctaacatcttgtaaaacaccttgttaaatagttctgagaaaagaatccttaggagctaaccaaaccaggagtgttaaaagggtgcattccattaacaaacgaataaacatcctcaattaaaattaagaagcaaagttgtaatgctcctcctccaaactttgaagttctcaagtgatggatcaccgaaaacaagatgcaccttgttgata

SEQ ID NO: 379763 - DNA, 2617 bp, Cannabis indica
taagttcatagctctcatttactgtgaaaacctagacgaacgcttgagacaaaagcaagataagaagaacccagcgcatcaggtcgtacatcaacttaggcgctgggtgcccttttcggagcttttgggtgtcattttaatgcttctaaggtattcaaaattgaggacaatgtatcttacctcatttttgaccatgtcggagagaatgctcagagcagaattcacatttgagtgacggaaaccaatgcaccaggttgaatgtcaaccttggcgctaggcccaacaccaagtcaacctaggcgctgggctcagtttttggcctttcaggattttcgttttctcccctagtttacttgtatattctttatttatgatgacagaaaaaattcctggaagacttttcggaaaaactccttggaaatgacctaggttgataaaatgtcaacctgggcataggggttcagcaccaggtcaacctgagcgttgggtccttgttttttccactagatggctctgtttgactcatgtgagcacttgtatcttaattattgatgaaagcaaagaatatgcccagaagaccttatcagatttgcagatagaagtggatacctcgatcgaaccttaaataggaagaagaggagatttcttgaagctaaagcagtcatatcccctttccatgcagaatatgaatcatcgtgttaatagccttaataatggctatcgtctcagttcccaacactcgcacccccaatttgatccaaatcccctcccacaaccatctcaagatacaattattacaaataaaagggaggaatgtcaaaagacttccaagtgtaatgagttgatcaaatgacaaggaaagaaaaatatttaatggtagcagagtaattaataagagatttaacaagggaaaatacctgataagaatcattaagaaaactattaatgcaagagggaagtgaagagagacttggggcagaagaacgaaaggattggatattttgaatgtttgaaccttgtactagaatatttgaaaatgtatattaagattaattatgttaaaataacatgaaagtgtaaattgtagaacaatatgattgtaaactgaactaaatatataaaattttcctaaatttagcttaaagtaataattgatatgtagtcttaactatatgtttataaacttgctacaattttatttcatctgtttgagacttgagttgacacatcaaatcctacaaaatattttaatacaaattcaccgtttactgatcattttttggaagggtattgataattacttaaatattacaagtttttcgtaagaaaaaaaaaattgcaagttttagaatgtggttcatggaaaattgttgttgtggatggtagaaccaacttaaataaataaaaaagaaaaacagagaagatataagacaaatgacacttaatagtagaccttgtttgagttgtacgttatgaacaaaaaatatccaaatatatatatttgattatttgtatggttggattggttggttggtagatagatattttgtttgatggataagcattgaaaacaatagcttatttgttcaaaagtatcactacactaaaaaaaaattgtacatctaattattaatgagggtaaaattgatatattcaacaaagaggagggtacaatgggaaataagtattgcaagtgacatatttggacaactcattgacttggggaaaatagataaataagagcatgatgagatttgaatttgttggtttctttaagggcggggacttattttattttgaattaagactatacttaatagcttggactaggactagtctatgaggactatgtctcaattttttaagttatatatttgtatacatgtagcatgttactatggctaggactaggtctcaatttttattattttcttgaaatgtactaggtctcaatttaataatacataagacgattccatttaaaataataataataaataataaagataattacagcaaaaatctctaaaaatttaagattgatgtagattagtgtccaaactcaaaaattggcagtaatagtccttaaagtcaagttttctgtaagtccgttagtccctttttctaacggatccgttaaatccaaataaaatagcacgtgttaaatttttattggtctaaataataatttcaattaaaatcttttaaaataataaaaaaaaaaactaaaaaaaaattattttaaaatcatgaaacagcttttttttttcttcttttgtttttcctcttggtcttctacctctcgctactcccttgcccatcccattttgattcttctttcagcctgccacacaatacccatcctcaaattttgctatatataatagatccaaatatatattagtgtagaaaaaaaaaatacagtaaagagtcaaaatgttcttcttccagtcccagtaaacccaaacccattcccagtaaaaaaaacccgaaatggtaaatcaaattcccattctcaaagttttgtctaattttagtaaaaaaattctaacatggatgaaagttcagggagcatgatttagtacatatcaaagtttgaggggcatgatttggtaga

SEQ ID NO: 379764 - DNA, 3496 bp, Cannabis indica
agtaaatagatggtatagtgagtttgctctttcagctcccttgagtaacacgtttcactcactagttatttttggcgtaaatactcacttgttaggttgagtgcttaacatgtgactataattaaattcattatttatccattacaatttttagttctagtgtttgtgaatttaaaaaattcacttactttttcaaaaatcgttataattggcatttatataggatttttattcaagaatagttatatccatgctcttctgcactcaaagtaatcgggtttgcttagtacatttggttactatttttttttttttgagtttgacaattcaaatacaactatttttgaataaataattgttttcattgactaaaaagaaaataacaagctaatgaaaagaaaaaatgctaaactgaatattgactaaatattttcttttattctagtctcttcttctttccttgcattatggataaagccactatgaactagtgtgccactagcccctgtaagggttcctttaggtgagttgtccacctagcgcctcttctccctcctcgtgtagagttaacgccaagttatgacccagtcgacccccttgtggttgcactaggggattcagagcattgtctctttgatggttattatgtcgtttccttgcataatgagcaagaggtccattatatacgagtgtctttatttcatcctttatgttacaacactcattagtagtgtgtccaatatctttatggtactggtagtattattttggggtctctttttgtacgactaccttttaacagttttggtactttgaaggccattcggtgttcattcaccacataaatagtttcttgcatctgcacatgtttagagtatatggttaacatgggttggtagctcttactccttttggtgtcgttttgacccatccattgtcaccctttctctttttattattattcatatagttaatggaagaaagagggttacttgttgatggacttgcattggtgttagcagttgtgggggtagattgtgctaaaggaagaggtaggttttggctattcttgcctcctcaatattaatgtacttttgtgccctcttcatggattcatcaatggtgggggcaccccttccttgaaggctatcccatagtagtgatccatgagttatgcctgcccctagtgccataagtcttccaatgtcatctacatctctaaccttggcaacttcagtgtggaagcttttgacgtaagtttttaaactctcaccaggtttttgcttcacattggccaaggaggagtactagagtttttgagactttgtaggacaaaaatcctttttaaagtcactcgacaacttgtcccaagaagtgatggagtgcttcttggatttgttaaaccagatcttcgttgccccagttaaggtcacagggaacaacatgcacctcaagtcttaaatgacctaactcgctttcattattgtattgaaatcactaatatgaaccctatgatccataatcctatcatattttgttatgcttggcttctccaaccctaaaagatatggtaatcttgagatatgtggtgtgaatggctcaggttcttcgtctaactcgtacccctaacattttggttagttttttaaaattgttgaatttattgttcttatgtggtgagtcttcgatcattcgtccctagagccagggcattgtgatcttttggtggaggagcaaccatattaaactaaggtgtgtatgcccttgcttacgaggtatgtcatatggtgcctagtacaatacttctccttgtgcatgctccatgtccagatggtccattagatcaagttgtcaccttgatatctgatggacccaaagatttgggttccttgtgtcacgtgagaggtgtcgaggatgctcctcataatatggaggtgtagcattgtcatgaacactcatcgatcgacttctataattagaaataactatactccatgaaactgactatcctctactactgtggtccccagggcagaaccttgttgagcttaagattttgtggcaacagttcaagaccttaataaataactatcatcatgtggtggaagatttcatgcttgttacggtccagtctcccttagtgtcagcccctggcagatagagttgtcatgggagatggtgcgttgtctttcctatcgatgtcccctaggttgaggtcccttgcgtgcaaagttatctcatgagacttcttgtttgtctcgagaggattgaggcaagtcttgacttggaaggtgactgggaggtgcctccctttgtcgtgacctccctctctaggctggttgatgtggttgtgatgcattagtacgaggaggctcaggatgccttattggtgattggggaaacctaaaaggagggttttagacatgattccttcccccatcaacaccaatatccctaggattaggagacaaaagagaaggtgagacggcattattgtgtgttgtggccctctcttcaccggagcttttagtgggggggatgtgtagtattatcttgaagggaaataggttcttgtgtgtctctcctagtttgttattgagtagaagtgtgtgtattgttcctcatattctcacgacccagggttgttacccattgtcgtggttgtgatggaagacgttcactcctcttgccatgggtatcattctcacgagaaggcgaagtagtataacgactttgggttgatcatgacctagacctctcttggctttcaacagggtgtcgcgtcgaacgactcccacggggctgtcccctttttgccatactgcaacacccacgagttccccatcgcggtggccttgcggcctcttgggtaccatacctctcttgccactctgtattgagtctcagagtctcatctaagcattggcacaacacctcattctccataaacaccacatggacactagttttctgtcacacaccttgggacggtgatgatgaactcccaccatctcggacttgacctttgtcgtcaggcatggggatttttcctgggcatcgagaggtcccttcgccaatgggttttgcggattgacactcttcttggtgttacatggtgttttctttgttcatggggtcaccattgtaacaccccggtattttgccttattttacaaaatactaactttgatgcataaattgaaaagactcaaaactatttagaaatacacagcgggttttaccataaatatgtaaaagacgaatgatcattcatattaaaataaaataagtagttgaatgcacttttaaaataaatttacaacatcccgctgaccttagaatactttactatataaaaaaacaaaatcaaggctccaccgacgttctagaccgtctgctcgtccatagccccttgcagtataaatacaagaactgacccagctcatcaaacttacattcaatgttccctatctattgcctgtagggggaaagtaag

SEQ ID NO: 379765 - DNA, 11656 bp, Cannabis indica
tttttgtttgattgaaatttggtttaaaagtcttgtctttggaaaatcttcaatactcattcgatttcgatttcagtgtttcaatctcaagtctctgaagactttctagagagagaaagagaaactagagagagaaagagaaagagaagagaaaagagaaacttcaatatggttgatgccactcataacaatcttcccggtgccgccgctcccggagccggaggaggacctcagtacacggattttcccgcgattccttcccatggaggtcagtacattcagtacaacatatttggcaacttgttcgagattacaaccaagtatcgacctccgattatgcctattggtagaggagcttatggtatcgtttggtaagtatttcaatcgttgactttcgattttgattcgctactttttcggatcgatgatattgtttttgtctttgaattacagctcggttttgaattcggagacgaatgagatggttgctatgaagaaaattgctaacgcctttgataatcatatggatgccaaacgcacgcttcgggagattaagcttcttcgtcatttggatcacgaaaatgtcagtaacactattatctgttgaatatttatatataaaaattgtaatcttttgttttgtgtgcctaattttctgtttttggtgattcaatttgtctcttctcagtatttgtttaattgatgatttgggtaaattaggtctttaccaatttacattgactctgtacaaaatgaatttataaatggaaattttgacataaataaaagaagtcatatataaagctgtgttatgtttttctttttcattaattggaatatctattctatacaatatagggtacataaaagtcaaggttttgttttgttgattgtatataaatggtatgaatgtttatgctactacagattgtagctataagggatgtgattccaccacctttgcggcgagaatttactgatgtctacattgctactgagctcatggacactgatcttcaccaaattattcgttcaaatcaaggtttatcagaggagcattgtcaggtaaaaaactagtctttgtttattgacttcatggccaacttaattctaacttttcaaggcttgatgctgacatttttttcttttcttaattgttatgcagtacttcttgtaccagattcttcgagggttgaagtacatacattctgctaatgttatacacagggatttaaaacccagcaaccttttgcttaatgcgaactgtgatcttaaaatatgtgattttggtcttgctcgtcccaccgcggaaaatgagtatatgactgagtatgttgtcaccagatggtacagggctcctgagttattgttgaactcttcagattatactgcttcaatagatgtgtggtctgttggttgtatctttatggagcttatgaataggaagcctttgtttccaggcaaagatcatgttcatcagatgcgcttattgacagaggtaaggacaaatatacacaaaacaatttctttcagaagtgaagtctcatcttattttacttgtactgtagattctaataccaaatttcaactattgagaccttttccatctttgccaatttttcttcatttaatgctaaaagaacttttggaactgtggaatgatttcccaattagatacagctttcctttgtttatttttaccatctaagctcttgcgtgttatattatacgtttaatgaagtaattacttatgcattattctgtgtttcttagctgctaggcacaccaacagagtcagatctcggtttcattcgaaatgaagatgctaaaagatacatacggcaactcccttcgttccctcgccaacaattaggcagggctttcccacatgttcatccactggccatagacctcattgagaaaatgttgacatttgatccaaatagaagaattactggtaaattttcatactcaatacttgacatttcgaatagcaatacaaaaaatgaaaatcctgtctttgcattctcctttgattcagatatcagtgcctaactaacttgggggaacttttgtgtattaacagttgaagaagctttagctcatccctatttgacaagactccatgatgttgctgatgaaccagtgtgctcaaatcctttctctttcgaattcgaacaacaacctttgacagaagaacaaatgaaagatatgatctaccaggaggctatagcactcaatcctcagtatgcttaataataataatatatgaagaatgccatttcctttgcttattataaggaggagggtctatgtaatatgcttaatttgccactcatgcgagtctctttttatttattaatttaattttgttaaatattaagaaatatgatacaatacaatgtgtatctgtatctttgttgtagtagtgttttgattcattaggtggctatctctttatgattgtcaaagaagaagaagaagaagaaagaagaattataggtcattttttctttgacctgtgataaggatagtcaacgccttactaatcgttgatctgatcgaaccactatttgtagatgtaatatctttagttgtattttttgtttttttttttaaatttgattgtattttatgtatttttatgtatggattgattgatgtactaaaaaattgttgttgtgcatatgataaaatgaagaaagaaaattgcttcttttatttatttgtttatttgaattaagtccttaaatttttttattttctaacatttaagtttttttatagtaattaaacattttatatatatttttcaattgagggtattatttttaagtaaatgtttttgtgaataaaactcttctggttgtatattattattattattattattattaatgactttaatctgttaattaaactcctgaagtctttatataagacatgaactaaaattaaatatatacttatatattatttcatgaagcaattacataataaaattaaggatcaccaaccaaccatatattctatacattaaatacatggaaaaatgacccaaattattgatgttactaacacagattttaaaacatacaaataaggttatgttttaaagattttcacattaattaaagaaaaagaaatatttaattggattggattgaattagaagaattatcgagtcaaatctaggcctcatttccgagaaccaccttagggacatggatggctctacccgaattaggtatgccctcgtaaaattctccgttgaaggttgggttattaaccggttttccgatgcaatcttcaagatgtttttttccttggttgttgcaaaattccaaagttcttgcattagaaactccaatgaattggacacacactaagaggatcatcataaacccaaccatcataacatttttgttattattggacttgtacaaacgttcgattcccatcttgttctttgaattaactaatacaaaattattgttgtgtttatgtataatggtaataattgagaagatcaataacacaatgtgattatatattgttttgtatatgtcaacaataggggtttgttctaactgaatgagcaatagcatgcttatcagttgtatatttccagctaagaaatatgtaagagatttaaacagttgatgatgatatgatcgaataggctagctagtaataatagaaaatagaaatgtatagttggaaggataagggacataatttgaaaccatgatatcacaatgtaaaaactcaattaatatagaagatcatgatatatagttgtggtttataacaattagctaagttctcaacttgttaatacttgattaggagtgttaattacaatttttgaaaatacatgtcgagatttttttatggtaatatttattatagttatactgttaattttataaattctaaaaaattctgaataatttgctatgctgaaaataaatttaaaattttttgaacgcgaatagtatattgaaatattaaaaactctaatgtcgatctagtaaactactcgaaaatttacagagttagtattataactaaaacaaacattactctgaaaaatatattctgacaagtgattttatataaggagattaagaaagaggttgaaattaaggctgaacatcaggcgggtttaccgaatttcaggttcacgggtttcgggttcacaggtttcgagttcaaaaaaatgaaatcaaacccaaacccaaatagggcacgggttggcgggtttcgattggccgagttgacccaatcaacttggtcaacttttttaaaaaaattaattttttattcaaataattatttcttttatttatttatttattaaattaaacatatataatataacaattttaaggttttttatttttaattctttttattttttaattaatatatataaaatgtaataaaaaataaaaaatatatacataatatattaaatatgcgagttggcaaacgagttcgggttcatctcgaaactcgatactcctaagaactcaacctggaaactgcccgaagggtaccgggttgaacccgacccgtccgaacatttttttttgtttttttttttaaaaaaaaaaatgcaagttcaccggtttgagttcgggcgggttactctgattcaggtcgaacccgcttgaaatgttcagtcctagttgaaataccaaatcttctccacatctaatccaaaaaaaaaaacgagaaaggcaaaaagctaagagacacctcaagtaccaacgtggtatactgctattggtacattttaatatcaagtcctatacaaataaaataaataatatgaaactgattaccaattataaagtaacacatttgaatgaatgcaatgtggctacaattgctacctttgaatgaagtttaaaccattttgaaaaacaaatatgggtataggccaaaaggactaaaagaaatttccacaaagcaaaggaaaatatggaccatttggaataggcctttgaaatttccacttgaccaaaaagaaatgtggactgaagatttagactcactctgtgttgtgtatacatttgtccacatttcagatattttattttccattaagttcataaaagttatgaaatgatttagtacaatttaatattattaaattaagatgccacctcattcgccttgacaaattaccaagttttagatagtgaagaaaatcaaaaattgattgctaaaaaaataaatgccactatcaaatcaagacagaaaagccaaattaaaccttgattgcaaaaccagtatttaaccctatgggccatgaaatgaatcccagtcaaagtagaccaaagtcaataaattattattgttaagggtaacagttagtctatgaaaacaatactacgtttacactaaaaaaaaggtatgtggggacaattatataatttgcatttgcccaaaattagttaggatcatattcataagaccctaaaatattcaagaagctcaaggcctaagggccaaaaaaaaacaatcagaaaaacctgagtctgagttaagaattcgtgttggtatattttgtacaatcataaggtccaatttcttgattctgtttccgcttgacctgttgaataaaatacataattatacataaaatatatcaataaatatgtaaatgataatcacaaatgattttttaattaatggcttttttctcagatgttaaatatcaactataattttctccttagtcacatactcatacgatctagttatacataaggtaagattatatctcttataggctcagccaactaccatttaagatatattattccctgtttttacaaagaataatcaaaactaaaccaaggtgtataatgacttgaaaagaaagagaaggtcttaccaattatttctttaaactataatcctgaaagcctatcttacttatgattcagttttatttatttcttttgttatagcttaaaggtctgagtagagtcataccggagaccatggacctggttcgcgttgaggcttttcttctggtgaattttgaacagcaccacttttcatggttaaaatttcctgcagagatatatatggatacagtcaacaatttccaacttaaacaagtaactttaacgtaagataatttatgaataccaacaacaaaaaaaagaactaaagctgtcttacctctccagcagcttcaaatgcagctaaccattcatctgaaaatggagtcgcattcgggggaggttttataacaagaacatcctgttttttattaatgccagattctttgctgcaaccacagacacaacatttatgcttctcagaattttcatatttatacagttaaaaaagaaactctgtgtaaataacatggaataaacaaacaaaatgagcactgtagatacgtactgttcttctgtgacaccctcatcttgaggaacactagttgaggaaacttcttcaatttgattaactggattttgaagctcgtggttaccatcttgttcctcgatcatgtgattacctccctcagattccttaaacgtttgatctgcatctttaagcgaagataagctgaaacttccatcatgaagtgtgactctggtgttggactcattctccaatgtgtgaggctcatccacagagtgactatcgtcaaatgacgaggtaggaacctctgtactctctttttcatcgttgcatattactttggtttcaaagaggtaaggtgtgatctgcttagcttgatcaccctgatcattgtcatcattttcaccttctagcctatacatttgaaccatggaagaattttcatcacaaggacagagctcatctacaagttgtgagtcaaaattacagtgagaactttcagcagaaaaattgtttttaacttctacatcaacatgctgaactttatttttggatgaatattcactttcgacttgcactgcaaaacttggttcacatgtaacacagggattttctagttcactgtcagcaaggggtccaactttttgacaagtgacaataacatcctcatcaaccactgctcctgatagatcaccttcatccatattacccaaatctacataagtagattgatcacgaaacccaacttcatgctgagtatgggaattaagattacagttaacaaccactggtttgatgatgtcttccactaaaactgacggaccatcctctaaaatgtggcactgcacagatgcatctgcattagattcacagtctagcatagagtctggcatcgaagaagttctaggagttctcaactcagtttgagatgcatcagtaacttctgtttcatcagactgaagaacattttcctgctctaactcttcaggaaaaatgctttcttcacctgataaggaaccatctacctgcaaagtgtcttctctggtaaggagagactttggaaactctacaaattctggtatttcgattacattctcaataaccaccttgtgatcattatttggagaaatgcttatactgctgttgttgtttctatcgttctgttgcctgattgcataactccatcttcgacatttgattgcttctcagttcaccaatggcggtagaatcctcagttccataatctgtgagcctacgaggaggagaattttcaagttcagccgtatataatcttggacctttgaactgttatctgcagcattgtcccatggcatctgactatcactagaaattggataaggtccagcttgttccgcaaatggtttatccagctctttttcatgctcttcaatccaatgtgagaaaaagcaggagaattttcaattccagttgtattatagccttgaacctttgaagtgatatctgcagcattatcctgcagcatctgactatcactaacaatgggaagagctatatagtttaaggaattcaccatttcagtttgctttccatatggttcgacaatatcgcccttttgggatttaagctctgggaagacatcatgatcctctttttctagctcaatagacctaaaatgtggaaaaacatgagacttttccgtttcagccacatcatagtcctcaacatgtgaactaatgtctgctgcatcatcttgtagcatctggttgtcgctgaaaaatgggccactatgcattgtttcagtttgttcctcaaatgtttcattagcaggataattttcaattccagctgtattaaagccttggacctctgaagtgatatctgcagcattgtcctgcagcatctggctatcactaacaactggagaagccatacactttaaggaattcatcatttcagtttgttttccatatggttcgtcgatatcaccctttggggggttcaactttgggcagacatcatgatcctctttttctaactcaatagatctagaatgcggaaaattgtgagaattttcagcttcagccacatcatcatccccaacctgtgaactaatatccgctgcactatcctgtagcatctggttgttgttggaaaatgggccactttcaccagtaagagaatgcatcgtttcactttgttccccaaatggttcatcagctttgcacacagggttgacttgcaaaacgacaccatgatctttaagtgatgaatcaaagggtctctcttctacaagttggtggtcagaaatatcacttttaatagagggaccagtaacttcaattgcagagctagaacaggttttgagctgtggaatttccagttcactacttttttggctactgtctactacctttgtgtcaatttcatacttattcatctcagaggattctttcagtaagagattggtatcattcatctgcaattctgcatcttctatggaaaattttattgcagtgttaggtggtcctgcttttccaggacacagttcgtccacaccaacaaaaccatgtaactctttcagagttttaatacacttataactagtatcattgcattgctctatgttttccatctgcctattagtagcttgtgagtttgtttccacaactccatataaagcaggattagcagcagctaaaactggggatccagagcttgagcatgaggctttaccatttctcgcaagtgaaccgtccctaactgttccaagtaaacttctaggagcaagtggggccttagttcagaaactggatttggtgaagcaccaaatttcctcaaattagatatgttagactcgggaagattgcatggtggagaagtcatctttagtggactctgcatagggggaagttttgactgctacccgggaaaaaatgaagaaaaagaaatatcaagtcacactcataaagttcatttgtagtttgtaattctaatactaattgaattttatagaattaaattcaagtgactaacctgaccaaagaatccaatagatggagatggcatccgcaaacctgatggttttggtactgttgggagttgagtaggttgcgtgttataaccagtacagtaagtattttttgggagagaaattgcagttctggatcctccagtacgactatttgatccaagatcagcaggaagaagtgaagtgcggacggtcacatctaagtcattgttcgcttcagttttcaaaggatattgtaaactggtagagccttttactgagctagcctgcccaagaaaattgatggcaataaaagaaccttactctagtcaatttataatgaacccctaaaagaactgatgtccttcaactgctgaggtaactgctaagtaggatctaagctctagccttaacatattgcttattgaaaatataataaatcaaaataaaatgaaaaatcctcaccacatttcttttagcttgtccaagagaggtcttagtagttattgattttcctgcaggaccaacttttgaattgtttaatgcactcttgctctttgtattgcttgaggagcccttaagtgcagaaggtttctgaatatttactgctgtatgaaataccaaatttgaacataaaaaaccacattcaaatgagagagtagattatccctcaaaaataatgagggagtaaatgcattggagaataaaattcaaaacccacatttttatcaaaaattttaaatggtcataatatgagtacctggaaaagttgtttgattccgtttcgaattgcttgcaccaagtgtagaactctttgatgtcttaatggacgcacaaggatttgtctttggagctggtaatctagaaacttttgaatcctttgctgatgttttagttgtaatcaaatttgcaggcctcttcagagtataaataagtcaaggtcaagtgttaatacaaattcagtttaacactaagacaagcaacactctaaactatgaaacatattgttaaggatatgaagatgaagccacaggtcgtggacaatcacttctctttgatgcacttgtattgacatcatgggctgaaagcaccttccgtttagcctaatgatcatgacagaagaaagttaaaatcaccaccttttccccaattgaaatgtgtcaaactggaccattttgaaactaaccgccaaaggaggaccatttttcctaacaggtgaattattcttcggtaagaagctactgccaccatttttcctatattttcctgaagtagtgggaggcaaatccgtgaataaattttcttcaattgccctaagattcgatgaagcagcaccagcacagctagtgtcttcttcccggattgatgacaaagtttccccactaaatttgctaacatttccactaatgatagataactccacaggatcaagaacaccttacaacataaataaacaaacaatcaacttttcccctccaaataacaaaaatgaacaaatctaaacaataaaggacaaagtcattaccttgttcagtaaaaaaagcacggtcccaagctaagctcttgcgtaaattaaaagcacctccctttttcttccttttcatttgttgcggttcaagactaagtttcaatccttcttctttgttctctttatccctagagaatgaagaacgagccgtatcttcttctacaacaacaatcaaatcaaatcaaatcaaaccaaatagattatgaatgagaaactaatccttcaatgtctgcataattaaaacaaaaacaaaaaaccctaaccagtggaaatggggagttggagaggagaacagatgaaaaagggagaggcggtggtatgagagtgaagggaggtgtgttgttggagaagggaatcgtcttcggctgcgatttcgagaagcgagagatctgagtcgattggcattgtcttcttcttcttcttgttctctcatgtaataatctgtatgtactgtaatgaaagtgtttatatagtgattagattttgaaagagtagagagcgggaatactaagaaatggagaatcggaatctgatctaatctaatctaatcgattattctcatcattgaattgtatttgtattaataaattacaaagacgagaattggtcacgtgctttgcttaccatctaactatactctagaattattacatacaaaatttatatattttggtggcgttttgtaacacttttttaatcagttttctatttttaaaagtagaaaagtcaaaatatttttcaaaaacata

SEQ ID NO: 379766 - DNA, 2193 bp, Cannabis indica
acaaacaaacaaacaaacagaaacaacgaagattaaaataaacatatagcttagtgatactacacttcctttcagatatccagaatatcgaaattcatattaaaaaaaacatggcggggctcacctccatcatatttcggacccaaaaacggcggtacatagcattgacaccgatgacggtcttggttggatggtgtctaactcggtggagaagccaacaatggtaaagaaccatagccaagagtcccaatggtattaacaaataatcaataacccttttctccatttttcttaattttatcttctcttaacaaaagtaatgaagaaaaagttctataaatatgtatgtatagtagaattgagttaaaacttatataacaagataagagaaagaaaagcaagctaattaagctatatgggattttgctttggaagagagacaatatatttacgcgtatatataaagaaaagtggcttagatattcttcttaatcatcacatatacgtacgtgtacggccttaatttcttttgttattatctatataaatattattattattattaaaaccctagcaaggcaccaccgttgttgacggcgtcatctttgggttttatcaattaaggctggcatcttcttcaatgtcaaaccatgatttattaaataaagaaaacatgtacatatatatatatatataaatatttataatgaaaaattaattgttaggtggtgaatatatctatgaataagttacatctttatttttgttttcatgtgatgatggtacatgtgtaatataattataaggaacctttaattttatgaattttttagatagttgcatgcattcatatttatttttgatatatttttttacgtgtgtgtaacaagttgttaatatttaacttcttaaatttgtaaaaattctcttattactatacattgtaaaaaaaatgatattatatatatatatatataaaatacctaattactataatttatacatttagaaataaatgtacatgaatttttttggtgagagagtacagaattttgagaaatgctaaagggtaccagtggtgcctagtacttgcctatgtgtcaatattgctattggtccaattaagtatcgggtctcatataatttaatataatagcttttaggaagtatcgctagccaatcgtaacgtgacatgtcgagaaggtgctaggtaccactggtgccttatagcaatgctctaaaattttagtgtagcaaatataaatatttatgtgtgtgtgagcactaattatattaattgctctctctctctaatctctctcctttgaaaagtttcacaacgtacggtacacgatgcccttttgatcagagagatttcgtatcaataagtataagtgtttataaatttcaaaaacaaacaaaagaagaaaagtatataagtgaatgtgcttggaatatcattccaattttatttgatattattttaatgaagagtaagatattattaaaattataaaatcttatattaatggctaggtgagctgtatgatcatgaaaaggagtgtcaagcatataagtttgactgcaattttctccacatagtggttgagttccttacatcacatggggtgtacggtacttgaataatgagtttcatatatataatgtgctttattattttaattacaagttctatctcaagctaggtcatcaattcataacaaatgtattgtgaaaattaattaattaattaattaattgttgttagttgagtcgtaaaagcaaattagaacctgcctagttctttggaaagtcgtacggaaaataggtttcatatatttgatatgatataatatgactctaaactaacacgaaataaaaatgtttggatttattttaggaattatttcacaaaaatataaaaacaacaaaaaaattacaaaaatatagtttcacggaattttaaatatttttacgatattttttattttatttacagaaaatacggtctttttatgttgtaatcttgttaatttgttgttgatttttttgttatcctgtatgttattttttattgttattttgatgttacttttatgtagttttcttgttgattttatgttgttttcgtgttattttttgaaaaaccgtaaaaatataaaaaaaaaacattctttgaacgtaaaattgtaa

SEQ ID NO: 379767 - DNA, 4335 bp, Cannabis indica
catgtcatactatgcaatgcaagtactgccattgtatcataaactaggaaccagggacatggaatttcaatctcttcaagcataatatttacggctacgcctctttggctgaccgtacactaacaagagtagagcgtaacatagagtgaaatggtacccccccccacccaccccccccccaaaaaaaaaaacttgaattttaaaagcccaagattttcaatagcgttgcttaaaagttacaccgatatttatggctagattaaagagcgtccgtggaaatcaaggtcatagaaatgcagaaataatttaatactggtacatcaacatgtgcagaatgtacaacatcaatgttaatcgaaagctgcatctcccaacaatttttttctttcttttatcgtacatgtatcgttgtacaaaaacgacaggaaagatgggcctcttctggctgagtggcctcttttgtttttccaaaaggctacttgggctcccagaagattatatctccttgctccccacaaagccccagatccttgagcctcctctcttgataatattccaattcattaagctccaactctctctctttgaacatgccatcaatttgctgcagcacctttttctccccttgtcttattccaacagctatctcaagcctcgactccagtttttctccttttaacttctcgtcctgcataccaaacatcacgtcattgggaattaactaaaacatgaaacacaaacactgaggaaaagcctaattgtgaaaaatagttataaaattttgttttttaagattacctcatcaatggtggtgttataaccagagagagcagatttgcaggcttgtcgtaccactcggcatatgagctcttcattggcatggcttataggatactccagatgccccaaaatagagtttctgaagatggtttccaagagaaaagcatcggtacctccaagtgctaccaatctcaaatatggaagcattgcaggaggaagtggacggttcaaaaaaatgtcaaaataagcagtttcactccaaccatttgcctcggcaatgtctagcttgtcaccataaaaagggtccgactcggatatctctagtgtcagcgtatacgcattgcgttctaccaagggatcaatgaatccgtagtccagggccaactcagcattgctcttgtttatgtcatattgtataacaacctagtattgcaagtcgtcaaaagagttcgataaacacccacataacaaaatcacattcttgtatacaagtcaaggacatttcttttttcgtttaatggttagcttgcttgtaaaaaaccattcatgagtacattccatactagatattggtaagcagaatgatattacttttctgaggcagcaaaaagagaggtcatcgaccttagctcaatttaacagaagaagaaatttgtacctgctcaccagccttgactggaattgggctacgtagagagaacaaataatcccatgaaaaaaggcctgctggtcctttgacctcccatgcatgctcctcagaggttactttgtggctgtggttgatctgattgattaagtcggaatcaaacaaaattagcttcttatcttagttgaagaaaattaacagatttcaaaatgttttaaacatggatatgtgagactgactgacactcatttagtcaagttgtatgtattgaaaaaccaagatgtaattgttgatacaaaagatcttacaaagtctacaagagggatcaaaacaagattttgtgcacgcatgcgtgaaaatgcccttgatctgagaataccgaatgcccaaaagaaatcatctattgtgatgggagaaggaaaaagcttcttgttagggagaataacttcttcttctagtttcttaaactcgctcacaacatactcttttactcccaatgttgtgctcaaaagttgggtgcctgcaaacgcatgcaaaacttatatgaccattatcctccaaaataatggtgtgtgaaattcaaccactgatcaaaagtaagaaaattagaacctaattcaaaaaaaaaaaaaaaaatggaaataagaaccaaaatttgaaagaaaacaacaattatttacaaaataacctcaagggtccttgagggtggctctagcctctaggttgcttagtacaaaataagtgtacactttcatcctgttagtttagcaaattattttatcaaaaaagaaattaagtgagaaaatattaaaagaaagaaaaatactgtacatatgtatattctcatttttgagtaaggcttcagtacatctcctaaagagtggcatatagatgaattttttaatcaaataaatttttgtatgatcgatatagttatttaaaattatttgtaaattttcaaaaaattttaagtagtttacaatataaaaataaaatttacatatttattgcaactattttttcttattcacgccttgttgtaaatagcttcatatccatcatgaacaaaattggactacagggagtctatcagagtgtagtagagaaatttccctcatttttaatataaaagtttgcttaagtatatttagttttttaatacattatattatgttctaaatcttccatcgttgaagttggaaaaggaacagggaatttccaagaattagttagcgttagtaaattttttgaccaattagtaatgagcaagaaaagaaaaattgaaggtaaaaatataagtagtataagatgatagtggctaaaaatcaaccttgaagttcagaaagctcctcttctgacctgctctggaaccatgaaaattagcacttatcaactcaaccattaccaagcacatactcaaatcaacaaataaatacaaattaacccatcaaaaataatcggccaaacaaatttaaacccaccaaaatacagtcgaatttgtttgttttggaagaatgtcgaagtaaagtctccaaagcgagtcgtccctgaacttctctctgagcaaaaatagagcaacggcaatccaaggcttcaacccattacacacgttcccaatctcagaagccgaaacagtatctgggtttatccacaacctcttcggaatctctaaaacgacctcgtttcgagcaatgtctctctgggcaatcaatcctagtccttctggtacgacgccaggcctcgccggagtcttatttgagattacgccttcgtcccggagccacttccagaaggtgtggacttcgggtgaaagagatgggtccaattccgtagactggagagatttgattgaaagggctttcttaaggtgaagatttggacccctgggtaaggcatagaggtgcgtcagagttgttcttggagggaacagaaatgttgaagatgaggaagataagcctgagagacttgccatttttgattgtgtatgtgatttagtgagcttcgttttgagttaggccattgcagtttcagtgagagcaaaggtgtaaaattaaatgataaaagatcacttcttttcgtggataggatttttatttacaagccaaatttgagtatttatacttcctactccctaataacaaacacaaaccattctttttgaggaaaaaaaaaaacacttaattagagggaatatatatttttctactacttaattagtatatatttggtagaaaatttagttctgatacatagaaattaatttttgtaattctaatttcaaaatcacacttaaataaaagttaaattaaaataaacgaatcaaaaacaaaaaatcactaaacacattaaaccagaaaattataacatagatgaatctaaatggctatcaaacccagttaagttagttaaagaataactaactaatcgaatgattattggggtttaaagaataataccacaaattctaccttatttcttcaaaccctaacaagctaaacatatttgtccaacggaggtggtactactttcatgtgtagctacttagcaactaaggttgagtaagtccaagcaatgcttgaacttactaataggtaacaccttagtgccattatcagtagggttctcttcttttctccagctcgattacttcttcttcttcttggattatattttaccaggacttatatttactaacaagtatgtttttaatatcctaaatataaacttctaaaacgatgaaaaataaatacatataaagtatgagaaaccttacattggttgtagcggaattaaatgactcctttcgctcagatctctaacctttgttcctttcttttgtagagtataatcaagatctgagcccgacactccttcagctgtttggattcttcacagtcttacacactatg

SEQ ID NO: 379768 - DNA, 2449 bp, Cannabis indica
tttataatccaaaaacttctatacctaattagaaatgagcacatacatcataaatatgtaaaaaaaaaattactatacaataacttgataaattttcatttttcaatcaattatatttattcaaatagagaattatcattttaaaaagtgatacatattttgttccacatattattatgttcattgttaaaaaaaaacattaaaaattacaaataattatatattatgtaccttggataatcttcctccataattagtttgggggctttaacgttgttgaactcaagccacatattggttttcaacatcttcaacacaaagtaccacaaaacaccaaatgaagtaagcacaacactcaaaaagtaaacagctggagtagctgcacacaacacaaacaatagaaaaatacaaggaattgaacacattcctatcaacccattaagctctattggaatcttgaaaggcctaacagctttgggaaatttcactctcaagtaaataaaggcaccaaattccatcaatgtccccaaactataaaagaaattcacacaaaccctcatgttctcaaacctaaaagccgcaaccataagggatatgattgtggaaaccataatcccaacccatggggtatcaaatgtgcccgagcgggccccgaaaaacttcggtaaaagccctagctctgccatcccgtggagctggtaggagcagctacttagctgggcttggtagagaccaagcccagataagactgcacctgatttgatcaaacgtttaagccatgggcccgcgagctcttcccctatggcggcgtagtagccgtctttccaatcatcagggtcgggtttcatggcaccggtagtggctagaagtgggactaagtaagctagtgaagttagccccatggatgataatagagcttttggtagggtttcttcaggtgtttttatctcaccaactaaagtactaacactatcccaacaatttaggttccaaaaaagggcatgaaagtaatttttccactctttattccttccaagtgtgttactctcattccaaatgacaatccatctacccggatcaatttggggaattgctacaaatgacaatactaaaaatggtaaaagggataagccagctagtggtattgagatgtggccaacaacatgtaagccagtgaaatttattaaagagagaattgttgttgagaagaaaacaacagagtatcgagttagggttttggttaggtttagagaaggagcaatggagtctacatagtctacacaaagacccgggaacaaagctaggtttacaactccactaaggaatttccatgaccccattaggtaaccccaaaagggaccaaaggctgtgtgggaccacacaacaaaaccaccattgttgggaaaggcagtggccaactctgcagtgatgagtgcctctgggatagaccatagggcggggaataagatgaaaccggctatagcacagagtggccccgccgctcccacgatagattcttggccgtatggccctccggagacttggaagtagatgaggaaaatgagagggagtaaaggaagtcttttgcttattttttttttcttcacattttgatcatgagtaggctcttcacgatatttttgtgtttgtttctcaagaaaatcttgtgagtttggagatgaaaaaagagggtcttgcatgattggtaggtttgattgatttgattattgtgtttttttggctaactttttttataattgtttactaaagtttacactatataaggctatttctataggtatgagagctattgttttagtctccaaataatgtcttgagttttgtcttgttattatttcttttgagtttaatggtctttctaggaagttgcttgttgattgaaactattttgtcgtttgataaatgattttgttctctattaattagtcataaattatacatatttcgtacaaatgtatagtaaataacaattattggtgtaaaggaggttcattcatttattttaataaaaaataataattacatgtaaattaatttatcatttggtcttatactaattaatctatttttttcttttctatttaagcgtttaaaaaatgaaaaataccactcttgtataattgatattttgaatttttacttattattaaaaaattatttgggtcccttaacatagtgtacttaagtgtagaaatgggtcacttatatagatatacttccttttaggaaatttcattgagcaacattttgtgggttgcgtgatgagagatatatgtattattatgaatttgtatattaagttggtatatatctaaaaacagtaacatatggtaggtttcttgtaaagttttttctaaaagagctacgagaatttgatagtttttatattttgggataaatacataaaatattaatttttataaatttt

SEQ ID NO: 379769 - DNA, 4568 bp, Cannabis indica
gattgtgttattgacaataatataaaatttgtttagaggatttattataaatagaaaagtttaatggttttagtttttctaaaatattttggttgtgttgttgataatgttttgaatatatttgtttttttttggaggatttattaacttttgaagctatactttctggaaagaaaaaagaagaaaacctttttttaccagaatcccatgattacacagtttttatgttgataattatttatgacatatattattgtttcaaattcctatctggtttgtaaatattatgttttaccttttcagcctgatagtatccgtgttatgggtgacaaagcaacagcaagagagacaatgaagaaagcaggtgttccaactgtaccaggtagtgatggattgcttcaggtatcctagttgactctagctctcaaattttaaatttccttttatccacctagctattatgaagtttgtaatagtcatttggttatattgtgcattgtattgccataacagaacacggaggaagcaattaggctagcccatgagattggttttcctgtgatgatcaaggtataaatcctctacagcatctgttgaaatcctaaagataaccttccatcatgttgaagcattaaactggaatttatatgtaagctgccttataccccatgtgaactgacaataattttatgtctccaaggcaacagcaggtggtggaggccgtggcatgcgtcttgctaaagaacctgaagagtttgttaagttgttacaggtatattcttgaagtggtctttgccttttctttagtgctttagtaccattcgcacatgtatctcaagattctataactaacaatagcacagatcttgtagacatctctagttatcatgtgcattttctagagttaactgtcaagagattgaatggtaggggcctgacatgtggatttaagctttaataagatatgacactggtaatgatagcccattctctatcacctaattaattgtgtatgtgtagggatgtaaataccaaaaggtcactcttgttgaagatttgtgctcaatttgagtttttttttttttttaaattgttctcagcaagctaagagtgaggctgcagctgcttttggaaatgatggagtttatttggaaaagtacattcaaaatccaaggcatattgaatttcaggtaatactcaatgaaagcctagtgattgataacacaaacacaagtaaatatgcattgcatttgttcgtatttttgaaatctaaaagtctggttctttaagataagttccttttaagtattacagaaagagagtgcttaaaatgaccattcttgaggactgccataggaaaaaacattctggttaaatgttacttttaggaagaaaattttcaagcatttcataaatttgatctcaattcagacgtggttgataagttggattgatgcatggaactgtgaagtatcaagatattagttctttttagatgattcacaatgtctagggaaacagggattggaacggttcatgcaataatgctgagttgttttgttaagtataataactgtaatgtttaattattcttgttgtttcttatatggtatttacattttaagctgttgagtgtcatttaggtacatttctatatagctattcattgcatctcattttggatttgctaagttaatgcctattttttcaattggtacttcaggttcttgcagataaatatggtaatgttgttcactttggagaacgtgattgcagtatccaggtactattaacaaatctcatggcttattaccttttttcatgagaagattcaattattagttatcaagataaaacttgctcaattctagcttttagttaaccttgataagttataagttgctatactagatttctactttcagtcatgtaccctgttagctcataaaggaaaatccatggcctagtgaaggtgtaaggctaggttgacactgttttgttattgtattcattgttaggctgtcgtaatggcatttcaatattaattatctgtactgctttgtaatgtgaagtaaccctctccaaattagagtaaattttgtagacatttgattatactttctcgtagtgcgacttgtttgtaaaattcttaacgtgagtgacaaatttgttgtgcatgtttgtttgtatagaggcggaatcaaaaacttttggaagaagcaccctctcctgcattgaccccagagttgaggaaggccatgggtgatgcagcagttgctgctgcagcatctattggctatatcggcgtgggaaccgtggagtttcttttggatgaaagaggttccttctatttcatggaaatgaacactcgaattcaggttagaatgattttttgaggaagtgggtatcaatctaagaaatgcataagaagttaaatgctttactgtgaatataaatatattttcatttctttctttctcgggtgctggttgatggatgattttaaatgtaggttgagcatccagtaacagaaatgatctcctctgttgacttaattgaggaacaaattcgtgtagctatgggtgaaaaactccgatacacacaggtaattgatgagtgatttttaagataagcttctgttaaaaaaaataaatcattcaaatggctgatctgatgcgggtttattttattaacaggatgaaattgtgctcagaggacattcgattgagtgccgtatcaatgctgaagatgctttcaaaggattccgacctggaccaggtgtgttttaatggtgtgcctgaggaccagcaatccttggttgcttgcaattgaaaattaattgctctcaccaatttgtttttgcaaggatcacatgttttaaagattacctcacactttttccttctttcagttctcatatttttttcaagttactgatacattcattaaataatgttatcatacatttgtttttcttgttcaggaagaataacagcatacctgccatctggagggccatttgttcgtatggatagccatgtttaccctgattatgtggttcctccgagctatgactcccttcttggaaaggcatgtcaaatcttaccaggaaatgttttttcagttggaatcattgtagattggaaaataactgctttgcctatgcattgtattctttgtcaaatattttttcagtattttcacgaagatctaaaatttgctatgggatttatccaattagggccaattacttttgtattgctttaccagacaaggcacgttgattcatagtgattctaattactgtctggtgtaaatgcagctcatagtatgggcaccaacaagagaaaaggcaatcgaacgcatgaagagggctcttaatgacaccattattacaggtactaattgagtttccttatttcattataacaattctgaatttctgatagttatcttggtgggattttgctatattaagtgtgttgagttacttatttaaacatatttgaaattcacaggggttccaacaaccatagaataccacaaacttattctcgacatagaggtatacgaaagctcttgtcattttttctcttattatcaatgctttaactttaatgaaacattgtccaactgctacacctctaattttgtctcatgcggagttttatgtttctttctttcattgcaggatttcaaaaatggcaaggttgatacagcttttataccaaaacacgaacaagagctagcagaggtaagtgataatatacaatgcaaaattacattttacctcttaaatgtaaaatttgtgtactctgcataggattgaaaaatttagatcagtgtgtgttggggacttttaatgaaatgtatatatgcagagtagggcaatgttccaaagttgtcatactacagggattaagtgaaagctttcattttatttgtttatgaaattgtttcgttggaaagtactaatttacaagtgtttggtgtggtgacagccccagaaaatggtgcgtgcatctccagtgtaagaagttaacgattgggatgcatagatagctctgagattgtactgcataactcaggtccactgttaggccatccctgatcgtggaaaccagcaaccggcacaaaatttagttagctccattaaatgtttccttgtaatttatttgtcatcatttgaagaagaataaaagcacttctgttaaaactcaagtagttcaagtttttaacaattttgataatggtatggttgtggaattctcctctctccaaatggatttgttttaattataactgtttctagtcaaggtatgatgtggaagtttatctgaacctaataaatgtgtgacgcgatatatttattaccataaaaaacatcaatcagatttttttttctttaaatttaggaacaaaccaaatcagatttggtaaaacctctctacgatttcatctctcttcaattgtgcgacctcatctttctctctttctctctccattatagatgtaaattgtgtgttgtgctggttcgacttatattttgaaaaacttgcaataatatg

SEQ ID NO: 379770 - DNA, 1741 bp, Cannabis indica
tagtgttcaagtcaaggagtttataagcttttcatccctgtagagtaatccccaaaaaaaatgacatggtgctgacctaggagagaactttgatattttgactcaatgtagatgcatatgctagacagccgaatgcctttagatgctcatatgttagtggtttattgtgaagatatcaaaggtattttgttctttagattaggtgttggtgctctattaatcaagtatgttgcagtagcaacacactctccccaataaaccaaaggtatgtaagattgaaataagagggctctagcagcattgagtaagtgctggtgttttctttccacaacagaattctgttgtggtctttggacacaagagtggtagtgtatgatccctagttcattaagaaattcattaaactgtagctctttggcattatttgacctaagagccttaacaataatattaaactggtttttaatcaattttatgaactgtgggataacaatttgagcatcagatttttgtttaatgaggtgaatccaagtatatctagagcaatcatcaactatagtaataaaatacttatatccctctgcggttaaagtattaagaggtccctaaatgtcaacatgaatgagatcaaaacatttcttagcaatgttatgattagaaatgaatggtaactttttttgtttggcataatgacaaatggagcaatgaaacaaagaatttgaatttgaatgaaatttcaaagctttatttagaggatgagtttttacacaagaagtatggccaagcctatagtgccaaacagtttcactagtgattttagaatctgaaattgaggaaaaaacagaagaaacatgattgctcttggtttgatcatcgtttagatagtatagatggccaacttttctacccatcgcaatcatcttgctcttcatattgtcttgaatgacacatttttcattagtaaacatgaatgtgcaattagttcttgctgtcaaagaattaacagaaagtaaattgcacttaattgaaggcacatgtagcacattttcaagaatcaaatcaggactcacaacaattgatccaccacaattaattttagcttgtaaactaataggtagaataacagattaaaagttggatcattgtaagtgtttttaaacaaattaagattaggacatacatgatgtgtggctcctgtgtctatagtccaaatggaggaatggacaagaaaatccttaccagaaaaatgggagacaatggattggttatcaccagaatttgagattaaactttcttctaccttttgagcaagtaaagtcattagcctttggcattgagagctagacaaactagacaccaagtccttttcaggagcattatactcaaatttttcttcttcttctccagcagccaaatcagcagaagcaccttttaatggaggacctttggcatttctattagtaaaccttccatgaagtttgtgtgcaggaggatagccaatgattctaaagcatctatcaattgtatgccctgtcattccacaattagtgcaactatatttaggtttaaaggacattaccagcaaactgttctgaagtgtgttacgaaaattataaatactacgcaagtatacgcaatcaagtagtagctcacacaagtgaggtcgaaccacaaggaattggatttattactactaaactatacctataattctatttggcaaatcaaaagtatttatgat

SEQ ID NO: 379771 - DNA, 4084 bp, Cannabis indica
taactagttacttgaagtctgggccagtctttctccccataaaagtcctgaactttctttctttttttaacattttaaggtacaggagttgttgaagggatattataaaattatattaggcattacccacccactcattttttttattgttttacaagtgatcaggccagtatccaacttagtaagagtgtaagacagttaggtattaattacacggatcattataattgaaaatatgaaatagctaaaaaaacaaaacaatcacatagcaaaagaaaatccaatttcatttttctaccactaacttacatactaataagacatgaaatttacttcaataagcataaatatatggtacctgagcactagcattgtgagtgtcctgttcataaagtttcaacaagtccatagttgataagccacatggaacggtttgtgagtaaaccttctgatcaatggtagctgtgtcctcatactggataatgttattaaaacttttcttgcacaaagggcatgtagatatctttcttcttaaagcctacatgcaacaccacaaaactttgagcacataacattaagaaaacgaagtagtacaccttgacagtcctaaagctctacaactcatgcacacacagacatcaacttttcatgattatctatatttggtttactttaacaattcagaaaatctacagtagctaacatatttttacttcattgcggaaaggaaaggaacaaagggctgtttctcagactaacacaatcaaaggttaggctgcaattttattttttaaattacaattataagccatgacaatcaatactaattgatagtaacattatatattacaaacataaaataacattcaagttgacttagaagaggaaaaggccagaatgcataccatatgatcagcccattctttgatgcatgaataacagaatcggtgaccacaatgcagaactcctcgagttgagctgtaatctgcccaacatataacacacgataactccatcgaagaatcaatttcagaattctgagtaatctcaatcccttttgctgggtcctcatctgacttatctacacccgaacatccatcttctgaagtcctttgtgcagtacttgcattctcagcatgcacatttgaatccattgaagcatttatacaaataggaccatcaactacagctttagaatcatcaactctagttttcctatggttagaaaatccctcaccagatattcttccgtcttctaacacattgtcatgtgtttctccatttacatgatgaaacagagttgagacatcttcgtaatttgagttgttgactctgacaggactgcagtcttcactagagtctgaagagcaaaggtccacagtatctttgtttttcatctttttaaagagcctccttcctttacgtgaggtttcagccttatttctttcgttaccaatggaacactttcttttacctctcaccaattctatagacgaatgagaacttgactctacatagtttttttgagaacgagaaagaggtttatttcttccattaccattggagctctttcttttacctctcaccaaatccattgaagaatcagaacttgactccgcatgcttttcaaaagaacaaaaatgataaaacgaattgtcacactttgaatatttctcacaaatatgagtgctaaccaggaaggaataaaatattaacagcaaaatgaaacctctcaaaatctaatttttagggatttaatattcagaacggaaattttcgtttcacttaattatacctctattggaataaccattacaacaatcccaaagaaacatatattacttccaactaaaacaaattctcaacatgttcaagtgcaccggctaacaataactacgaacattgagaaaaaaaaggaataaaatcaaagatttcaaatactccttttgcttcgtcagagattcagaacacaaaagtcacaaaatgcagctgaaagtaagggcttgagtacatgaaaactcaaaagaattggcagagaattaataaagttgtttgataactcaacttatgtacagaaaaaattacctggtttctaagtaatccagatgaaggagattcttgaatagagcatctgctacttgaaggcaaatttttcccaaaatggcttctaacaggtttatgctttgacttcttctgagaagtgctgagattattcatatcaggaaacacattctgtaaaagagagagttgaaagggaaaaacaaaaacagaacagaattcttaaaactccaaacagcccccaaattttacactattgtataactataagacaaaccattttcttaacaccaaagataaatagcttcatatatcaaattactatcataattcatgtttaagcgcccccataaaaatacatttacattaaaaatgaaacaagcgtcactgaacaaaatatggtgagaaaaggacccttgataaaacgataagcgtgaaagatttagtagagtaacctcattcattaaagaagaagttttccgaacaggattcccagaaattccaagggctgtatcgccactttgttttagaaagccatcacgagtatttgattcgtgagaaagcaatttgcgttttttatttttcttgaagacaccaacttcagcaacacgtggaacttccatcgttaagggcccaacttcttgcccactgtgtagaattaaaaatccccacggggaaaatctcagtttcatttgtaggtgaaaagtgaaaagaaacgcaaattatctcatagctcattaagaaatacaaaaaccatttgataatacctttgaagagtataaggctcctccggaagacgttttccttgctttatgcaatcctcgacccatcgatggttgactattatcgtattgaaactcttagcaagatcaaatctccttcctcaaatttccagcaaacctaattcccaaattttcaatgccgacattaaaaaaaaaaaaaaaaaggttctttaagcagtatcccgaaatgggttatgaaataatagaagggaaggagaagaaaaaggctcaccagatgagttattgattctgacactcgacccacgcgatgggcaccggcatgaagtatgagcctaacgaggtttaaacgctgggttccatggtacccactaacggtcgcaatcacagaatccatcctccactagaacacactgttgatttcgcaacgacggcctctcagtcccaaaagctacagaagaaaaacgagaaggaatttcaggaaatcagaacaaagtgtcggtggaataagaaagtctgtgtgaatgacagtccacagaccaagccttgctctggttcacaaaagaaactgagggaaagaggatagaagaggaagaagatgatagtccagagaaatttcttctcccgccatagacgaagacgataaagatgaatttggaaatcaaattgccgggaagcaaaaattttgaatcctgttttatgagacgtcttggaccggttctacaataggcccagagtcagtctccaacccaaagcccaaagtttgaagagaataccattttattttgggataattagataaatattgtaataagaaacctagtttacatatatggtaaaatttaataagaaaaaatatggtatttaaaataaaaaatttaacatatatgggatatgttattgggtgattctacaatgcacccccttaaaagggatgtactgatgcacccttaagttgtttcggcatccagaagaattttttagactaatttttttttcatattcatgtacgttataactatataagatatcctacaaaattttgagaaattcggaataatttacaatattggaaacaatgatcaaacagtctattttacacgcgtataaaataaaatagtcacgcgtgcaacacactgtttgaacatagttttcggcgtgttaaactttttcaaatttcttaaaattttacaggatgtcttaaataactataacgtatatgaccatgagaaaaaatttgactaaaaaattatttcggatactaaaacagataggagtgcatcaat

SEQ ID NO: 379772 - DNA, 5366 bp, Cannabis indica
ctctctctctctctctttaaatttggtgtaattataatacgtgctcgagatttatgttagggctttatttggcacgatgtataagggtgatattgtattaaataataaataacactatgttcagataaaataatgtattgttttaattattatagccaaaattattaatacaatataaattgtattatttaatacataacaaatggtatgcattagcttgtattataaaatttttaaagaattcggggtcaacctcattctcctactcggatctagggacccagaccaggacccgggccggactagacctaggactcggacctagacccacaactagaaccagactcgaaatcaaacccgaacccacacccagacccgaaatcgagattggactcaggacccagaactcgtgaccgaacccacacttagacctgggacaagacccagacccgaaccctagacctagacacagaacaaatactgaccggaccagatctgggacccaaaacttagacctggactaggactcaaacccggacccgagacccaaacccaaacttagacccggacccgactcgtagtcagtgttggggttgagtttattgaaaatatattataaatttacacaatctattaatacaagttaatacgaaatatagtactgtattaaataatactaatacaacacaagacagtgtaccaaacgagcccttagggtattattttaaattttgaattatgaaatttacattaaaattacatttacatttggtttaattgcaccaatttatttttttgaaacaaattatacaaatcttttgcttggcatttttcagcgccagcaaaaggtaaatttttttttaaaaaaaaaaacatgtattgtcagtgcagtttgatgtgccgacaatactattttgtgtatatcctcatttgtaggaaaattttgccaatgttccagcataacattctcgcgagtaatccagcttcacatgaaagttttgtcgacacattatattgctggaaaaactttctcgatgaggctcaactggcaagtaaatgtcgacgacacatatttcattgctgactctatacgctggtgaaagcaacctatgtcgacgaaggtttattttgcaacgacaaaactactttccttgacaaataagcgtcgacaactttcaccgacagagttcttcgctggtaaaaatttgtcgacacatttagtagatttttgccggtgcaattcctgatacaaaattatgctgacaaaagtctattttctcatagtgtgaatcagttacttttgcatataaattaatatctgattagtataagtacgaattttaaattttttaatctaatcgaatttatataaaaatattaatactttttaattagattagattggattgagtttttttataaacacccttacatacgacctatcgaatgcttgcttgtgtttctctatagccattggaaattagactttaattatagtctccatataaataaataaaatcataaaagtagagaagagatacttgggtatgtttgccattggatttaaccaagtgtcattcttttaagatttatattgatatcaataacatcctttaaaatcttaaattattaaccatttcttggtcaaaaaaggtcaaacaccggtcaaagataagataagctaagcacattctgcttctgactacaccttcaacatggttttcttttaataaatattttattttatacatggtaggttccttctacaccaagagaggtgctcccaaacaaaatgatgaaaggaccatatgcaattgtactagctagcctgcattaattttttctcctttctataaaatgaatactctaaattttatatgaaaaaggaggtagaaagtaaattgaaaaaataaagcaggcactattaaacaaagagaaacaaaagatcaatcaaaacagtccaaaagctttatggttttagtataaagcaaagatattagtagaaaaactaatataagtttcaagattccccttctaatgcaatcaacacatcaaatgaaaaaacatctgtatagctcaaactcttcaactatttcattgaaaagcaactaatcagattttgcaaagggaaaagaaaaagacagatggattcttttttaactattaacgaagttgtcatttggcatattaactttcttttcttttttttctttctattttcaacattaaatttcttctttacacatcataattgatgtgttcatttttagaagcgaccctacagaacattcaagcatactcacaacactatgagaaaaattattaacaccgaacccaacaaaagcttcgaaaatggggtaacataaattgactaagtttcatactttggtgtattaaattaaaataataccaagttctagtcatcatttaaaaaaactataacttatgactactggtagaatggtttaaaataataccaagttctagacatcaatttttttttttttttgctagacatcatttagaaaaactaaaatttattgctactagtagtacctaaaactaaccctacaatgtgtcattaataaccaaaaaccaatatttactttacacgttagatagaaagaaagagatgggccacaacacaactaagcattacaaggctagttacttttttctataaaccatcctcaaaagattaaaaagcactaattaaagctaagcacaaataccaactaataaaagtaacctcaaaaactacccatagttcaaactacttttactttctttttctttcacattttttatatctacacaataacattacaaaattatcccccacaacccaaacgagcttacacaagtagtataagtttgccacatatataaagggttaacatggtaattttctcctcttcaacattacaacattacatgactgaacagccgtttggattctcatcactgaataactcgaacgaatccggcggctgaggtgaatacgagtccgaatcgtagggcggagattccgtctcgattagttcgggccttggtgcatatacgtatgagaagtagggataataggccgcactatagctactagtaggctgcgtagtactgtagctcagcccatgtaccggggctccacgctcatggtagtaataatgggactggtgctgagggtactgatactcctgatgacgtggtgggctgtaattggctgaaaccggaatcggacctgggccttggatatgagtagtaacatgataaggaatatgtgatccagtaagtgccggtgcagcattacttgcgtgttgttcaacctcactaattccaacgttattaccattttgccccttctttttcttctttttaccaccaccaccgctagtgccagcaacagcagcaacattaccattagcattgctactttcggccggagcctcatgttcaccaccgctctttttctccggcaccggtgatggactacacgtatgtacggtcacagtttgtttgtgctgatcaggcttaaactctttgacctgtccacttgcaccggtttttcccggtgaactgccttcactaataacatgagtagtacatgcatctgtagttttggcagaagagtcttgtacgacttcaactttgacagtctgattttccttgtcgccgccctggttgttttcctcagagctttcttggtcatcttttgctactgttactacctctttgtttttacccttgccttgtttttccctttggagtcggcttttggatcaggccaaagctctgcatgtttccctgtttttaccaacttcttaatcagagtttgagagtctacgtttccagtcactgtgaccttttgctgctttaaatcaatatctgtcttataaacccctgtaaaacccataaaagaatcacaccctaggttttgagaaacataatagaaattgatatacgtacgagtcttaattaagctagatgatcatgaaataagaatatgtaaaaactcagctttgaaactctgaaagctaagttgatgctagaaatgagaactgaaaataatgaagtttagagatgttacataaattatataagaggtgaaagaactgaacacagaggattaaattgaaggaacaaaacatccttgcatgaaaagtaaaaaaattcttcattacaacttaccatcgatgttttgtaagattttcttgactttctttttgcagccttcacaatggatggagactttcaacacccatgtctgaaaaaacaagaaaaaaaaaaaaaaaaaagtacacaaatggaaaattttgagaggaaacatgtagaaaagactcttgtgtttatggtatgtgcattaaaaaagataataatttttatgattgataccttatacttgagaggttctgaatgtttttcaacttctttagcttctggtttaatttctggtttaacctcagctgttttagtctctgttgttgccattgataggaaaagaaaggagagagtagctactccaaaagagaaaacagagatcaatgagtgagtaagctggaaatgcttctttgatgaaacccttttaatagagagatagacagagaaaatcaagtggggtccataaaaattggtggtgtgtggtgtggggtcattgggagtggcaatgtaccaaaagagattttgggaaaattaagactaaagtggagaattaaattaattaaaatttaatcaaccaacaattagtaatgacaaaaataaaaaacacaaaataataatgagaaaaaacaaatatgaatagagttatttaaaatcataaataattaaaataatattataaatagtaaaatcaacaccaagatatatactggttcaagtgtgataaatcgatgtgatctgttatagtgagatttctctcacctagaaactcgagaccagacccctacttaaaggacacgtatactcagattttccacagaaagctgagatgtccctgagggactcctcgaagttttaaacctcgcttaagatataaccagcgagaggtggcgagcatgaccgaagtctaatcgcatccgagacaagagagtagatcgcatatatcgaatatatgcgagcatcctccccttgtccttgtataaaccaggagaacgattctctgtaaatacgagttggtcttaagaaccctgcagcctttataatgcaatatagactcgcatgtctaggttctatcagctcgacatacgatgtctacaagaagcgactacctaaggacgcagacatcctaaacataatgataaccctgcgagcttaacatcggaatatgaacagtcaactcgcagattcggaagacgcatacgttgatgaactta

SEQ ID NO: 379773 - DNA, 1501 bp, Cannabis indica
ccttataatgtcatacataatacataaaaatactacaatttagttgagcataaaacttagaatatcttacatactttaacgtactaataaattagctatgaagacaaatagggatcaacttaaaggtacgtagatgacgagatgcacattcattaatagtgttcaattctcacccaagttttcttcgttttctgcacacccttcttgatcacgtacctttccaactctctggaaaattaacttgttcgagtcgaatgattcttggcttcggtttcctagatctagttagatctacatgcattacctctgctaattcataagtactcgtttttaatccaacctcacttattaatccagcattaagaagccaacgtatttcatttagttcttcagttgttatgaccttgtaaataactctatatatcaatgccacaggtaaagatccagttttgatattgagagtcaagacttcaaggggtggatcccctaatgacacaatatagtttggataataatcgaaatatactggtccattacaaagattggtctccacacctctcaacagagatcgcttgaaatttaggtacctacaatctctaagactcattaggacagaagtgctcagactttcttgtgacattggtttgatagcaacttggaccaaccctaagtggagatgactgaattttcttctcagaaattcaaatcgactctttgaaagaagttgaatagtttcttgctctttggatatgttgattgtttgttctatggtgcctatggtgtggtcatgagtacttttgaagaatgaaaatctttgcttgtaaatttgattaattgggactctcggaagtttccaatcatttatcttcttgaaaagtatttctaattctatttcattttcagtactaccactacctaaacaacctaaagataacagaggcattttggctaaaaggaccaactcctaataattatcacctggaaccagtaagacaaaaaattacaatatgattatctattaacaaaaacaaacaatactcaaagcataaccataataacaccagattagtaaatgaaaaaggttaatgattgaggatattgttgacttactttagtacagtgattgattttcgttcttcactcgagcaagcttggtagatagaagatcagatagtatttaactttgctagaggcttataacaagggtaaaaacaattctgaaaagtaggaatgaagttcacaaagagaagtgagagtgaaaaggtgaggccttcacttacctctgttatagagagaagttagaaaagttggtcatatgaatgacttatgctcaggaatctctgtcttagggtcatttcatatgtctttcatttcttctttttagagagtagaatcgaaactcctttaaaatttatccatattttttaggttattttttaagggtaaaaggcggcaaaacccctaatactttcgttttagtttcattaaacccccacaaccc

SEQ ID NO: 379774 - DNA, 1275 bp, Cannabis indica
tattatgaatatcactaatatcagtgcagaccagcttaactatattatattattcattcagtttggtacaaataattaattattacaattaaaggccaattcacaatatcttgctgatcttatagtactattaattaatatatcaaaatgattttggtaattttaaacaatgcaaaagaaaaaggcataattcttgcataaaaaatataaggttgctcagctcgatcttcattaaatattaaaattattaatattttgcatgagtattatataataggactgaccagtgaaggaaaactgtttggttggacccacgcgcttttcagtgtttaggacccacgcgcttggacattttcctttttctataaagatgtttcaatataattgatcatcaatcacaaaataaattaattaattttgtcaaatattctatcctacgctttgttttatgagaattgctaaaatatattattggtgtttaataaactttttgatattatattgttattagtgcaattaagtatcgagtcaaatataatttaagaaaataattgttagacaatattactaactaatcgtaaggcgccacatataaaaaatattggacatcactgatactcaataacaatacttttcttttatatatttgtggattagcaaatgaagcacaaatgggtggcatttggacccatgcaaccctaatgttggtgtcctttatagttaacaaatttgaatatttttattttctccaataatataaaattctaaagtatgttgtataaatgaatttaaaaaacaaaaaaatagtttagtatataatgagccgaaccatcaattatgtcatcctgaaaaatatattttacattagtaatagcaaatacttagtggtataatagtacttgtagttgtagtaatactaagactaacagtaattctcaaaaaaaaaaaaaaaaaaagaactaacactaattaacggtatctatccataaatcttattgcatccctatgttgatttaggatttgtctctagtcaatagaaaagatcacattttatgatgtaccactttttttttcttttctttatgattcaaatatatattttgttataaataaattgctgttacaattgtatctatgtttgaaaaatgaatcactacaattaacccttttctaattctcttctctttttatgtagagaacatcaacataacccttttcaagctttaggcttacctcaaataaaattatttattaataataatatatatattaaaa

SEQ ID NO: 379775 - DNA, 2450 bp, Cannabis indica
aaaaaaaaagtaaaaattaaaaatatatattcttaattcttatacaaaataaaactaattaaatgaggtgcatttataatttaataaagtgcaaataaatctcctactttttaaaaaataaaaaaatcctaatagacccttgaattaagataatatacaaggcttcttccttgtatcacttcatattagcatttataagttcttaaaactaggctatatttcatatgctataataatacaacactcattacaatcttattaatatatatactctatagaagttgacatttggccaacttaatttaatataaaggaagaaacaaaatgttcaacacattgatagaatataaatatagtaataatattactcaataatttatagtatacattaatgacatcctccaataatttcatagcaagaagaagaagaagaattatatgtactacacaaaccaaaaaaaaaaaacccttttaataatttgtcccaaaatatagttctaccaatacaaaaatccctcaccaaacaaaaataaaagtcctaatataagaaaaatgtcacctaaaaaaaagggtgtttggaaaatcaccaaagttcaacaaaaatttcacaaagcatcacatataataaatatatatatatatatacataacaaataaaaggtaattaattaagtaattaattaattaaactaagaaataacacaagcatttggattttcttctatactttggacataataatattgagtcatgtgaggattataagctctataggcattaacaagagctgcaatttgttctttatcatcaataggctttttttcatctggttttttttcatctttcttttctttttcttttttcttcttcttttttcttctcttctggttttttctcattctttttttcttccttggctggtcccactgatacaatctctgtgaaccaagtttttctcaatttgctcaccacttcaactgggtctacatcacccactactgtcaacttcttctctttcatgtccatagaaatcgaatcaatgcctacacatattcaaaataatttgttcatgtaacaacacaaattaaattaaattaatacttgaattagtagtattgttgagctcaaatatttgggcctatgaaaggaaggataggcccatgaaagcccaataggagaattggttagttacatacctgaaagagttgagacttttttgagagctttttgcttagctttatcatcatgtaaatccaatttcactattactttctgcaacaaccaaaaaaaaaataaggaagttaaaacccaattcataatttaaaaaagtgattataacccatgaaagatacataataataaaatacagaagaagaataattttgtgtaataaagcttaattaagagaataataatattgttgaataatatatgagggaaatttcaccttcattttcttcacttgggtttttgataaggacttgatttgatgagaaagtaaataatagtaaatgaaagattgtttaaaatgaattgaagaatgaagaaaaagaagaacaagaagaagagagatgaagaagaggaaagctcttggaaagagagagagaaaaacagagacttttcttttgttgtgagaaagttgggaattaatgaccaaagaactaaagtttgattatttatatataaaagggctaaattcaagtcaaactaaggcaagaaaatgttttattgaaatttatatgaattgatttttggttataagctcatcaagtctcatctcatgcctatgcttggacaaagtcaaggggatttttttgggctttgtatttgttggattgttgaataagtattggtaactagtgttgagattgtcaaatattttgctatttatagatctcattttatttttattattgtgtgtggtgtgaggtttaaggtataaggtgaactaaccacttgaggcttagcctcaagtggccataggtgagtgtgtgtgtcttggaggtcttaggttcgatacccaagtaaaaacatggttgtaatatataaacgcttaaataaaaaaatgtataaggtgaacatatcatagattgattgtttaattttaatgccagtaattggtagcgaagttctcttatgcgttaatttttatacatttagttttcttattttttttagtgacaaaacgcccttaaatttactttgttttgtaaattaaaggtatcagttaaatatcactgttaaataccaacttgatgactactgtgtacacatgtatgtacgtgaaagttaaatttcgaagccaatacaataataattcagctgttatttaacggtgatatctagttgatacctcaaatttcaaaaaaaaaaaaaaaaaagaaaaaagtaaacaataaaggtagtttcgaccaaaaaaacaaaaaaaaaaaaaacgaaaaaaaagtaaa

SEQ ID NO: 379776 - DNA, 2960 bp, Cannabis indica
atatatatatatatatatataaatatgtatgggcctataaactaatttgggctaatatcctatattttttttggcccactctagacattaataaagcaagaagcttttattttaacttgttctcaatgtttggtttaggccaagaaatgacataatgcattttgaccaaatgagaaagaaattaattttatgtttttttaaacatgatataatcacatgagcaatacaatgtgtatttttaatttggttcaaaagattgggtgtgtactagttaattattaagtgaggtttaagaataaaaagaagtttaaacaaagtttcaaaatattatatagggttgcataccatctaaattaattcaattacatcaaaatttatacaaattgtgtatctaattacaattagattggattaaattagatatacaatgttgtggtgaatcctcacccttaaaacaagttgttacaacagtaacaatgtccaaagaatacaatttaaaactaaaaccaatcacaaaatcaaaacttaaacttaattgaaaatagacaattgtatgaaaatcaatatcatactattaattctcattcctttaagtaaacatgtcataaaatcttttatcaaaattttatttgatttaacctcacacatttacattacaccataaattagattatttgcaatatacataattatttagagaaatattaaaagatactactggtgtctagtaattttttgagtgtcatatcgctattaatgtgcaattaaatattgagttccatataatttaatttaataatttttaaaaaaatatcgctaactaattgtaaaatatctctagatggtgctagacatcactgatgtccaatagcaatgctcgtaattttacactcaaaaattaacagaatacactatgaaaataataaacaattataatatgcactataatttaggagtattagagctacatttagctaagcaatattcattaggtaaatttttgagtactgataactcatctattggatgggtattttaattgttttttttttgttagtttttaactaaaattttacatttatagctattttacattagctattatgagtgttctaacattaggtacaatcaatatttaatattattatgaagtgattttaaataattagtaatatttaataataattattattttaaaatatataaaatctaatatttaattatattaataatattatgacccgacaatgttcaaaataactcattaaactttttttttctgttctgaacaaaattatctttgctcaatataacagacaacaaatcagacaaaatagaatcttctataaccacacaatcagctagccgtcaagagtttctggtaacataatgcacaactcaattcacaagccacttgacaaaaaataaagaaacattaactaaaccacccaacaaacgtttacattcctcgattaaaatcccaaacacatgacacatctgaattgtgcttcagttagcttccaccaccaccaagtcgcccgtttcaatcacaacaggcgcaacatggtggagctttaacaaactcagcacctctttaatgtccatagcctctgccacattttgagtcacacaaccatggaagctttttccctgaactaccacaaataatccagcgacgtctctaacaataaagccaatgccaaatcttccatcaccatcaaaaatagttacattgatgttaactttgatgccttgtacgggtttagactagagctctttatcatcccctccaagcaggagacacaacatagtaatgtttcatctttcttgagccttcaaccattgatcaagagacttaactgcaaacgcaacaactccctccactttcctccttcaatttttccatatcagctcgttatgagctttccacagagaccaacacaccataaaactgtgactaagatgaaaagaatcaacaatcttcataacgtcttccaaccatccttagaccgagctaaacgttcttcctatggtatcaataccaactaacttccaataatcccaagcaaagttacacgagccaaaacaatgaatatcagattcctcaaacaaatcacacacgggacaaactgtttgtaatgagacatatgtaatacaaaggtaaacaccgctccccacatgaattctttaacttttgttgggactgaaagctgccataatgctttccaaaaaccaaagttaacatcaatcagatatgcacctttaagaacttgtaagcgttgataggcactacgaatggaataatgcccactcttctcatgaaatcaatacctagaatctttagttgaggaagagcataaaagaattcccaagataacatcaacatcagaatcagagaacaaatccttaacaacctcatagtccaaagctcgcctttgaacctctaacaaattgctcaccataaaaattttcaagccaagaaaaataagaagggaatagacaaactcaccacctgaagccaagggtcatgcatgatccgaattgaagtaccaagtctcacccttcttctaagcctatccttgaatatctttcgaagcaaaaatacttctccaaataaaactcgagttagcacctagattcgaagaaagaaaatcccatcgagaataataacaagcacgaaagactttactaaccaaagaatcaggcctaattaataatcaacatagctagattaaaacctcttaagcttcgaaagtctaaccctctaacatatttatgtctcatcataaaatcctaactcattcaaaaaatactcttttcatgatgcagactttcatcatggccattagttactcaatttagaggaaattatactctataccctttttatattgtcctcttttagttttaccctcttttttaaagtctatcatttttacctctttttttaaatattgtac

SEQ ID NO: 379777 - DNA, 2996 bp, Cannabis indica
aattgtagaatctaataaaagcagatatagtcaataattattatatatatattttataaataaaaactaaaaaagaagtttctaagcatataaaaaatatatggaaaaatagtaataaatttttttgcacacaattcgtaattaattaatgtaaaatatataaaattgtaaaatgtcctattttctatggtaatttaatttcatatgtattaagtttttattttaaatactatatatttttttattaaatttttttaccacatttatttaagctgattttatttttcccatatttatatatttatagcacatattgtagccttgtaggccaaattttgggaaggcccaacaaaagatagtgtgtaggtcatgccactagtttcagctattctatataattctaacattggctaaccataacttcttagtaatgttcctgtaataacaaattcattagtaaaagattttgtagaataaaatcaatgcaaaattgcagtgtaaacaatgtcagttgttgtactatatgaggcgatggaattcctcaagatggtaatacatttttacatacattgtttagtttcataaatttctgcaaacattatttccagccatagtaacatagtaaatttttaattaatttttttgatggaaatatttttaattaatttttattgattaacatttcttattttccttcccaaaaaaccatgaccaaacaaatatattctttttttttttgaaagaccaaacaaatttattcaccacatatcctaacagcaagaccaaagagattaaattttctaaatttagaagggagaataaagctcgttggctttcccaaaaagatttgactttaccaactcttatctataaacaaacagaatttttacaagccaatggattgggaaacagaatccatttttttggttggccaaatagccatagaaagtaaagaaaaaaaaactatataaactggaatgttgttagttggtaatagttacaggtggtgaataagttacatagtgagacggctatgtagcagaaaaaaataaaaataaaagcccatctttcattctttatttcccggtgaaaagaattagaatctgtatacaaaagtctaagaattcactgaagaacataaagaattcaaagcacttaaggaatatatctaattaattgtacttaagtgcctgaaagaaagatggcaggaggaggttttgttgttggaggaggtgggaactatggaggcagtattactgtcttcgtgatcgttacttgtgtggttgctgccatgggtggtctcatctttggttatgatattggaatatcaggttattattattgttttttttttcttttcaagctattctcttgtttgccttgtatagatgtcttatttttcttaatttgcaggaggtgtgacctcaatgcagcctttcttggccaagttctttccatctgtactagagaagatgaagagtaacgaggcccatgaaaacgcctactgcaagttcaacagccaccttcttacgctctttacctcatccttatacctggctgctcttgtggcctccttttttgcttcgacaattactagggtgtttggccggaagcccaccatgttcttcggagggttggtgtttttggctggatccattctcaacggggtcgctgaaagtgttctagtcctaatcattggtcgtttgttacttggtgtgggtgttggttttgccaatcaggtaaccaattatatatttaaagtacctagctttgtctattttaataatgccttatcttttgttattgaaacttctctataatgaaataaaccttgaaacattgcaactcactcgagttgatattgaaggacctttactcgagtttatttaaattttttgttattttttgatgcatgcatggaaatataatgaattctctatgtttcccaaaattatgaaaaacatcacggatgatcaaaataaatgtgtattcaactagtttgtttcactaatattattatgtcaaatttgtaccttcaaagtacatttggacttcgcatactgataatagacaactaagactctatttttgttttgaaaacaaagtgaatggaatggaagatttttcaaacatgttgagcatatgtacaccttacattttagttttagaaagaaaagaagaaacacaaatgtagaacaatattattaaacatatggagaaatagtatttttattagtccttgtttgttatgtatggcagtccgtaccagtatatctctcagaaatggcaccggcaaagattaggggtgcactcaacatgggatttcaaatggccatcaccattggcattctaatggcgaatctggtcaactatggtacttccaagattaagggtggttatggctggagagtatctctagctcttgccggtgtccctgcaattatgatgacagttggtgccatattcctacctgacactcccaactccatcctagagagaggcaatcctgagaaggccaggaagatgcttgagaagattcgtggcactaaaaatgtggaggaggagtaccaggatcttctgcaagcaagtgaggctgccaagaaggtggaacacccgtggaggaatatcctccaacccaggtaccgacctcagctcgtgatttgctctgtcatacccttcttccagcagctcactggaatcaacgtgatcatgttctatgctcctgttctattcttgacattgggatttggggatgaagcttccctcatgtctgctgttatcactggtgttgtcaatgttgtcgccaccttggtttccatcttcactgttgacaagtttgggagaagaattttgtttttggaaggtggtttccaaatgattttctgtcaggtaatctgtaaacatgaatttcaatatatctagcacagaatttaagtattacataacaaatatgccaaatggataatcagaaaataatttatcaatctctatttaga

SEQ ID NO: 379778 - DNA, 2383 bp, Cannabis indica
acaaacttataagtagtccattatttttattaagttttttttttttttatttataaaatactcatatttcatttaatttccacataaatcatttatgagttactaatttttatgagtcaatatgcagtcattacaatcatgaatttcaggcccatttcttttatcaaaatcaggaccctctcctttgtcttagcttgaggagtcacgtggtccattaacttacattctatataaactctattttcccgagtcagacccacaagaattcccaccctcttttcttacttgactttgacgaagtggttgcaaatgaaccaactcactgggatcgtgggttagtggattctcacacgaacatcgttcatttgtaactgttgtcttctccatcgtaatagtactatcaaattccttatcatgaggtgaatgcaggttagctatcctttgtccgcaaccaaagctactagcttcccctatttgtttgccattttttttattttttttattttagcttgtccctgattaaatgcaacaaatcaatttggcattggatctttatcatttaactagaccctgtacttgggaaatttctcgtcgttcgtattcatcttcaccaacaacgtcttagagtaatcattttgatcatgaccccagatgctacatgtaaaacatagtaatgataatctttccaactaaaactagaccaagactttcttaccatcagacggtatgaacctccctacaataatactcttattcagaggaaagccaatttgaatctgaacatagccattaaggaaaacttattgattagaacctcattgcagttcaagggcatcccctgccatcgcaccaagacatttaacattgctttgagttaatttttttttgtagggaagcctttcattttaatccaacaagggacaaagttattccaagaccaagaatctagccactccactaataataacacaccaccccaaaggtgttgtctcccactgtcttgactattttaaatttccaatcaatttttgatttctacatacgaccagaaacgtttggaaagaacttagcaatgacctctttgctgaacacaactcttcccattagtaacttctcattacgagtttactattagttataattctgttaaaattagttaatgacattcttagttcagttagttaggcttatcttggtttgatctaagttaggatttgagctaagttagttatctctccaactaacttagctcctatgtatctctataaatatccctacatgtaatattcatgaaagtgataataaaacaaagcatcaagattttctctctccgctacagtctattttcctaatatggtatcagtaaaaaccttggccactgcaacaatggcaaggccatccacacgctcttggtgttcctccatccacaactgagcacaaccaattggagtccaatcttgatgctacttttgcacctgcagtcaacacttcaatggctccacgatgagttccaacttcaagattgcgatctcagacagaagaagacaacctcaaaccagttcactcttctccagatcctcctgttagtgataattctcaacttgttgttcctgcacaatgcccttcgattttcgatcgtttggctcatgaagatgtatccatccccttcttcctcaacacaacagatcaccctagactcattctgctctccacagttcgtaatggtgctaactatcaatctttgaaacgaggcataacaatggcagtgacagcaaaaaacaagttttccttcatttatggtacccttccttgacttgcaattaataatatccttttctcaattcttggatttgttgtaacaacatggttatgtcttggctcatcaactctgtctcttctgaaatagcacagagtatcatgtattttcacctggccacagatatttcaagaaagatttaacaagggtaatggacctcgaatctttcagctacaaactcaactcacacatttgtagcaaggtgatcaattcgtcacctcttacttcacaaaactcaaatcaattcgggatgaattaaaggaatttctacccaacaccacttgcacccgtggtgcaatgaaattgttccttgattagtataatcaaaaccaagtcttgcagttcttaactggcccgaatgagtcgtatacttcagtaaagcctcagatccttctcaatgaacctattgttggaagttattttaccaggatcttaatagatttcgaaacagagaaggtagagagagagagggtggcggcttagagagagtttttgtgtgagaaaattctgtcagaatattgttgtacaaaaactgaagcctttacgtggccggcctaggcaatgtgg

SEQ ID NO: 379779 - DNA, 3681 bp, Cannabis indica
agtttttaaaaaaattgaatatgtgattaggttggtaaatctacaaaataaaaaaagtaaaaagaataattggagagttttttggattcaatgatttgaaaacacaagaaacataaaaaatggtgttttcattttttagcctaaaaactcaaaatagtattcaaattttattttttgaaaacactcaaccaatcaagaattcttaggtggacccccaccattttaattttcaaaaacataaaatagttttcaaatcctaaaccaatcacacccttagtattagctattaggtgtgttttgttggaagtaatttttattttactctttagaatattattttaatagaatgaattttttatcattttaatagaatgactatttcattttaatacggaagaaaagatcattctaatacaaaatgagaaaaaatttaataactctttttgtgcattttaattttgattctatttattttttttattctcatttttattcttataatacaaaacttgaaggtggtgtttagtttgaggtaataaaataaaatgaaaaagaaaaaaaatatattttccaaccaaacgtggcctaattgtttaaaattaaatctcaaacttcattacccaaacaacaatctcaaaatttattattctacattccaaatttaaagttctatacattctaagttatgcatcaacaaaattttaatatagccaagcatcgttttgggaatgctttcgtagcatcatggttttatgacataaaaaaataagttttcttgcactattccaaaaagtattgctaagcataatgataggccacctatcacttatgtttatgcaagaaagagggatacgaaagctaaagatggaaatgccacaaggaattaattggcattgtaattctgttttgtgggaactaattgggtgtgggtgagtccttctgtagttcctatggagtgtggtataaataatgctttaagttgttgtaaaaggggtgaaaagtatataaataggaaattcttattatttggtatcagaacattcattcatgggatcgaagaaagacacaacgactaacattatcgaagaaaagattgaggaagaggtcttggaacttcgccaagacgtgtagagagtgaaccagggattggaaaaatttcagggtgagattcagacgaccattgcgcaaatcatagccagatagatggacttcgtagttagtcaaatctctcaacttatcctaccttgggggaagaccacgctagatgcattagcgacaatggcagagtgccaacaaagaactattgaaggaaacatgtcttcaattggtgaacccagttcaattggtgcctagttatcgcccaagcttccagttgagatggcaatgccgcccgtatccattctaacgggaccaccaattcaactcggttcatttcactctggctagatgtatgggcacgaagtctgttcaccctagatagaaattctactgttcaatggcgacaatccagatggttagatttatagagttgagtgatagttcttactttcaaagattttagaattgatgattttagacatgactatcatcaaacttgagggagatgcaatatcgtggttccaatgggaaaattagcaaaggtagattatgtcttgggaaatgcacaaatttttgctcctgattcggggcagtccctgttgggtcgttggtggaggaactgtagtctgttactcagacagggacggtccgagagtaccgtgtttaatgggcgatccttgtttcatgggtacctgatgtgcctgatcacatcttggagggtgggttcttaaagggcctcaaaaatgagattaacgcctcattgtacatctcgtaatgcaaagagttggcccaaatcatggagactgcccaaaggatagaagaacgccgacactcaatgaacctgggcccattcagaagacccaatttcaagtcatcatcttcacatcatgtagctcacttccatgatttcgagaagtagccaaatagctccacaaaatagaccttatatgaacttgtcaggatccattgcgtcaatgacttccaaagctgggagtaatcgttcaatgacaacaacaccttacaagaggttattgtagattgtgcttaccactaatgaggaagagtcatattcgctagaagaggactcgctgctatcacccgatttaaagagacaatggcttatgaagagacgcttgccactctttcacttaactctcttaataacatctcatctacaaaaactatgaagttagttaggcatattaggactcgatcagtgacttgttaatcgatagtgaggccacccataattgtgtttcgagggaggttgtcacatcagcaggaattatgatttcagtaaccacttgttacaaaatacttctcggcactaaatgtaaagtcatgattgagggaatttgtaccatggtggagttagatttggatgccatgcgagttatcacctatttcctttcgttggaattaagaggagtcgatgtaatattaggcattaaatggttggaaactctgggtaatatacaagttaattggaaaaatatggttacgaagtttgagatggcagaaacttgggtcactttacaatggaaacccttcttatgtagatctcctatttctttaaaggccatgatattgacagtcgagaaggacgctggaacttaatgggtccagcttgaggccttaacagtcgtagagcaccacaaatagccattgatatcagcccctatcagtcaactgttaaaccagtacggtcaggtgttggagatgccacctggccttcgaagctcttgggacatttgatcacattaaaatcggatactgggcccatctcagttcacccatatcgttatgctcaaattcaaaaaaaaagtcaagattaagaagatggtttgggaaaccttcctaggacctttcctactcagggcatcgaccaccatattggcttttctaggatgataaagaatctcacaatcataatctttaactaattctaaccatcgtctctatctcatattcaaatcttttgggtaaagaagtacttgagacttttgtggtctgtgtaaatctcacatttctctttgtaaagataatgtcgccaaatcctcagggaaaacacaacaacagcaagttctaagtcatgagttgggtaatgttgatcatactccttcaactaacaagaagcataagcaatgaccatgtcagcttgcatcagaatgcactgcagatcctgtctagaggtatcacaataaaccacaaatttctctcgatctgacgacaaagccaacactggagctgtaatcaactgttgcttcagctcttaaaaactagtttcatatttgtttgtccataagaaccgttgattcttcttcgttaactctgttaaagacatggaaatctcgaaaaatgcctccacaaaatgacaataatacccaaccagccccataaaacttttaacttctataatcatctttggtctagggcagtctccgattgactcgatctttcccggatccaccttaatctcatccttattgacaatgtggcctagaaaggacacttgtgataaccaaaactcacatatttttaacttagcataaagcttgtgttctcgtaattgatgtaaaaaaa

SEQ ID NO: 379780 - DNA, 6717 bp, Cannabis indica
tggactatgtgaagcttctacaagcagaatgttacgtctccaacctaaagatgggctttttttcgcctttattacagcagaaaacaaaaataaaaataataagttctagagacaaaaatgagtatccattaaggtaaagcccatagagagacttaaataccagtacttgaagcctttgccttggagagatactgagacctaaaattctcagataacttatcttcgtgttggaaaggtagcagtagcctctcacaagcactcttaaaggaaagggaattgttttgaatatattcatcaactgcagcttccaacttcatccagacagctggattcagtctcatctagctccatatcacatcgttcatcaactgcagagggaaaacgttttttttttaaacaactgcagagggaaagttttggctttaaagaaacatttactagttgagagagttaaagaatcttttactagttgagaaagttaagtaaatgacacagaagaataacattccaaattctttcaaccaaaagagattctacagtcacactttaaatcaacaagtacctggattaaaacgaaaatattgtatttcggggagcatagggagtaatgtgcttaaagcttcctctacccgatcaactgagcatgcactttcaatcaaaacttgtccagtatccaaataacgccaaccacctttgcgtgtctgcaatatcaaaagaatatataaattaaaaagctagaacttgaaagtagaaagaatacaactgttcatctaagttagatattttggagaaagagagagagagaccttcgttggtactgaaccgcacccaattgaaactaggcaatcaattctagtatcaggccataaaagttgtgcttctctcacggcaaagattgtaggattgtttgccactattgcaccatcttgccaacgatttgcatctgcagaaattgcagggcattaatgtagagaatcagtatcaggagagagtataacattgaaccataaaaaaaaaaaaaacacttaacaaaaaggtgaagaccattccaacaaaaacaaagaaaataccatctgagtaatcatcaagatagtacggtgcagcagatgatgctcgaatagcttgccatacttgatgtttacagcttccaataaaagcactgcgcttatagccaacttgagcacctgtagtaggggagcctaagatactgatggccgaactctctgaactcgcaagaggaatttctggtgttccagcagggtactaaagtcgaaaccataaaaaccaagggaaaaaaaaacagctgccataattcaatctaaagaatatgggttaaatcataaaaaacagcatcctgcaaaatgaattctaaatctcaaacctgataattacggaacacaaaaggctgagctggcatcacgctgaccaatgttgacacagcaaaaacctttggaacatttctcacagcagactctattaacagatctccatcctcatcagcgcacatttctttcaacaacctctcaaattcatcggcactgtgctgcaagaaactgtgtatgaggaagataacaaataatgacatacaaaatgccgtagccctaaaaccacatatcttctaaaatcaatcagatgtgcaatgtgttaaccactcaagattatgttatagaatcatcaaattatttgtagaattggttacatataagcttttcaaatttcttactgtttataataattaaaaaaaggactagagaaacaatatagggaggaggttttatagagcttcgatacgcactttagatccgtgtacaactaccctgaaactctgtgatgagcttttgtaaagttgatctaacttctctctccaagttgcagcctcattatcccttggcacagaatcagcaaatacaagttttcctaatatccaatatcagtagagaaaattaagttagagaacaaaaagtacatttaagaaaatggtggggttggggtagtgtagcatctgtacttattaatttattaacgtacactatacttaccaagatttttatatatttcttcacattgagctaatgtcatcagcttgatgccaagggcaacagcaagcatgccacccgttgatgtgccgcatataaggtcaaacaactcatgtatttgttttccagtgcctttctcaatttctttaagaatctgaacagttgccagacctttcataccaccaccgtccattgagagtatgcgcaacccttgctttggcacctgtcttccccttatagcgcgccgtagattctcattctcccctacaagttcatgaaatcaatacaactatcacactaatagtgaaaacaacaaaaaatgattagatcctagaagactaaccaagaattgccaaagcacgagccgcagctttgctcacacgcggctcagatgcaacagtcaatcgcagcagaagttctcgcagactttcagatgtaaccagaagacgtcgattttcaaaacagaaggcaagatttccaacagctagcaatgctaatctttgtacctgatgacaaaaaacccaagctttctgaattagaacacagccaaaatgatatgatctctccattattaggagaaatagagaactcgcctctggatttttgtgggcacataaaacttttagtgacttcaacacgtctttggtcaacattttctgggaaacattatcagatgcaaatgccagcttcacaacaacttgcaatacagaaatgacttcctccctggaaacagacttaagcaccgtttcaatgggttgcatgatgtcagatttcatcaactgcattgcaatagatacatctgcagcaagagatgaaagagcagaacaggcttgttcaacctgccataaaacagaggcatttagactgtagcttagtaacagagtgacaaatcacaagtacacatgatagctataaaaaataccaacataccacatgacgatcatcaccagttatcatacttataagctgccggactgcattctcatctttaccaacaaccgcacggtttccttgatcttgcattatctttgcaagtgccgatgcaagcaaagggtgatggcaagatgaaaaccggaatataagagagaagaaggcacttagcttatgccttgatgcaacaaaataggaaacattttccatctgcattaccacaaagatgaatataaacattttaatatcagtacttggatagttcaaatacaaaagcagtcaccagtattgcatttaatattacctcaatatgcacattcactgatcttaaattatcatctgccacaatcctgatgttggcaagagacaaatgccgaagtttgtgaaggggcaggatttcaggaagaaattcaagaggattgccaaacagcctaagaacccttaactcagccatagctctgccacaaaactgaagaaaaccattaggcccagtaaaatattaaaggctccaaaagcattgctgaaatagaaaatagaacaatgtacaaactaacaattaatgttacaagaaatgaaacaatgtataagctaacaaatgtattttaaatcactgaaaaaaaatgacctgaaatcaaggaggggccgaacaagtttgttgtgttccaatgataattccaccaaaccaacacattgtctaagctctactgcttgatttcaattaaaacaaagagataagtagatcatataacctcttcaatgctgaagcaattttagtttaaccacttatgtcaagattaattcacaacaaattttaaaaatttataagatagataaaagctatcatgcttaccaggtactgaaaccaacatgttactgtccactctcagaacttttaagctcttcaactcaccaagctcaggtggtaaaagtgaaagtttgttgttgtcaaggtaaagcttctcaagaagtggcaagcgagtgatctcaactggcaacacctatcaagtagttattcaagcagtaacgataagaatcctcaattcaccatagcaaagctctagtagctatcaccaaaaacaaaaatttcttacagcgctccccggaactgtactaggtgatacaactcatataatattctgaagaatggatgttcttaaatcatattgtataatctacgcttagtataattaaaatattcagtgtctaaattaatataaagtacatactgacaattagaatctagaaatctgtaatcaaattgtttttttttaccatagaagccataagctaaagctgcaaaccccaaaaagaaagacaatacagaaaagatttgcacatgaaaaagagcacaacagaaaggaaaacgactttctgaaaatagccaatctagttttttcttatgagactcaattaagtacaacaggttgcctactaaactcagatttcaagcacaatacattgagttggtctacgatgcttgaacaaaaaatttgttctcgttgcatgatccctctccgaaagaattagaagctattaattccatcaacgagataccaaaaaaaatgtaagattttaaagactcaccgacaagccacaattacaaagactgagcaaagtgacggtcttccaatgctcgccacaaccggatacaccctcaccaacttcgggaagttttgaagtaaattcggaacgcaacaagcgcgttaaaaccccagtgccatcgctctgctggcctgagccggccgtcttgtttaaagagacggcccgcaacggttccctcctcttcaccaccttcatatcaacacctacatttcgatcctcctcatctgtcgtcaactcaacaatcaccgtgtcctgcggcatcggcagtgccaccatcagttgcgactggagcctgagcgcgacctggtcctcatcatcaccacccgaccaatccaaatcgatccgaaaccccagttcctgatcttgagacagtacagacgaagacgaagatggggacaaggaggacgatgaagacgaggatatacgtccaggattctccgccggctcatccgagccgtagtttaaaataagatgaaagacctcagacggcctcttccagcccaatccccaagacattgtcactaaatcagatttagagtgacaatttggtacaatcggagtgacctaaaggccggaaattgaggcggcgtcagcgtgatcatcgcggtgattgaatcagaagggattgtttaaggtgtaaaatgatggaaacatggtgatgaagaagaagaccagtgatgatctagggttatgatttgaggaagaagagttaagagatcaatggcggagtagaccagactccgcaccaaccaaaagaagagcttggagttccaaacacagatgagaaactgaaaccaacgatttatatacattttccatttttatggttctaacttctaagtgcaatttcgttaccggcaattttttatgattaataattaatataattattaattattattttctttctcctttaaataaaaaatatatattatatattattttgtcatgcaccttacacaattcaattttaatttggttttgattgtttatgtattaaataattttttttaaattttgatatttattaaattgtgtctcactaaattgtgttatctaaactttcatttatatcaggcttctattaataaaattgacaaaaaattttgaatttaataatttcaataatagttcaaaaaaaaaatttaacaacctaaagaattcactaaacaattcaggacatgagccgatacatataaaattaagaggtgaaaaatctaattaattgtttttatattaaatgataaagtttttttttatttttttttttttgagaacaatacatatagattcaaacccatatagataacttttaatttagtgtaataaaataaaagttatctatttttactattttaattttactatctagtgtaagataaacataaattatgttatagctagtttatcttcttttacaacttatactataaagcttataattcaaacttaattatttatttttatagcataatatatgattggcaacaaattgtcttttttttttccttattataattattttttttctccatgtgaaatacaataatgcatgaaagctcactccgttcctttccaaaaaataaaactcaccccgttttatatattgcttgatgtatttagtttctgacgtctagtgatgattaatgttctttttacttaaaaataatttatgcttctaaataggcaacttgctttcttttatatctttcaagttaactacataatattgaataatcaaaataaaagaaataaaacacttggggtcatactaaccgtgaacgtgttttttttcttttaatttattttttaaatactagaatagagcttcaaagttctctcgattttgcctatatctagtaaatggtaataagtagatgtagctgtagcttgtatcattaactccacgtaaatgaatcaacatctcatgttaacaagtggtgtccctattatattaaaccaatcaaaatttaacacatcaattaattttttacttataaaaaaattaaacctctaataaaatcaacaaaaataattaacatatttaataaaaattaaattagttaatgatcaaactttgataaatttaacacagcatgaaacaacaatttttaacaaagagatcttgtgcatgtttggcatcataact

SEQ ID NO: 379781 - DNA, 3732 bp, Cannabis indica
aagggtgcaccaatacatcccttttaaggggtgcattgtagaatcacccaatattatattttatgtaaataaaatttaaaaatttacaaatgttaaaaattccttaacaaaggatctatattttttttagttaaggtattaaattttgaactaaaagtttataccaaaataaaaatcctggtgctgtggttaagtggtggattaaagttaattgtgatgagtctctattctcgtcggaatcgaaatttgggctagggttgattgcttgcgtttcctaggggctgttggtggaggctatgaccgtggttcatatagagagtggatacccatatggctgaacaattggagttaaggaaatgctgaattggattaaatcttatgatgaagttttgttgatgacaggcttatgcttttattcttgaatttgattgtcattggttttcaatgctattttggatgatgctgttatctttttccctttggtactgttattgcagattgtaagagacttgttcatagtgtcaatgactcaatgatgttttgttttcttttattaaacaatccgggaaccaagcggcagattggttagttcacttctctagttcttttcctggtcataatttcggtggggtgatgtttttactagtttgcaagctattgtattagttgattctatgaagttttttcttctgtttcaaaaaatatatatatctaaaccatacaaagaatatatttcttaccttaaaattttttatgaaactaaaacaaagtatagttcagagtctaaatttgaattgtacaatactacaagtgcagtagatgtagattaaaaaaagaaaactattgtaccaatttctgataccaaaggaataccacagaaaacaaatgtgcacagtgaacctacttttcatccgtaaggaccacaaagaagaagctctaaactattacaaacgtttttattctagattgtgtctcctaatgtgatctggaatagtatatgcttttttgtccctattttgaatcattaaatcctataattaacttcatggcatattatcttccctttgcaaatctgaataaccatattatattaaacatgaatatattcaagcacatgatccaaaccaaacctaaaaagtaatcttaaagtgatccatgatttgtttccccataagcaaatgttaagacaaaaacatcttaaaaacgagatttatcaccatctttatcaccttgaataatgatacatagtatatagattaaagagtacaatcaaaacataatataatatcttcactatcttccaaaaaaatgatttgattgttggcttgaaatcaaattggtgcttcattttatgaataaatgaaataaattaaactccaccaaccaccacacatttctagccaataaaaaagaaacagagtaggctgctgtttaaggtgatttgaattcttccacttgactttaaatagtggttttgtttaagtaccccataaaaggacaatataatagacaagaaagttttaaagcttagacctcttactttccaattagtaagaaaataaaaataatcgtactggactactgaaatcactttatggcatgtttctgtactatattcatataaaggatcacaattattgtcacccagtgaaactttgcttttgtttagttcatgataacaaaatgatacagaaaaaaaaaatgaagacaaaaatgtaatccaccagctaatgtaattgaaattgaatctgcctcaaacttgacaagtgttttttggtttaaagttttgttgtcaaaatttagtgatttttcacatccgtgaaattgtgtcatacaacataaaagccattaaagattctaaaaggttagttcagatccgaaccgaatataattcagattcaagattttacactgcacttgaccagattcaagtgactttatattactacataaaaattgtgcagtgtgctacagctttcgtctgtaaggaccacaatgaactgaagaagctccaaagtactagtctaagatttgtgtctcccaatatgctatctgctattttctggccctattttaaatcattaaaatcctataatttcatggcctccctctgcaaatttgtaaccatattaaaatctgtatctatatatataaatttaagcacattatgcaaacctaacaataatctaacattaattcatgatttatattcacaataaagcacgtgtaagacagcaatatcttaaggttgatatttagaccatttttccaactgtggccacatgatttattagcaatgagagagtcatagctccttaaacatgtattatatttcactatcatccaaaaagaatgatttgattgtttgtttgagatttaatgggtgcttgcttcattttataaaattaaactataaaacaccaccaccactatatttatacacaatcaagaaaaaacagaataatattaatctcaaacaagaataataccttaaacagcaatattttttgtttttatttttgaaagagagtactctgttgtttaacgtacccttcatgaattgataattccatttatttttgaatactccatgaaagtaaggaagtaaaaagagcaataagtaggggatgaaatgttcatccccattatataaatatatagatataaaaagacacagtctagtttggccttttgatagttcttaaagcatataaaatatttcactatcttccaaataatataaaaaaaagaaattttttttgatttaattgtttgtttgagacttaattgatgcttcttttcaaaagataaataaaataccaccgcataattctacacaaaatagaaaaaacagagaagagagtactctgttgttgaggtacctacctttcatcgatttatgaccccatttaacttaattcgacttgtatcttttaaaaacaccccatgtctttaaagaaagatcataatataaaatattaaaatgccccatgaaagggaaagaaaataaaaagaagggcaataagaaagacagagtctagtttggcctcctactaggtatctagtcatccttatagtaaaaaaaaaacaaatattttaaccgtattggaccactagaggtagaagagaagaacattttggaagcagaatagtccctgttatgtacatatatcacaaaggaccacacagaatattgtcacctagtgaagctctgctctattttttaattttctcttttgttgccgtaccaactcaattagtgtagcattaataacagtactagttttttctgcatttcaaagaaacgatgcactaaaaaatcttaaaaatgaaggcttctacaaatatgaatcatcacacagcaatatttgtgttgtgtgtgtgagtaaatgggtttaaaagcaatcaatatgttttgtgggaatgtgatcattatttcccagagaaacgtaagtttgaaaattttggatggataccaacttaagttctatttatcattcaaaatgttataatatagagagctttattctcgtgatgtgtttgtgttttttttatttatttattttggctttgtattcatgcatggaaagagatccagtagtgcatagatttgtccgcaaagacagaatagaatagaatagatattggtaacgctcgaatatgtgggggcaattggcaaagacaaaagttggtgctacagaagaaaagaaagatgcctttggagtttggatg

SEQ ID NO: 379782 - DNA, 703 bp, Cannabis indica
aaatataaattaatttaataaagtaatcaaaaagtaataatgttttcattaaaatattattaaaaagattagagaaaaaaggtaggagctccctatccattttatagtgacccattttttgtatggtttaaaacttatttttttaaagtactctctattttagctaagaatgtttagagaaaatggttaaaaattcttttatacacgtatatattatatattataatagttttaaaattaaattatgtgagtttttattaatatttaattgtaaataagtaacaccataactttcagcaattctcaaaatataatattgtattgatggatctgtaatgtttaaattaatcacgtgcatttgtaagtagtcttcttgatgaatatatatgcctcaagtagcttacaaataataatgagaagtctacttccaaaatgatccgagtctcacatatctgatcatcacttctttactttgaaagatattataaatgtatattaataaggccaagataatatgaccaccattataagagttatggaatggatccgttgcttttttggacttgggatgtaaccttttccagtgcatgttcatctttatttttataagtctacttttctggccaacaatgtcaaacatttcgtaccgaccggtgggaccataaccatgcatatatgatccatactagagctattgacgtct

SEQ ID NO: 379783 - DNA, 2398 bp, Cannabis indica
caccgacttcggttagcaagtttgtatctgggaggggatgtatattattggttctagatgcgttacatagaccttatttttgttgcctagtaatttttctatgatatgagattgagttggacatcggtctttggcttcctttgtctcttcctgattgagtttacgatgagtgagcctcttgagtgtggccaagtttcgcagtggatgccaaatctactatagccgatggatattgatgtggagatcaatttgggaatagctagatatgtagcaaaccaatggtggtgaccaagagtaataggccaagagtgaactcgagatggatatgttagatgacgcaactgaagagatagcagactatgataggtgaatgatgttaagtaattttttgattgtatttgatgagttgtaaccattttagggatgtttattttggttagtatagaaactaataaacactaaaggcagattgcctcttttgccgattgaactcttattatgtaatgacgatggtacttttacattagcggatgttgttgtacatttttatatttaattaattatgactttgtagttgaagtatgttttcttaacatgagagtaaatatttttcattgtaaattaaaatattttcaacctacctgttgtattagaactattgatgtcactagaggtagggttggtcactaggccaataacgatcaaaccctagaagttcaaccagtggggtacctaaggttcacgaaaaacaacaaggtagaggtcgaggccaagaatggggtagagcactatgtcatagtcataatagtagacaaggacaaggtagaggccatggttaagcggatgaccaagaaccagggttggccgcacagatggaagcaaaaaataccaaaaaagtgcaattattccaaaccctactccaaaggcttcctgcttccccaaacaatctacacccacctgttcttaaagaagaagatcccgaatattggaatgaccaagagaactcggaataacagaatgatgaagaaatccctgaaccacatgctcaacacactaagttactcaaatccatatcgaaaaggttaagtagacaaaacctgcctgcattttaggggaccattgacccattaatacaaaggaatggataagtgtgttggaaactatctttgattttattgaggccatagctagggaggaaggggtgtgtgcagtctatatgctatagaaagatgcatgtatctagcgggacatttcaaataaaggacacgacacttctagaatggaatggttagagtttctcggtgttcttaatgttaagtattacaataggattataatgaaaaataaaattaaggaattcactagcctggagcaaggaaattttaatgtgctggactatgtacaaaagtttaatcaattgtgtagatttgcactagatcaagtgaataacaaagagaattgagtttgcaagttcatggatggattgaactaagagattgcgttgttcatggatactggtgaaaggggtcctaaaatcgatgatgagaccatagaaagggccatagtgatgaatcctggatgctaaaggacatgaaagaggttaagaagactgaagaacaggataccaatggaggtgatcgtgtgaatttttatgccaataagaacttattcaagggagatttttctcctaagaataaccatagtggaaatcaaactagtagtttggggaacctaaagtattccaagggtggcaataacaagagaaaagttgagtcgtcaaaccaaattttgaccatcaaaaaacaacctcgacgggagtttgttgcatggccacacggtagttagtgcaataaattacaccaggtgattgtagcaactgttatgcctacaataagccaggatatttttccaaagaatttctaaatgttggaaggtaacaagggggaaacacagaagtcgagtggaacttcacctcgggtgtatgcagtaacccagggagacaatgggtaggaacatttgagatggtgttaggtcagatccctatcgctaaatccttagcatatgcattaatggagcatctaattctgttatttccctttcccttgctaaaatgttagatagagtggttgaaccaatcaattgtgtatgtggagtatccctacctttaagagaaaatatgcttgttaaatccttgattagtgttatgcatgtttgggtagagggtcgggagttaacaatagactaaattatattagatacacatgaatatgatgtaacattcataatggactggttgaccaagtacgaagaagtggggaatcgttgaaagaggcacctgactttcataccaccggaagaagcaccatacatattccaaggtgttggaatatgttttacc

SEQ ID NO: 379784 - DNA, 2726 bp, Cannabis indica
gaggtagtaggaaattttgtctgctcccaacatcttttatgaaaagtaatctggtagctcagaatgatattgagtctccagtgatatgaaatttaaaggaaacttaataagtattggatttgataatggtattgttcaaacaccagagagtaaacattattgataagaaaatgagacataaaagtatgctatctgtagagttgcattgctgtgagttcctattgaactgttgatctttatttatttcattggtcctttgtgttttcctgattattcggaattatttgggggcacttgcaatcaggtcttgcagatcatgataattaccatgagtattgccgtcttcttggtcgcttccgagtgaattatcaggtactattatcaattcttcaatgtcgcgtgtcccttttttggctactagtgcaatatagcttgttgtggtttatatgtctatgtacatctatacataaacatgcaatggttgcacattttacatgcattaaatgtgattttgaagccacatcttttgtttatattttaactttgttgcagttgtcagagcttgtgaatgttgaagggtatagtgattggattcgtttagtggcagaattcactttgaagtccttgcaatcttggcaggttcgtattatcatttatcagtgctaacacgaatgttgcagccaaaagagtaccgcataaagaaggaaaaagtagagacaagtattgcacacatcctcacataatatttcagatcaagcccgcacagaatatttctttgacagattaaagtctcttttctttttgttcctttatctttaaaataaaataaaattatatttaataaacaaagctcaagaaaaggttcatctaagaggggtagcttaaaacctacaaataattgcaatagttttaggattaccatatatagggttaggtggggagccccagtttgatacttgggcgcactagtgagtttggaggatttgtaggtatacatataaaaagattctacttgaagtcatgacaagtttttcatattctgacagtgggccagcagcagtgtatattatcttctggggctatggtctagattagtgacatctgtaccatatttaaaaggtgatgcacccagcttactggatgagtttgttcctaagattactgaaggttttattacgtccagatttaactctgtgcaggtatacattatatgcttctctgtggactctcataatttgtttttttatgaagttttgaggaaattctttgtttttttcttcttctttctaattgttgttctttgtattttgtaggctggattatctgaggatctgtcagagaatcctttagacaatgttgaacttcttcaggatcaattttgctttccctacttgtgtagattccaggttcagttagttcacttatattttgttattgactttaagccttgagatataaatacttttgattctcaacttctgtttgtgttactgttactttgcttgttgcagtatgaaagtagtagtatgtatatcataaacatagtggagcctattctgcaaacatactcggtatgctagtacattttgactgacatatatcttaaaaatgcaaaagtttagtggtattctttttgctgtgattaatatttttgattgaataaaacaggaaagagctcgactgcagacaactgataaaagtgacatatcagttattgaggctaaacttgcttggattgttcatattgttgctgctattgtcaagataaaacaatgtactggttgtaggtaaaaatctacatttactaagttcactctctctatttatttcattgctttttaatgtcttaaaaattgattttttttgttcgtttaccatccttgagctggcttccctatcttttgcagttctgagtcacaggaagtgcttgatgcagaactttcagctcgtgttctgcaattaataaatgttactgacagtggactacatatccaggtaaagctgcaggaataacatttactatggttttttattttaaacggacactgtgatttacttttgaatgtgaagtataacccttttctaagcattagttcagtgtggtaaaaggcttctccttttattttctcctaggcaatactgttttctaacttactagaccttgtttattgttcagtgtggtaaaaggcttctctttttattttctcctaaccaatactgtattctaacttactagaccttgtttattgttactgtccctcagtatagtaattggtcccattgattcctcagtaaatactttagttttatgtcttcagccattttaaacttgagtggggtgatatttattcctggagcaactatatctccttttcagttagtgtcattataccattatcttgttagggtttaattagtatttgacgaagatttgttgacccttccttttactaggtcaatagtagaaacaacggaagtaatattgtcattatgtaagttaactaggatggtctcatttataagaacttttccaaattatcattatgtaagcagcggaagtgatattatgatttgttcttgtttttcttttgcatttcagatctgtccttgggagttgtctcctttgggcaatcaaagctttgtattcatagtgctcctctactttttgaggttttaacaaaattttgggtggtggcatgtcattgacatgtgtccttgcccctttt

SEQ ID NO: 379785 - DNA, 1150 bp, Cannabis indica
actgtcactgcaagaaattacaaaagttgaaagaaaaaaagaaaaacaaaacaattgtttaaagaaaaggaaaaagtagttaaaggggaaggacgaagcatgagtagtaacattggagacttaccttcaataataatgatatcatttttcttttcttcaaacatttaatcaaacaccttaactacatggccaatatcaagagataaataacaaatacagtccaataaaatcaatcaaacaccttaactacataaccaatagatcaatatacatacatgaccgaaactacagtatcaaatacaagatttcaaatgcaaaactagctcagtgaacagaactaaaacaaacactcagttcaaaaatggatactaaaattaatattaggaatggcaataatatttgatatgggaaggaataccaaatagaaataggaggcactgtttctaggccgtggatgggtgaagtcaaccgtggtggcacaggtgaaacgcagccgccgatgactgctggttttgtttttgttactattttttttttggaaatttactactacggtgtcatcatcagccttccttatcttagatgcaaaagagtaaggtcgtgtttggatgaaattgaataaaatttaaaatgtaaattgaaaattgtaataaaaatgatattaaattatttattatcttgcaaacatgaaatgtatttctttttatttcaaaatggtagaaatgttattcaattggaatgttatttcttaaaaaaagattgatgaataggaaaaaaaattatgttgtttgcttgacaggaataagaattgaaataaataatatttgggtgtttacattattttggaatcggaatcaattattctaagttacaaaaatattttttttatcaagaaaataaaatttctattaatcacaacctagttacaaacaaagaaagctcccagacagagacaaccctcaagaatccaaatttttcactaagttcctctcatgttctttctaattctttttagtataactttaaatttcgtacaatatatcactatttattctattaacaatgacttttactttaaaagagcaactatgatagacacaagatcacgctttctttttttttacttgacattgggaaaaaggaggaaaag

SEQ ID NO: 379786 - DNA, 1729 bp, Cannabis indica
aacaaaaacaaaaacaaaactctatgctcccatttatatatattatctttccaaagcaagcttcatatatattaagcaacccaaaataaatacactttcctagtcctctcactctctccaaaataaaaaaaaaaaaacaactttcgtaaagatttattagttcagaatatatttattaaagaaaaaacaacctaatataaacagagaaaaatataaaagtatgtattaaattgaactgaaaaaggaaaaatgataaaagcattaatagaagggagaatatagataaataggaataataataaagtgtgaaatagatgaagaaagcacaatatgaagatccatcatcttcttggttctattaataggactaaaatatataaaaagaaagtaactgtgaaaaaaaaagttagaaggctcacacaaaaggtaatattttaggtgagtactagtggtcctgttgagatgaatggagtttgttggaatatatatacacacatcatacatatatatatacatgtatatataggtgaggtgacccaggaagtttattggtatgtctgagttttattatctacgcatttctattggttaatgcttagctgtacagtactattgcctcaatatggccgcagttacacatcgccatcttgagtaaaccctagcttatttttaatttagtttttctttcattattttcgacatgtgtagagctgaaggggtggatgtgtgtgtggtgagctatccccttgtgtacttaccatggactctcatttttcaaaaccacaaatttctaatcgttttactgtacgaccttgctatatggctagtttgtgtttagtcctcttcaaaaatcaacaagatttcgtaatgatttttaagacttttctggtcgactattttgtttaatacatgtatacatatatagagacgacgtaccttatatttttctctataatccatggaatgcattcgtagttgaaataaacttttttcaatacctaaaaattaggtaatcaaatcgcccaattggagtcacttattggtgtattgacgaatataccatgataatttcacccacaaattcgtttatcctattagtatatgggtaagtattgacggtaagaactagtgaaactaaaaaattgctagaacattaaagatttactgtgaagtgaaaataaacaccaagaacttaaaataaatttgagagctctaatgaagaagaaaaaattaatattgtattgattgaatgagtatgacattatagtcatttcccaaccccttttaaatttgaaaagggggtctttataggtgagctctattggctctcatttaccagatgatgtcctagtggtcccaagaagaaaggaaggacgtgttgctcttgcaggcgacaactataggtaggattaggggtgtgcataaatcgatccaatccaatgagaaccgaccgatccaattacaaccgaccaccaaacattggatatccaattgtgatcggatcggattggatgttaattttaaatatccaattggatcggatcggatggtggatggggtgtctaaaaatccaatacatccaacatccaatcgaactaattaatattttcatttagattggatgagtaattagactttatattgttatacgtcaaatctatatgtatatacgaaaattaacattaaagttttactctttttcttggattggatggatccagtccaatcc

SEQ ID NO: 379787 - DNA, 4298 bp, Cannabis indica
aaactattaaacttacactaaaatttttctttacctaaactaattacacattacatataattttcctagcaacaaaataaaaatagcaaactcatacaaaatattattttattataaataatatatataaacccaatgatgatatgaataatactagctttttgttgtgcatgaacctcactaaaacttacaaatatggaatattcatcccacaacaaaatatatatatatatatatatatgtatgtatataatcctattattgtttttattagtgtcattactattaataaaaaaaccccaattatatattaataagttatcaaataagctaactttttttttatttatttttcttcatgtatttttttattctcatccaacatatccaacactcaatcaaaaagagattaataaagaatttcaccaactttagctacacacaaattttaatttaaatatatgcttgtttcgaaagaaaaatttgatataccatgcttaaatagtgtgcatgatcttttaatacaccacttgtttaacacaatgaaagaatatgctactaataattttttaattcaattatgcccttttataattaaaaaccaatttctctcttgtctctctttagaaaggccacaatcaccacactcacacacagtcaccctccagaacactctcgtcagtgctcccctcgttatccatacacaaagaccttgcactaaggaaattattgaaattgccatttaagaatcaaatccttaacaaaaaaaataataagtatgtaatttctttattaattgttgttagatttagttgtatttagtttgatatgtatagtctacacatctatttttttggtaattatgtatctgcaatgtattatgtgtttcttggtttttttttttgtgttttaatgatgtttagcgatgcctttagcaatatcaagcgatactagttctagtcagaggttagggatgatatttcaggatatttatccatgtgtcgcgatatagccttggatatttgtgtgttagataataaacaatgttttgcaatgttgtttgcgatatgttacgatgatagtgtcattcaccgtcactgttgatgtttaacgatagggctgttcatataaaccgggaaaccgcggtttaaatccggaccactacaatccgaaccattgtaaaccgtaaccggggaaaccgtttttagtggtttggtcaatgcggtccgtttacgtcgtaatggttcgattgtggttcgtaataaatagttaatggttaaaccggaccggaccgtttataataaataattaatttatatattttttataaatgactatatgtataattcagaacttttttgtgtgtcaagttttttattgcatgatgaattttagatttttatgttatgtttgacttttgagaatatttttatatcattatttatatcttatagatttattattaaatatgtattttgaaaaataaaattaaaaacttagtaaaaatagtacaattactaaaaaaatataaataattatcaattccacattaaccgtggtttcgaaccaaaccaaaccgttttcttaagggtttggtttggttttagaaattttttggtctggtttggtttctaatattgaaaaaaccattatactggttcggttcaaaaactataaaaaaccgaaccaaaccaatccgcgaacacccctatttaacgacatttattaataaattttagtcctgcatcacaaaacatttatggaaagtgttgaatgatatcataaaatgtcgcaaacaataatattagcaatacagtttgcgatatcaacaaaaaaagaatgcactgttgggctcattgcgatgtctaacgacatattttgatttatttgaggtttctgtctatttgatttatttgtttggattatttttgttagttttttacattttatcgatgtcttgcaatattgttggcaaagtctaatgataactattctattgttgttgatattgtaagacattaaaagcgatatcgcaacaaatcgataaaatgcaaaaaaccaacaaaaattatccaatttgacagaaactttaagaaagtgtaacatgtcgcaaacaagtcgttagacatcgtagagagccccttaatatttacacaattgagtattgttatccatgtcggtgggtgtatgagaatcaactgtgggtggctcgggtattgttatccacgtcgacaacagtctaagtgtagggaacttgatggttggccctcaattttggggcttcggggtggttgtcgtggatttcttggttttcatatcaccagaagttgtcatcgtaaaatgtcgcaaacaataatattagcgacatagttggcgatattagcaacaaaagaatgcacttttgagctcattgtgatggctaacgacatgttatgatttcttgagatttatgtctgtttggtttttttgtttggattatttttgttggttttctatattttattgatgtcttgcgaccttgttggtgatgtctaacaataactattttgttgttgttgatatcgtaagacgtcaaaaacgatatcgcaataaatcgataaaatgcaaaaaatcaacaaaaattgtccaaatagacagaaacttcaagaaattgtaacatgtcgcaaacatgtcgttaaacatcacagggagcccctcaatattcacaatattgagtattgttattcacgtcagtggatggatgagaatcgatagtggatggcttgggtattgtagttatccacgtcgacgacagtttaaatgtggtggacttgacagttggccctcgattttagggcttttgggtggttgtcatggattttgtgggtttcatagtactggaagtcggcatcaatgtgacaggcaatggggtttgtcttcagtgcgagctgggtaatgtgagatggagggttggtttttcgggatagtggagcactggagatgggggccaaaacgtttgggagggaagatggtagttagataaagagagtgtgagagttagagagagtgctttttaaatgggaaaggtattcttgaggtttaatagtattgaaagtatattttgcttattttttttaagtggtatactaaaaggccatgtataccatttaagaatggaatatcaaatttctcatttttttttaaatgaaaaattaacttcataaactcaattgctcaaagtataattttgagttccaaaggaacattctccttcgtgaacatatgctcagcaaaccaacaagactgacgtacaacaacatgtgcagctccattagcagaacttttacgaactttaaggagacattactctagaactcaacaaatttctcttttaaaattagtacacatttccttgtgatatcattttatcaaaacaattaatagaaaacagtgttactaaatttaggcttttattccaaaattaattaattacaacaacaaaaatgatcatcatgattcattggccaaactgggcaggtactgacctttctaaagctctcgacacataaaagataaagacattaataccactgtccaaccccacgtgtaaagagtaaatgttttattattgttcatttacaactgggccaaattttagctggttttgatagaaatatggctacttcggcccatattatctcctaaatatgtttgtggaccacacatacctgtctttaaatgcatgtttttattataactttaacaggttacctttgtttctttgttcataataaagcttaactttcgttagagtcaaaaagttagttaaattgcagctttgtaaagtttgcatagaccaactttttgtaaagttaaaataataggattgatatatgcatacaattgcatatgtttaacatgtaaacatatggaaattattggcccacatataaagtacgtcaattgtaatataaggggtaaatgcaaaactattgaagaaaaataatttaggtttttttatatttttgcataaaaaatttatgataaaaatatgataattttagtaaaaagaaaagtttaaaatatggtaactatacattataaaaataaatgactataaaatataatcaaaatttctaaaatactattttttttatgttttattttcaattttatcgcttaaaatgcaaaaagtaaaaaaaaaaaaaaaaaaagaaactaaaatacaacgagtaaaagtaatcaaccttaggacaactataaataaaccataaaacaacaaaaaaaaaccagaagaacaacttcatgacaactataat

SEQ ID NO: 379788 - DNA, 6240 bp, Cannabis indica
tctctctctctctctctctactgagtatgattttgtgttgaaatggtttgaaaaaagaaacaatcttctattgctcatatacaagccccatatatttacactggcagtggcattaatctcaacgtcacaaggtaagtggaatcatttacaagccttttatgacctaaaaacatcaatgagaaaaggagcttgcctcagtgctatagattgagtattcactcaagctgaagttacctctctcttcatcccatttcaaaatctctctcgcgtatttaagtgatgcatcgacactattaggctgcaaaccccttgccaacgaaacaaacaacttctttccggttagagatgaatacagccttttaaatttcacagcaatgtggtggaaaccaagctgccctaatgaagggctgtggttgatgctgttactattgctatttgatcggtgtcggcttaccaatggatggaaatcactaaaccattcacactggcttaaagatactctttcaatcttttcctcgaataaatcaaatttgtttagtatcaaaaggaagtccatattttcaaaggttggatgtgtaacaatgctctcaaagaatcgcttcgcctgcaacatcttgttagtgaaagatccatccgcatcagaagaacattgatcatagtcacttaatgagacgcagaatatgaccaacccaacatcttcaaacatctctagccacttgcagttttctccaagccctctggcatgtactctaataagttggtacctacaccaacaaacaattacattgaggttaataagaaacaagtgaacacggaaactcattaattatgcagattcaatgaaccctatgagaaacagaaaaatggaaaataccaaacctacttattgggttatgtgatcaagttaaataaaacttaaaaaatggggctggtcagtaccaatgtagcactgccacccaaaattaccaccaattcccactaccaggcccaatctaacacattcaatgaatttatacttgcatgtataacaaagtcaagagtattacatacaagcatgatatatattatcatgctttatgcactggtaacaaattaactaccaacctagttaaagaatcaagttgatcagcttcaatatcttcggatgatgactggggaaatgagaagtcaacacaagcaagcccattggatgaagtaacaccctcagcatagagaatatccaaatctgaaggttcataatccattcttaaaatatcaactgcctgaaaggttataaaaacaaataatattagatgcatgaaaaacaaaacaaaatgcaataattgatcatgtatttgcataaatattagaaggataacaataaacaagatccaattgttgttgaaaacctttgacaaatctcaattagcaaaagctcaactcattcatccaactttgaactttgtgctcaaagtgctaacttatctaaggttcataacttagccaacaacaaaatcctaagcaaccatccttataaactggttgttaatgattccggactaagaccacctacataaatgtatcatgtttgcttgtttactttaaagcagcatagatagcatcaagaagggtaaagaaacatgacaagaattcacagtaccacttaagtgtagccatataaagacattgctggtctttacacagtatcatacaagaaatcttgcgttctttagattttttacattcttaaacgatttctagccttatcatataaattgcaaacttccaagtctattacattaatcagaaggtaaacagtatagctttaaagaataatgatttttttaacaagaagaagtcatgcacaaatgacaaaaacatgatctcacccgctctaagaagtaacttgctacactaggtagcatttctagttcatttttccgtttgtatgtggcctgaattgccgcgtcattccataactcttctactaatggtgcatattcacgggatgcagctgggaaaatggcttcaagattgcctgagaccatagtcttgagaagccaatcagagaatgatttcagccttggaccgattgagtacagagttttatcatcattttcgtcagaatttcctgttaccaacagaaactcaattcagttgtgatttactaccagattcccactatctatcgttgtatgtctggaaagtggtatcattttctatgtgtttgagaactggcaagacaagtctactcaaagaaaatatggaagctgaaaccaaataaaaaaaaacctaccaagagagtctgttccacgagaagatcgtttcttccttgtctcagccaaacattcatcttcaaaacgctcacggccctcaagaagtacaccaagatagccataaacattgctctggatccttagcttgatattctctcgctcatcatccggaaaaggaatatctttgtatagaattttggccttaaaaaaaaagaaaaaatatttaagttgatacatatgcttcttttacgaaatagaggtacccaaatgttttagttagttatgcaatgcgattccatatggggacgtaatcctagcataacaagaacaaaaagcataagaagttcagagatgagtttgctataaatctagtacctgcttaaatatagtactcgtcccagatccattataaccaactaaaagaatcttctgaagtgtcctttgctcaaggtagtcaggaacaggtctgctagaaagactggtcagcggctcttcagaagaattaaaggatttagaagggactggcagtgacaagacagcacagacaagctttgttccagcctgaagaggaattaaaagttcaagggaacgttaatatctaaaaaaatgtagatttcatttagaacaacaagaaaagaaccatgtttagtcagacaaattaccttgccccatatatatccttttgtattcttctgtccctcttcttggtatgacccatcttcatttacccagaaatgtggattaccagcacattgcactcctgccaactgcaattttcagaaaaatatattataagtctttgccgatcaacaatcaattcacaaaatcagaaacaactaatgaagcctggaatagctttaacctgcaacattcgaagctctacttttgtaatttcccggccatttatgaaaacttgagtgtttccattgcttgcatctggtagaattggacctccaacattaagatgtggactaattattttcgaaggcttctgtccctcctgttaaaatcatccaaaaataaaaaattaattaagtaatggaacaaactttgggcaacagaagtaataaattcctcaaaagcaccatattcacctttccccaaagaccagaaactttatcataccaatagtttcctggtttcaacttctttggtggattttgacaggtttgcagtaaaaccagctcctcgtgacaaagaggtttaccattcacacaaacatactcgggtggtagctgatttgcttcacaaaacttctcagctttcattatctgcctaacctccaaatcattcagaagtcttttaagcatccgagagcactttcccaaattccctctctttgattcttctatggaatacccaatacaagtaacacatttccgaccctctggcattgatcccatagctctaagtacacagctactacaatactttgaatcacaaacaatgcagacctccttttccgtaaatcgatttcccttgaagcatctataacaagaccctttctttcccttagttaaaggttctctcctggctggaacaacattaggttcttccttgctaaattcttcatcaacagcatcatcatcatcagattcaatatcgcgaaatgtcaccacttgaggccgtcttccatcagaactcgaaacgttattacaatccgcagcctttatagaagaaacccgagaagacgggtaatccaaactcaacactgattcggatgaggcccaatccggttgatttaaatcattcatgtctaaactttcccctcttccaatggaagccctcaaagctctagaactacctcgcgatttatcaaaactatccgaaaaatctatggtgctggagctcccagcgccagctaacaaatcctgagagtggccatgactaatggaagaggaaccaattactcccatcgacctattagccccgtctgacaattccccagacccaaaatgcccattagaaaaatccaaagcacctgaactactcaactcacctgacataacgcaaccaccatcatcacgattctctgtagctctctcctcgaatccattaacagaattcggagaaactgtagaacccaattccaactctttagacgaagccgaatcgccggcatcctcttcccctccactacgctcgaaagcgatcacagaagtaggagaaaccgtagttttagaagaacctaactgttcaagctctttcgaaaagggcttcctcaaagaagtcggagccaataccggttgaaccacaggcaaggataaagtatcagacaaaggtacctgcgaaaccacagccgccacaggaatccgctcgacgttgataggaacggctcgaggaatatcatagttcaccggaggaccgtgatactcgacagcgaacgagtactgaatcccatctccactatttccggaaactgccatttcctcaggtggcattctctctctccttgttgagaccagattaacaaacaaaacaaaccctagaaatgaaaaccaaacaaaccctagctaaatccgatacctaataataacgaccagtacacagaaaaccgtaccatctaagttggagcagtaatcataaccaccaccaccatagtagaaaaaagaaagatccaaaacgaatcaataggattggccaaaaaaatcttaagctaactactcaaaagcaaaatcaatctaagaagaagaaggaaaaacaaaagctggcgaattttaaaacagagctaaagagattcgaggaattgaaaaatcgagaatggccaaaaacaaaattattcagtggaaaatgagggagtggattttgaaatttcaggaaagacgtgtattgggagaatccaaaagctacagaaagagagagaaaggaacaagagttttggtgtttggacagaaagaaaatgtgttgggaaagtgttggagattgaagaaaaagacaataacattaaaaaatttttttggatggttgttggaaaaaaagaatgatagagtgggaccataacgagatatgtggggtccattaaggggtagttttgtcttttcatacggagataacggtatcaggcaaaacaacacatgggctttgctgctgaaaaatagttctgaccgcatgtgagccatattttagtttccatgatcttcattttgtttaacttatatcttggattaaccaatgaattgtctctggaatctgattccacttggtttgggcaattatcgtctgtggagtcgtgttttctcgttaatgtgaagactcagaaactgggactccctttcatttcatgtatgcattcgtgtactgtgtagtgtgtactatgtactatgtactatgtaccgttcttccttcctataataactgcactataattcactagctgtagtttagaataaaaacgacatgtcgttttgtttgaagaataagctaagcaatttttctttctttggtgaaaataggtaattatcaactaaaaagtgaaatcataattaaaagtggtggttgtgaaacatcaatattcaaaaaagtgacggacctgacctcatagatgaaagaagaaatggatacaagagactaaataaatggtttgttgttgttcagaatataaaagataagtagttttgttagtacaaatggtaataaattaagggaaatttgttaaaaatacttaaaaatttagattattcttttaatataccacctttaaataaatattttaaatattctctaaacaccctaaagtcccaaaattacccttacaattcaaaagctctcttctcccactctctcagtctaacttcccacctctctctctattattcccatccagcgccaaacctttcaagccccgactgtcacgagctccgaccgaccaagacgacccacgaccgagaagacccatgacgactcgcgacgactcgcgacgacccacgagaagtacccaagacaacccacgaccaccgcattttttttctggtttctgacccatcta

SEQ ID NO: 379789 - DNA, 5035 bp, Cannabis indica
caccacactgcatcattttttgcagtgcaatttgtgcaattttttagttttgcgatgtgggtgtagtttagaaaattaaaaaaaccgcatgtgtggattgatttgaaaaaatagtcaaaaatcacacaccacccacatcgtgaacacccctaatatacgtatgtatataaatgtctcatgagtgaacgagatgggttccaagaatggtctcaggggacctaggcaaaattgagagagaactagggtagtcaatacgaggagaaagttgcactatggaaagcttttagttagagaaggtaagcctattgcccaaattgattcagatgaggtagatgaggaaacatcatataggtagattgttattgtttgtgttgtgttaagggctaacccaacttttgttgtatttgagggctttgttaaaaagaatatgggggcatcttagtattgagaagattgtgcttatgaattctaattttacaatttttaatttcagagatgagactactaggaatgttttagaatctgaagtagtgcattttgatcgcaaaccaatgattttgaggccttggtctattgattcatattctcttaaactaatttattcaatatttatttggattagattacataatttgggtctccaatattaggtttataaatgccttagtgctttagttagtacaattagaaaaaccaattatggttaatattgttgagaggttaatggtaaagtttgtaagggtgttggttgatatggtgatctcggataatcctcctagagttatcaattttcttaatgggtaagtactactccttcgatgggttaagacaatttagcttatggtgtgaagattttttttgaagatattaggtatttacagtagagtctcgtggtaagaaaacattttttcaatttgacctggttacgaatcagaaacgtgttttggaaggaaggccttggatttttcagaattgtttgttggatctaaaggaaccagatgagtattcatataaaaaaacgatggtgtttgatctggatgatttcttggtacaggtccatgtccaaagtatatagatttgaattaggcaaaaaccctttgccatgtgtgatcgaacgacgtttggcactggataaaacaattatcttctttcctttacgttatgagaggttgtcgaaactataatatttctgtgatactctagggcgccccatgaaagaaggattatttaagccaaaggatgttggtggagaggaacaattaaagtatggtgattggattcatgctctatttttggataaaatcaccaggctggtttttaagaatctcgaggtaaggatatgggtggttcttcgtcgatctctggtgatgtggtcgagaggggtgtggtcagaaagggatttagagggcgcgattcttcttctgctgcaactgtgatgggggtatcttctaataaaggaaagtgtattgacatcaatgcgctatcgaaatggcacccaatctctcgaatctttaacaaagaaaatatggaaaaagagaatcgcttggaatattctaatataaagttatcttgtaatgtatcaaattccaaaataactgttcaatcccaagatttgagtaaacttttaattcaaataatttagtatttgataataagaatttagatagaccttgtgtatcaaatattaggatagatagtaatggggaaggctctacttctaagatgattgatgaggtgcccgttgatggggttaatggtggggtctctcatatggtgccttctagtcctctacattccgatgttggtattttgaatggggcctaggtgtaataagttactattcacgtatctcccacgcaagatggtccttttggtgctaatggtttgaggttggctaagcattatggaccgaatatgtctttacagtctgatgttggatctcttaggcgtgactcttctaaaatggcaataaaaaaggtaaactcaaggtttctttcaatgacaaaagtggtgctttacaggtgaagtccaaaagctaaaaggctaaggagctacttaatcctatttagctcttacaatggctcctgaatgttcacatgaggttccagtgggtgtggtgacttgtactcgactgaatttgatgatggtgtagggttggtggtcttgtggagctgggccaccgcacattataaatttcttatcttggaatgttcatggattggggaatgatcgaacgttcaaaattttaaaatcctacgttaaatagctttttcttaatattgtttttctttttgaaactcacatctctcactcatctttagaattaatgcgtgtttgtatgggttttgtaagaaagttagggttgagaaggtgggtcatagatgggatttatgtttgttttagattgataatcttaaagttgtcttaaagggttattctaaaattcacattgatgttatggtgcggtctcatggtgatgtttggtgggtatatattggtttgtatgggcaaccgactgtttgtttgcattctcaattttggtttttgatggagagattgactgtggtttttcagcaccatgaatgagaggtgatgatttgaatgaattctctatttgcatgagaagtgtgggggtcctctgtgggctcgaggtcttatagatggttttcatagggccctctctaaaactggtcttattgatatagggtttgagggtgcttggtttacatggtgtaataagcacaaggatggtactttcacttaagagaggttggatagaatgatttgcaactccaattggcaatctttgttttctaattcctttatttctcatttaaaactttggtgttcagatcatagcccgctttttatgcttgctaatgaaacttgtgagaagccacaattcaaggttcgattttattttgaaacgacttgggtggatgaagataaatgttgtgatattttcacttctcactggaattccttaacgggtggtagtattggtggcatttaagagaaaattaattaaagaagtgtccagtgtgtttaagggtggaatggtaaggtgtataagcgaatacatggtacaattaaagaaaaaaaaagagttgccttgcttaaataaaaatcttgatattcactcatggccgaatcattaacaaacgaaaaagaattgatgttttgatgtataaggatgagaagtattgggccttgagagctaagaattcatggcttaagtatggtggcaaaaaatcttctttatttcatcaaagtgcttctcattgcaaaaagaagaatcttattgcatgcatctttgatgataatatgcaatggatagaggaactttgaggtattgctacttttttacggtattttgagattttttttatgtctcgatggccttctatggatactatgaatcatgtgttgaaatcggttcctatccaggtcacaaatgagttgaataatgttgatgcggccttttactgaagctgatgtgcatgttgttttattccaaatgcacctgagcaaatgtatgggaaaagatggtataggaactggattttatcaataattctgaaatattattggtcatgatgtgtgtcaagcttgtcttggcttgattgatgaacttgtacatttaattatattaatgaaactattattactttgattcccaaggtgaagaatcctactcgagctaatgatttcaggcccattattctatgttatgtgctttataagattattgctaagatgattacaaatatgctccatgaagtgatgaataatagtattttggaagaacaaagtgcttttattcatggtcaccttatttatgataatgctatgattggttttaaatgtctaaattctattaggaggcataagaaatgtcaaaaaggtttattagcttataagactgacatgactaaagtctatgatagagttgattaggcttttctcagtggaatgatggagagaatgggattccattcgggttgggctattttgattatgagatgtattaccaaggtgtcatatgttgtcaatgttaatagggacatcattcgcaacactattccttcttgtggtcttatgtaaggggaaacactttcccctttcctttttcttatttgtatggaggggtttacttcaattataaagcaataaatctgattgaatagcatctccagtgtggtatacggtcggcattgtcctatgattttcattctcctcttcgctaatgataatttctttttattggaaactactttggaaatctaatttcaaggaatttcttttactttacaaaactcctcgggccaacttgtgctttttttcacctcatatgtttgggtcactttttgatactcttcgcctgtactttgggagtccccttagttcattgccatgataaatatttgggtttacattgctttgcgagtaagagtaagagtgggctatttcaatcaattaaagataaaatttgggataaattttttggttgtaagtctaatctctttttgtcaggtggtcatgaagtgcttttgaagtatgagatacaagttatcctgacttatgctataaatctatttcagttatccattagtattatgaataaaattcttagtatgtgtgcccgattttggtagagtggggataataagttgttgggattttataccctaaataaaacctacttcaatacaatctgatttgttatcaattaaagattagaagtcatttatgtttacatgtagttttcatgtttatggtttaatgtgtacaaaatctgttaaatccagaatatatagttattcacaattacagtgttgtcaacacagtggaaggtaattgtgattataagcttcaaaagataatgtcccttgattcatcagtgcactggatttacactaatgtgatagtctacgataaagtatacttacaccttggataagtgttatgttctttccaaaatattggcaaaatatgctagttttggatgtatagagtatacattggactgggaccg

SEQ ID NO: 379790 - DNA, 4897 bp, Cannabis indica
cacaaattcagtcatctagttaagtagtgcttctatcgattccttcactggtcctgagtcgtttgccaatttccctgccactgctcatgttgcaaagcttcctgcaatgcatgttaaaccagaaattattcttgaagacaactggtaccctgactcgggtgccactcatcatcttacacctgacgctaccaatcttggatccagtacattatacaggtaatgagcaagttcttgttggtaatggtgttggcctaaatattgaaagtgttggtaagtctctcgtatactctcccttctcatctcaacaattaactcttaacaatcttttacatgtcccttccataacaaaaatttacttagtgtatctaagtttgctcaagataacaatgttgtttttgagtttcaccccttttcttgttgtgtcaaggatcctgctacccagatgactttgttggttgggaatcttaaaaatggtcaatacaagtttgactctacacaactgagtattctctctccttcatctgttcatgagaaagcatctcaacctccacctcaatgtcatagtcatcatctttttaattaaagttttgatttttctttatggcacaacagacttggccaccttgctgccaaagttgtaaaaatggctatataaaagtataatataccattgtctaataaaaacttttctgatgtgtgcaaatcttgttgtcttggtaaatctcacaaactgctctttcatcattctactatcacttatacataaccattgcaacttcttcactcagatctatggggccctgcacctattaattcattcaatggctatagatactacattagttttgtaaatgctcattcaagatatacctagttatatcttcttggaacccgtgatgaagccttgtctaccttcacaaaatttaagacacaagttgaattacagctgagattcaagattaaaacactccagtcagattgggggggtgagtttagagccttcactaatttttttgaaagctctggtataatgcataggttagcttatcctcacactcatgaacaaaatggtgtggttgagaggcagcataaacatgttgttgaaagtggtttaaccatgctttctcaagataaccttcctctcaaatgttgggatgagtcttttagaactgttacttatctaattaacagaatgccaaatcctatcctaatgaagacatctccttttgaggtgttgttcaaaactgttccaaatgacactaatctcagagtttttgggtgcctttgctgctacccaaatctctggccatacaacaaaaataagttgcagcataggtctatgccttgcatttttctaggatacaacatagcgcacaaaggattcaagtgtttgtctaaagatagcagactctatatttttagagatgttaccgttgatgaaaatacattcacttatgtcagcaatgaaatgaatcagccaaatcacattgaatttttctcacaatcaaccttagcagctcctccccttgtgtcctttcttaatgtcaacaatccaccaatttctcttattgtcattcgccttgacactaccactatcactacaccagcaacacatatccctaatcttgctattacacaattgccacagtcttcatctactgaacctccactagcaataaatgtcaaagctactgcccttatgtcaacaataacttagcctctccatacaatataactgacacacttgttgacatacctgttcactagtccaccatagccaatccacacttgtctacccccaacactgtcaataatactatgcccactgttactaacagctcacctacagatataacattgccatcgacttccactcatcctatgacaacaagactcaaggcagagatcaggataccaaaggcattgcttgctgtgtatgaaccaaagtctgttaaaacaacattggaagaacctcactagtttgaagcaatgtccacaaagatgtttgccttaaagaaaaacaagacatgggtgctggttcccttacctgaaaatcaaacatgtataggctgcaagtgggttttgagaataatacaaaatacagatgactcattcaacagatgcaaagcaaggttcatggccaaaggctttcatcaacaggctgggtttgatttttcagagacatttagtcttgtggtaaagccaataaccatcagaatgtgctcaacataattttcaccaaaggcaagacaataagacagctagatctcaacattgccttcattaatgatgacctaaaggaagatatttatatgcaacaaccaccagggtttgttgattgagaccatccaaactatgtatgcaagctcaataagaccctctatggcctcaaacaggcaccaagtgcctggtttgagaagctttctacaacgttggttcagcatgtgtatcaattttcaaaagttgatcaatatctgttcatatgggtcacacctcaatcatgtatctacattctagtctatgtagatgacattcttatcatgggcagtgatattgacacccgggttgaacaactcattcatgacttaagttcaacattctccctcaaagatcttggccttgttgactattttttgggcattttggttactaaaacaccagctagtatcttgcttactcaaactaagtatcttcgagatcttctcaccaaagctgatatgcagaatgtgaacacacaaaatacttccatgaacagtggtcttaagctatcaaactataaaagtgaacctagcaaagatgctaccctgtacaggtccattgttgatggcctataatatgctacaattacaaggccagagctaactttttgtgtaaataaagtgtgtcaaattatgcaaaatccattgcgcacacactggaatactgtgaaaagaatactaagatatattgctggcactctcaatcatggtcttctacttagaccagtttcaaatttttctcttgatgtcttatgtgatgcagattgggcatctgatccagatgacagacgctcaaccttaggccattgcatctaccttggtggcaatcttgttgcctggaaatctcagaagcaagacaccatcagcaggtcctcttttgaagtagaattttgaagccttgccaatgttgttgctgaagttacttgggtccagtctttgcttatgaattgtacattcctcaagctgttattccctctatgtggtgtgataatcaaagcacagttcttcttgctgcgaatcctgtacttcatgcacgcacaaagcacatagagattgacctatacattgttcgagacaaagttctacagcagcacattcatgtataacatgtcccagctactgctcagattgcagactgcctaactaaatcaatctcaagcaccaagttttcagagcttagaaccaaactgtatgtagtttctaaaaccacactaagtttgaagggggttttctagggagttggttaatcataacagttactgttaactaacctacactattagctaagtgttttcagttagagttagttaagtagtttcagtttgttcattgtatatatactcttcttgtaactctactcaatttaataataaaacactctcttctttctatctctctctctcactattcttaaacatcacaattattaaatatcacacacctattagtaaagttaaaatttattacagtttttattatttatttatcattttataaaatcataaattattttatatatatcattgaaaaaaatttaaatatccgctgcgaaatgcaaacttattagtttaagtatataattcattttgtgaaaattaaaggataaacaaagtcattttctggttctctatctctccaaccgatcccctctccctttttgcatttctttttgagagaatcttaaagtattgaatccatttctttggaggattttgaaattgtactccatattctaataggctgcaccattttcccacagaacttcacaatatcaacagctaagatacatttagcacaaatacaaaaacccaaatatcaaaaaggcatctcacttttgctaaaacctgaattgaactgttaattgcttataaagcaactaaacgtacaataaatttaaagataaacactctgccatattcctcttctcttgacccaactaataaaacatcaaaattagtgagtttaattaataattattattgagagattatacagcttctcaataacaagacatgacattcaagaacaagtcactaattcatgaacatttttaatattagagacattaataactaaaaatacaaatcagaattctgtcttgattagtattaaaaatcttatattatcatgaaattatttcaacgaaattataatattggtctttcatgttggtcaaattatattataataaagatgactgctctagaataggtcaatttaacatttatacatcctagacttggtcgtgataattatgatgtagccaaccacttctggaacaatctctatcaatacgtattagtagttcataaaacacaaatcattaatttggagaaaacgattgatcaatatataatatataatacatatatatatatatattcattatctctttcatttttaatgcattgaatttatatatataatacattatccaattaattaggtctcccaactgagattgctatcgctctcgccaacaacgatcggaaccaacttaagatctatctatccctagttgactaaacctagctagctaatgggaaaaatcatttatttatatatattatacgtatatatatatatctaattttacatcatgtaaatttccattataaataaaggatcatgaccatgca

SEQ ID NO: 379791 - DNA, 4609 bp, Cannabis indica
aacacagtacacaagtcaaatacttggaattaatggaaaactactttcagcaattattgcccatgttcttaattttgattattcatttatttttgccaattcttgtaattcaattctcaattacttgtttaagttttcaagtttagatcttgtgttttattttattttaatttgattaacaaatataaatatatagtacaattttctttgtacttctcaagtattttatataatctttcaaaaatatagttttatttttaaatataatcacatgatttttttgggggagggggacacaatttgaattgataacttaattaatacgcctctaaaaaaataagatgtgataatttattaatgttaaatttgtaaatccaatataaacggatttttatgtagttttaagtaattttaagtaacataatttatgtagtttttggtaattttaattaccaaaattttatttacactcaaaatttttttaaagatatctcattttaataatttttattttatataaatttatacatttaattgtactaagttttttaaatttttttcttccaattcatattcttaaaaaaatatacctatcaaataaaaataaattacatttaaatattatgaccaaaaaataaaataaaaaattatatgaaattttcttaaaaaaattaaaaaaataacacacataatttagaaataaaaaatacgaaaataaatcaaaataaataattgaaattagcataaaataatatgaggaaaaaaaaatttaaaaaaaatattaaaaagtaatttttaaaaattatttaaaaaaaattataatttttaataataggttatacttatcaatttatagtgcaactagaattcctattttcattaacatgatttatgtagttttatatgataacctagtccaaattcatcctctttagaatttttgtgtgctaggtgaaatttaattatttgtggtgaaatgcgattcttaataattagaagtaaagaaacttaattatgtggtggaatgggtgtataaatcgatacaatttaatgataattgatcgatctaattataatcgaccaccaaatattagatttctaattgtgatcggatcagattaaatattatttttgaatatctaattagattggatgtaatgttagatggactgatggggtgtctaaaaatttaatacatcccatcaaaacaattaatattttcatttaatttgaatgagtaattaaattttatgttgttatacgtaaaaaaatatatatatatatatgtatatataaaaattaacattaaaatttactttttttattagatggatctaatttaatctaatagatattgaatctaaaatattgaatagatctgatctgatccaataatacaaattaaactaatagatatacgtgaaatacatccaatagatatagaatcgatccaatctaacatctattggattggatcgattggatgactgaaattaattgaatcagaataaatggtaaaatttagaattttttacaccacatactgaaatttcttacttttttcttttttactgtggggtggaatttttttcaaaaatattgtgtactgtgttaagttttttttgttgttccactgttatttttagttattctgttttatgttccactgctgttttataaaaagacaatatttttgaaaaaaaattcatgtagcagtattttttgtaaaagttaacccaaacaatatttttgtaagttttcataaaatttaacatttaatatataacgtgatatgatctaaatagacctaaaaatattaaatatgatctaataaacactcctaaaactctatttttatctagtttaaattactccatataatattgttgtgatcttgttcgtcatttacttgatggatatttagctgaagaaaattatacataatatgaaattttaatcaattttaataaattatttttttgagaaaaaatcttcaacatttattcattgaaccaaatcaactaacgaatacgaaaaacgagaacaagtatctatctaaatattctcaccaacaccactcgtaatagaagtagttaatgcatgggcaaagccattcagagatcgcaaaataacattacaaggaccactaccagcaataactaacaaattacaaatctcataaatgattgactgatagacaacattaccacttgggttattaatctagctgacaaccactgttgaatcacaatcaacccacgacagttgaaacctaaatctaatggccatggcaagctggatgtttcgacccaaaatagtcgtaattttttgtgtgggtttttctttttcagttcataattcgtcacccctatttcacgtagtccccattttatttatattgtacgtccttttgttgcataaatcatctgtccttaactcaacacattcttgacgcgtgtctttttccttagctcatccctgcctgtcacgtgtcttgttgtttggtagtggctgctatcatctgtgtccgttggatctggtggcttcgtatcttacttctgcttattattttacttctttgggaaatggttttctttcgtcggaacacctttctgtttaattgtggcgaaatgggaagatcatggtaatggcttttatttgaatgtcttttttcgacgggagtattgtttattttattttgaaacgtccttgctccatgtaacccgactttttctggaggggtggtttatccgtcgcccatcggtgggctggatggaaggttctcttgaaccctgcttgagcctgttcattttatagcttttcatccgtcggccccaggttatatattttaaaccttgacttattgacttacctcaaattttactgtcgtcattcgtttgtctttctaattttggttctttttccgtcgctatttcctcgaggtgcggtgcggtccctgttttgaccttttcatttttttttttgtgctttttactttgtcttttttcgatctcttgggcttcttactatactatccagtagtgggctgttctaattttacatgattattgggcttcaacattgagaatttatctaatttaggcctttgtaccttttacgcctaattgggcatttatttcatttttgccatttttccccccaaacaccgaacagtaaggagctcagccacagaaaccgcaaattcaccaatagctccaactgccaagcaacccacacagtacccgacccatcccgaacaacactgcctagcccgacaaaaccttgtctaggaactatcgcaacatctgtggctagagcaaaagctgataccggcgtcaaccacctaacaaaactctgtaatattggcgcagctgccacttgaaagaagcctttaaatcgatgaggttgaaactttgaaactacagcaagtgtaagctctggcaacacctcaacacgtgaaagtgacctgccaaaaagtactgagttcctatcataccagacccactgaaatatcatcaatgcacgctcaaaatcatcacaagacagcagctttgataacctcctcaagatcaaataattattatatggaccttttgttttttaaattacaatttagaccatgatttttcaaaagagtacaaatagacctaaacttaatttttgtttttttaaccaacctataataaatttctactaggaacagatgtaaaaaaaaaatataatcattcttgtgctacccatagtgccacatagcactattgatgtgaggcactcatagtgccacatagcactattgatgaagtgtcgttttatacttggttagtaattttctataatatttattaaagtaaaataagcgagactcgatattgaattacaccaataacgatattacactttacaaaaatactaggtaccatgggtactctttaacatttctctttaataaaatagagaatctatttagtaattttacaaaagcaaaagatattaatttaactataaataaaataaaaaataaaagtaagtataaataaataaaataaataaataaataaatgagaaaaagaataaagattagcgagtgaaggagtgagtcaacgagcttctttttaggagaaactatgagtgagcagtgggcaccaccacaaaatccaatgggcggactaaatgccggactagccgttatgattatcagctgaaattccaattttgtccttgtagccgttttgtacaactactctgttgaagccacgtggcgaatcttctggacaacacgtgttggatggttgaggccccgtgagttgtggattaattttggcagcctatcattgggatacctttacccaaaaagtgcataacgcccttttcggcagctatgttgaaataaagattaatttgcggcaaaatcttctcatgtttaaaatttttttttgtagcgaatccctttctattttagttttaatacacttaatccttttatttttttttggtagcaaaacccccttatgttttagttttaattcacttaactctcttatcttttattttagtagcaaaaaccccttaaatttactttttttttgcaaatttaaagttttagttagat

SEQ ID NO: 379792 - DNA, 2994 bp, Cannabis indica
atcgtattgaatggaatttcttagaatcggtccttagtaaaattggttttgcggacaactggacttcgttggtgatgaagtgtgttagctcggccaattataaagtggttcatggtggtagagtcatggggccgattactcctatgcgtggaatcggacaaggcgatcctttgtcaccttatatctttatcctttgtgtggagggtttatcttgtttgattaaaagatatgaggagaagggtttcatccatggttgttaagtggcgaatggtgctccaaaagtgtctcatatgttattcgtagacgacagctacttataatgtaaagctactcttcaagaagctacacaagttagagatctcctccatcaatttgagagtgcttcaggtcagaaagtaaatttggggaaatattatattttttatagcaccaatattgtgatccatattagggaggatatcaatacattgttgaaaatgcctcaagcagatgacaagagtatgtatctgagacttcctagtattatagggcaaaacaagtcggctgtgttgggtttcttaaaggatcaggttaggaaaaaacttcaaggttgggactcaaaagtatcatcacgagctggtaaagaagtgttgatccgaatgtgttcttacttccatggagattagtagggatattgaaagtacaacggcgagattttagtggaaaagttcttcggggaataataaaggaatatcttggatgtcttgggagcgcatgtgtcacaataaaaataatgggggccttggttttcgtaatcttcgtgattttaatttagttctattgggaaaacaaggttggcgtttccttaaaagacccgagtctcttgttttacaagtttttaaggctcgttatttccctactggaagctatctctcggcatctcttggaaataatccaagctttgtgtggcgtagtgtttgggaagctcaatctattatccgtacgggcgtttgttggagtgttggaaatggttctacaatcaatgttctggacgaaccatggctacctgatcataattagccttttgtgacttcatgtcacagtacccttcaacatactaaggcgtgcaatttgatgaccattgacaagtgttcttgggatggtgaaatattagatgatctgtttgaagatagggaaaagagattgattatgtagatcccactgtgttcaaaccagtctaatgatgtcctgagctggttaaaagatacaacttgtgtgtattcggtgagaagtgcttaccagttacttcaatcattgaaagggttgtgcaatgaggtggaagcgtctgagttttggaaggctttgtggtctttgaaggtgccaccaaagataaagaattcgatgtggagggcttgttgtaactgtctaccaactctagcacaacttgctataaagcgtgtagctgttaaccctcgctgccctttctgtgatgagttttctgagtctattatacacagtttgatcgcttgcagagtgattcagcaggtatgggatagagtcggcataggtacattggtggctgctgctggtggtgaatttctggactggtgtgtgactatttttaagactttgacagtagaaaatcaatgcctagctgctgcactatgctggaccatttggggagcaagaaacgatgtagtgtggcaaggtaaatcgattaatatttcaacaatagtagcttctggtaaaagctatcttgatcaatggcagtacgctcaaaaaactcaaaactgagtcatcatgggctgatcttcagcattatgatgggatggagcattggcttaaaccacatgtaaatagtatcaagatcaatgtggatgcagctatctttcaaggacataatcattttggttgtgcttttgttgtccaagagctcatggaaggccacacaaagttgcatttgggcaatattgctccgattgtggcagaagctttgagcttttgagaagcattaagttggattaaaaatcaacctcctagctctatttgggtggagaccgattgtttattagttgtccaagcattaagaagctcgactactttagcttctcattttggtggtgtcatttaagaatgtaaagccatgttggctaatttatgtaatgtctcgttttgttttattaagcggtcaactaacagagtcgctcatgagtttgcaagagcgtctttatttttaccctgattgtactttcagtatggaaaatattccaactgagttgttgcctatattggtgactaaatttgaaggttaataaagtttgatttttctttggagatgctcttaagtactaaacccttaacattcttcattaattaattataatagaatttctacttaaaaaaacaaattaaaattagtgtattggatttaattaaataccaaccaaactccactcaaaatgtgtgttttcatacacaatatttacctaaatatcaaaatcatccaattacagaaattttataataggttaagatttgataggtgctaattgcaatataaacctcgcaaatctgtgcgacacaacataccccaaagtccccctttttttgttgataaattaatgacaccaaatgcagtttgtgaaaattattgaagggttaaaacttaaccaaaataataagggttgagaccttgaagtgtcattaatcctcttaaaataaaaattaaacaagttggacgtgccatattatatttaaaaaagtagttgaggtgtgttgaatcatcaagtggcagtaagaggggccaaagattcatataattgtggtttggttcttaataatttatttaattttctttgtttcaaaggagggaagggaagcgtgtggtttggtttgctattatcatttcatcaacgtggcagtgtcatgttacatccctcaactcttctattcaacaacaatataaaaaacaaagcccagttttggttttctttttttttttctaaattttaaaat

SEQ ID NO: 379793 - DNA, 1473 bp, Cannabis indica
ttatgaaaaaagccctttaatatttaagttttcctaattcttctcctactatttcgagatattgtatttatatctttcctataaatagtggaaccataccactgtttaagggggattttttcgcattctatagtagttactctacaaaaatatttgttaactttcttgagaatattaagaaactcacccggacggaccttgtgatcttgataattctctaagtaatacaacaaaaaggaagagtaagctattaccattatttgagggtcgaacctctacaaatttttggtgctcttatttcttcattttattattatttaatcaatcattatcatcgatttaaagacttggtgtcattttggctaaaagtggggtcaatattttggtgcttgcattgagagcaaacaacaaaactttgtttttcccagtcttcaatcatctttgattcgacagacaatggttttgacaaggagattctcaacaaccgaaccacgcgatctaatggcaacaaatcctaatgtccaaatcccactaacttaggggttgacaaccccaacacacgaccaccaccacaggacaatcctcccatagttcctgccaatgttaaccctagggctacgaggatcatgacacccttcactggggtcacgcctgggatccaagagactagaaatatcagccaggcgtatgctagggaaatcgtgcctaatgctggtcaaccctctgtagaagaacctcgagttgatttgggggaaaactctgatttagagattctgatggacgcatttagacaagtccagaatcacaccaatgttctccaccacaattaggaagaaacacatactgcagtgaatcatgtgtttgaacagtagagttgtgaattctaagaatggatggatagacaaactcaatccatgtgtgctcagcaagcagagatcaaccaccgatcaagagaggctaccaacttaatcaggagattccatcaatagactagggggcaggtacttgagaacccaccgctcagaaggatctcaatcagggaaaaacaccttacatccccactagaggacaagagtatagtctagaggaatgcccgactaattatgtgcaatcacttcaacatgatagaccttctgactccaggccccaaaatcatactattgacaacttgataaatgaccaagtcttacctggtcactacctcagacggaacgatcaacccaacttccgtccccagcctgaagggaggaagaggatcacgctcctcctcggccagctaaaggatctcgagggtaggtaaatatatataagcaagatggatggatccaattctatagacagtctcaatatactacgaaactaaaatttaaccgaaaattcagtttaatttgcatgaaactaatgtcctgacttcaattttcaaattcatgaaaggcggatctaaaaatgttgatctggagttcccaaacaatc

SEQ ID NO: 379794 - DNA, 2943 bp, Cannabis indica
ttcttaatcaaatatgcagaaactcaacatcaattgcatgctaaagaagtggccagagcaatagatcttgctaagtatgatggcatcatttgtgttagcggggatggcattctagtagaggttagttgctatgaatcagtgaacacatagatgtcattatggttcaattacagaaattatcaatataaggaagtcttgacatcttgtacttcacattgcctagacgcaaaacattgttcttccgacacctcttgtaaatatgtgcctggttttgttctaagggaatttgatttaatgtgttatcagggtgacttgatacattctcttgtgctttaaatatgactattttaactactatgcattcttgttcttactagtgttgcacactttagtaggtagtaaatggactgcttgaaagggaagattgggacactgcaataaagatgccaattggagtagttccagcaggttcattcttttctactctcagtctcacacacacaaaaaattatttaagaaaatggtttattgttcggttaattattttttttcacaataatgttggaaattactattctactaatttgtagtttttcatatgcaggtacaggaaatggtatggcaaaatctcttctagattcggtgggttatccatgcgcagtatctaatgctgttcttgccattattagaggttagaaacagtgtatgatcacattttttatatgttcataatagctactttggtttatatttggggagaattgctcccttgattaaaagcttaatgatttaactactgataggccataagcgttcattggacgtaaccaccatatttcaaggagataccaaatattttagtgtactgatgcttgcttggggtaagccaaaatccatcattgttctattgaactagactgttgtactggtattattcttgtaaggaattctggttcacgacgactgctggctgtaatcatgtaacatgtttcttttgtttcatatcaggtctaatagccgatattgacattgaatctgaaaaatataggtggatgggaagcgcccgacttgatttctatgtatgttttttaatattcttctctaacatttgttgtgctcaattttgttatactgctgctattactactaattttgtttgtgtatcttagtgaaccattcttactgtgatgattgcctctaatgctagtccattcttaagttcttaatttttaggtgtcactacattacgtgagtccaataattgttccaagctcctaactttttgattttgttttcattccacaggctcttcagcggattttaagtttaaggcaatataacggacgtatttcatttgtgccggcacctggctttgaatcctatggagagcctacaagtgataagagggaacttactagttttaagcacaacgattgtggtccaagtgaagcgacggccatggaggtccacaggcatggctaccaaggacctgattttgtctcagggatttcagactggagaaccatcaatggaccatttatttcagtctggcttcataatgttccttgggggagtgaagacacaatggcagctcctcaagccaaggtgatctggacttcagctatgccttttgttcaattgaactctttcccttttcaaatgaattttcttaatcatcctcagcaatggatgatgtaaaagttaatatctcacattaaacagctttatatagttttaaatgaaacctttatatttgttttttacagttttcagatggctatatagacgtgatcattatgagggaatgcccaaaactacctttgctgtccttaattacccaactgaataatggaaaccatgtccattcgccttatgttatgtacttcaaggtaataagttaatgattatgaaattaatgtcacctagtttagtaccctttttcctgcttcccttaagttgcaaagaactagagtcctttactgtcatactctctaattgttcacaattaactacaggtgaaatcattcatcttggaacctggttcgcgtaccgaaaaccctgcaaaggaaggtattatagattcagatggtgagattttggccagaggtaaaggaacttacaagtgtgaccagaaaaccttgatgtcctatgataaacttcaactgacagttgatcaaggtttagctaccttattctcccctctataagaatttgattctatcaggcagagccttcggggtcacagtatgggatttcagcctaggtaaaatccacatatcagtcagcaattcccatgctgaaaatagttttgtcactacccacttaactgttaatgttaagttagtagactatcttttcagtttaaactcttcatgaaaatgacaaaataaatattattggctgagaatatatagtgaaaaaattatacgagctcttttaccgcacaaatttaaggacacaataatgttgagttcagtctcttacttgcattaccattatgaatgctttcttttattattttaagcaagtctggcattatagtagtgcttatggcctcctttactattataagctgtaacttgtaacaggcgatgtcagaatgctatgacctgcggttcaataccaaatactttagaagtttgacccaaataaatatattaaatatcattttggatcctatattttataatagttactaatttaacttttagttttgttaaatgacatttaaatattgtatttttaaaatagtataaaacagatcttgaactcaattttagacaatttaaagcatgtttgactattgtttttgttttttattgttcaaaaaaatattttagtaaatgagacaaaaaaaaattttgtaaagtttccaaaatacaaatacgtgtttggtctaatttttctaaaaaaaataagtttttactttttttttaattattt

SEQ ID NO: 379795 - DNA, 3955 bp, Cannabis indica
attattacattgatattttttggcgctttgattttttttagtgtactttatacagttataatcttttaattagaatacaatttttttagtctcaaagttagagtagtattaagatttgaaaggaaagggaaatcttatttgaacatttaataattttcccttacttgaaataagaataactctactaaatatgggactataaacatattaaacagaatgcttaataatgaatagtgagacatgacaaaggttgggacttttgccccaaaaagaaagcaataatgagatgattaagtaggaagaattggcttgcaaaatgtggtaagagggctctagcaaccattgttaaagggtgatcgctttcagaataagcgcatcaagaccgcacatgctgtttaatgtaaaatatctcgacattttctacattaagaaggatgcacgagacgcacaaaagcacacaagtaatctatgattattcgaatggttggaagactgaacttagctgagaagagataaaaaaccgtatagacattttgtagagcgtctacatgacatgatctagttaaaaccactatttatacctaaatcccaaaccagcacaaaagaacactacccaccctaatccctctcgggtttcctccatgcgccgtacaactatattgcgaaaataactatccgaaaccacataacattaataatgactaaaacatgcattcaaatgaataaaatggtcataagtattttgatccaaggcaaaatatgcagtctgctaccgattttgtcgttctcaataaacagtacagaagtaacccaagtgaatttattacatgagcaattcaagaaattgttattgaaaggtgtctagtaaggaacaattccaacaaccaaacttttgggacataaacatgagcagaaaactaatgtggggggcacaagacacaatcatacatgttagatacctccattggtgggagtgatcctcttctattctattcttgttagattaagttgatctaatgactgacattaaatttttgtgtataaagaatttgagaaaatagcacaagtaatttagattgaaatacattataacataaccacaagaaggactttcacacagaacattagcactctacaacatcaactattttgtataattacagcttatttaagatcaagtatatttatatttttatatatatatatcacaatatgaaaaggtaaatttagataaaatatctactaagcaaacagaacctgagaacttgagggtgtcaagtcagagaaacaatcaggagcatcaaccacattccattctacaccgaaattccacttctcggagctgctcttttggttaagtttggagatgtgtccaaccgcaacatgaaggtttcgaccaacaacatagatcttgcaatcgcaggcgttcacagcgaaaggtttacaaatttgttctggtaatggaggtccttcaataggttcccaagaatcagtatctaaatcataaaccttaagtttcattctttcaagctctgagaccacaaacaagtgtccataaaccaccacacttgaacctgtccatccttcccttagtccaacagccatactttcccagtgatcagttcttggatcgtaaacttgacctcggggagagacatagaaaggccacaaccagccttcagtaacaagaagcttcccgttgagaactgcagcatcataagaagccatatttgctcccatgttagcaaccgaatgccaaattcctttcatgggatccaaaacctcagcagagttcaactcgaaaagatctgcactgtttcctccagcaacataaatcttaccattaatcaccccactcgcgaaaaaagacctagcagtgatcattcgattcattacagtccagcgatttttctgcatttcgtacttaagaaccaaatcaaggggcaatctacatcagaaaccatacccccacaaacaaaaagagtcccctctcggggaatcgaaatgcatctgaatccatgtggacacaccttgctttacaaggcattgaagggatagtatgccaagagaaataagtgagatcaagaacttgccattgaatctttccagtacactgtggaaagcaaaaacaaagagccaaggatctttaaagcctaattcttttctacgagtgaaaaatcgctctttcctcccaagaaggaaatgccatcttttacaaacggttttgcaagctgagtgactctggaccggaaggcggagtagacaatttagtgcaacatcatctggaagacctggaattaaaggttctcccctcaaagacaactctaactccgacgaagggttcaagaaagaaggcggtatcacagctaacctaaactttggggacaatgtcatctgagactcccctaatttgtgcactggtgcttgttctgaggacaatcgaactcgctgcatcacctctcaacaaatctatctaaaagccttaaagaaggagttcttaagtttgtgatgttaccaatggttttattaactatggagaaaataaaaccattggcaccaaccccaatcagagcaacgaatctaattccaaattctcaaatttctgatcttgttttcaaagattaagtgtgaaagtaaaaaagaatcccaaatccaaagtaaagcaccaaattcctcacactgcaatatcttcacaacagagaataatcataagcattaaggagaaatgtcaataataaaggaatcccaaatttagaaatcacaaaaattaacactcctattctctttccatacaaagctcccacatatcaagataccaactttatagattctgaaactcacacacagacacacacacaaagaaaatcatttcatatgtgtaatcaaagaaaatacccaatacactcaagaatcagaacaaaacaataattacactcaaaacccagaaaaacccagctcacaaattagacaaagattgaaactttcatggctttaacagctgtgaacacccataaaatacaaaacccagaaggcataatgagcttgaacaaccataaatcacaccaagaaaaacagaaaccaagaacaaagcgatcaaaaaggaaagtgattatatttttataataataacttacaagagagcaagaagtattgcaaagagggtgactttgatgaggattgagaactctctctactatttttcttcatataagtataatataatataatatataccgtgtgctatttatttttactcgtttcagaaaaaagattattctattttgtggagaagaagatggttcctttgatttaatgtaaattaataagattagttaaaccacgcgctacaaagaagcgagtgtgccaaggtagtcaaaattagcttagttccatgagtacaatggagaccgtgtgtttcacgcgctataaaggatgtgtgggctttgttgtggaagtgaactgttatctacgtggaagatttagaaagaaagaagacgaagaagatcagcggctgtcttttgacagcgcagccaatgatgttaaaaaatgttttatttattatcttatgtgttttgttttttttgtcaacttatatgtgtttttttggtaatattttttttgaaaaattatttttttttttaaatttacggttttggttgttttagtaatttctttagttatttttatgtgtgttgctatgtgaaatttagttgtaatttaggttgcttccttaattgctatggaatttttatgtagaatttcttaaaaatacaaaaagaaaactattttgaagtgtaagaataaaaaaaatttctatttgttctagaagtgtaactgcattgtaaataggagtgttcatccaattcaatccacactattttatatagtgcatctgatccacactaagtgcgaattttattttttttagatctaatccaatctgcaaaagtacgga

SEQ ID NO: 379796 - DNA, 9465 bp, Cannabis indica
tgacatgtgttcttctagttaactaattatgatttggacacatacctaactttaattggaatgtatgtgaaactcatacatcaaattcttatatttattaactaaataattaaatggtattaatatgagacatatatagaagtacaatgttttattaatcaaactataattattgttaataattaaaatctatacttatgacccacaattctaactaatcaaatacccattttattaattaagttagaattaataataataataataaataataccataagaatttttctctctatttataaatgaattaataaataaatagaaaatagttttggtttcttaaaaggattgatagttttgttgtgtgttccttcaatatgaagtaaattattggataataaaccataaataacatcatttcatgggtccaaattagttgttgtaatcacatgagtaaaaattaattaatattccaaaaccatattattgacttcatcacatgcaattcaataaatattatgtgaaagtatcattattttttataactccataataatctcagggtttttcaaaaataaaagtatatttatttttattgatttttttttatcccacactagatatacatatacaaaaaaattcattaaaaatggtataaattgatttattatatatatctatttattttgtaaaatggcctcaaaaaaatatcgaagattttcagcatcctttctagtattaaatatgatattgagcgtgtctaaaatatcattttgcgaataataaaaatatgataaaaaaatatttatttttttaaagctaataatatggtaaaaatcattgaaaaatattacataagaagagtaattagtagaaatacaatactatttcaatatcaatttatgctaatattatttttaattttgtttataaatagtctctaattttttttttcggtattttctaacacgctatctagtattaaacaagatatcgatcctatttaaaaaataataattttgtgaaaaaaagaaaatactttactaaacattccttatatagaattacattaaatgtaatacaactaatcaagacttaaaataataacaatatataatacattaaaagcaaaaccttgattttctttgttaaactaattaaatattaagtgattttattaaaataaaataataataaaaaagaataatagtatggtaagtgacaggtccttatccaaattaaaaaaaaaaacacaaaacactcatatctagttgtcctttaatacaatattttttcaaagtctaccacttcttattttctaacatacaaaattttaaaattttcattttttatctaaaataaaataaataattataaaaaacaacctaagccaccagaacaagcttattataaaaaatataaatttatatatataataaagagtaatttgtagcaaaaaatatcgaaatttaactgcaaactgtaaataaatatctaaaattaattttttagtattgtaactccctgactgttaaatgtcaatttattatccacgtgtcatttttttttattggtatatagaaattatttttttaacaaaaataaaaatttaataacctagaccaatcattaccacgtgaaaatttacttaatagttaaccgtaaatatttatttacaacgtaagttcaattaagtatttttattgcaaattatataacaaaatatttatttgtttttcttcttaaaagtttttgggtctccactcttctcctctttctccacatcatcaccaccacagaataaaccgagggtattttcgtcatttcccacaacccccaaagccgaaagaaagaaagaagaaagaacccatttttattttctcaagaaaattataaaaaaaaaatccaaaaataaaaaaataaaaatcacttttttatttttttttctttctttctctctgagctgaatctgcaaaaattttctgggaaaaattctttctttctttctttgttgaatctccaattggttactttattttttttctttccagtggaaaattcaagtgtgagaaagaagagtactaaagagtatcgttgctttgcttgaatttgaatctttctttgttcggttcttatctttgccggaaggtttttgttctcagactccgacgccggaagggtttttttttcagcttcttctatggcgaagcgtggatataagctacgtatcctttttattttcttgaagttatgatttagctgaaaactgagctttgtttcgatatattcatcatcttcttttcatgttttagtgttttgtgttcagagcaatctgttgttgttgttgttgtttttgttttggaagaactttaattttctgtttggttagtgagaaaatgttaggaaaatggtgaaagtattggactttaattaattttcagtttaatgaagataacgtttttaatcaacaaatctatctattgatttgggtaattagattttttcatctaaagagaaaaaaaaaggtcttaaaatagagttttctttatatattgtgtgtgtgtataaatgtattttccttgactaattatgaaaaaattaaagaggaattttcagctcattcagggaatgtaaattgtctaagtattggaaaaaagggttgtagacattttgtgacaggaggggatgatcagaaagttaatgtttggccaattggaaaatcaacttccttaactgtaagtttattgttgttatttatatgtgaatttagtgcaaatttataatcaaaacacatgatgatttttgtttatgaatgtgcattgcagtgtctaactggtcatacaagccctgttgagtgtgttggttttgattcaacagaagttttagtccttggtggagcttctaatggtgtcattaagcaatgggatttagaagaatcaaaaagtaagttggctcgcaatcattaatttggtattagaattttgatacaagatagctctaaagaacttagatgtaaacttagaatagttttgattcaagacttgtttggtttaggttacttaatcgttttttcagatagaattgtgcgattctcgatacacatttgaaatacaggtttggatatgaggtgataattacatatggattactaatatcttgtttgtcaaatagttagtaattacacgagaaaataatattcgtttagtagttaatatttaaaattaatttttttttagtaatgtaattacactattctcaaagagtgtaactggaacccctcaattatctccaattacacagttacagtacacaacggttttccaaatgcgtccttagagattttgtaggtgaaaacttgttgtctagaagcattgttgtataatggtgagaggctttggtgttatttgtttgtagactttaatgtacttcttcttgttattgaagtgtagtggttcgcacgctttctggacacagatccaactgtactgctgttgaatttcatccttttggcgagttctttgcatctggttcgatggataccaatttaagggtgtgggatattagaaagaaagggtgcattcatacgtacaggggtcatactaaaggcgtaagcaccattaaattcactcctgatgggcggtgggttgtttctggtgggcttgataatgtcgtaaaggtaatagttgctcttgagctcgatcaatcgtgacaacatttattataatcaacaaagacttaccactattatgtaggtgtgggatcttactgctggaaaactcttgcacgagtttaagttccacgaaggagcggttcagtccttagattttcatcctctggaatttcttttggccacaggtgagcaactacctgaccttctgctagtgttatcagaataatatcgctcggggaaattttattaacttatgccgtatttgtacaattcctttttccaggttcagcagacagaactgtcaaattctgggatttggaaacctttgaattgattggatcaacccgacctgaggtacatattattctattgtctcgaagtgaaagtttttcgattaacaatgtgttcagtattctctaactatggataaagttggcatagaaaagataatatggattccatgttgaacatcaatttcccctggcgaaaacatttttggttcttgtcacgaatattacattgttcggtaatattaattttaaacacatttttctttcaaggcaacgggagtccgtgtgattggctttcatccagatggtaggactttgtttgctggactagaagatagtttgaaggtttggatttgtttcatatcttaacatcttcaaggattgtaccgaatagaacaatacttcattatttaactttttgtttctttctcggtaggtctattcgtgggagccggttctttgtcatgacactgttgatatgggatggtcaactcttggtgacttgtgcattcatgaaggaaaactgttgggatgctcatactaccaaaattctgttggagtttgggtagcggatatatcggtaattaccttaatctttttctcgcgcgtcgttagaatttttagttgcagtctttacttactaaatcttttgtttgtatcagcatattgaaccatatggagatgcttctcaaaatgattgcaccgagccaaagcttaatcttaaactccaagagagctcagagagagcgccgaccatagtaaggacttcaagtttgcgatctcggtctcctgattatgagacaaaagaaataaagaacatatatgtggactgtaagttatttgtttcattcctatgcactagaattcttaagcctctaaaccagatttcaggaatttattgttgcttgtgaaaatgtgttcttgtcttagctgctggaggaaagcctgttgctcggccgaaaattgagtctttaacttctccaaaagtgtcaccccatttggatacaaaggaaacggatgatctggtgacaaagaagccaagtcaagcagttaataaatctttgttagtgccaagcgttgtaccccgtcagagttctgatgggaaagattcggccaattctacgagtgaatctattaccttttcgaggactaaacgtggtatgttacttagaccggctcatgtaagaagaccatcaaacagcagaaatgatgtggaaaagttgtcggtgtcatctactatcgaatcatcgcctgttagcaaattaatgaataaattagatggagcagcggactcgaactgtgaaacaaaaactgttatagaagatagagtggaaaaacattctgctgctattgattgtgtaaccgaaaagcttgacaaagttctatctcctccgaggacacctgctagtcaagaaaaagaaacaactcaaacaagtaagttctagttcttgttcttgtataaccactattcgcgttgtttctaccgctgattttagctgatcacgttagcctctttgatgtctcaggtaataaagccttgaattccagcaaagataagcctgtaaaatatgtcaatggaggtttgtcacttgttacctactctatccctttttctctagataccaatcagtatctgtgtactaaatataagtgctgttcccatttgacagttgcagttgttccgggaagaactcgatcccttgttgaaaggtttgaaaaaagagagaaagttaatggtaatgaagatcaagctgggggtgtagctatctgtgcagttcctgaaattgataaaacacctcctcctatgaaggtaaataattactcctctggaagaaaatctcgactataatatgtttttaagtctattcaatttcaatcaaattatatattggatgttagatcttaccatccgatcctaattaatttcagtaatccaattgatccaattgatccaaattatatattggatcggttctatccattggatgtattttatgtatatttattggtttaatttgagtttatccaatattttagacctagtatttattggataggatcgattccatcaagtattttagatttcgtatctattggattgaattggatctatccaatccaaaaatagtaaaattttaatgttaatttttatgtatacatatatatatatatatattttttttatgtaattacttattcaaactaaatgaaaatattaattagttcgattagatttttggtggctccatccaacattcgatctgatccaattggatattaaaaagtaacatccaatccgatccgtttacaattggatatacaatatttggcggtcggttgtaattggattggatcgatttatgcacatctttaaatttttttttttttttttgaaactcagaaatacttccatatatgtctagctatgactgctattgtttgatactttatactgttacgaaattatccagattttctgtgtttcatcaatggttttttatcctacaagtttttaagtgccgggaaatttattatttttcggttactagcagaaagaagaacctcgaattcctaccagaaatgaagaacctcatattcttacctggaatgaagagcctcaaattcctaccagggttgttgaaaaacctcaaactcctcccaccaagaatgaagaacctcaaattcataccaggatcgaaaaacctcgaactcctcccaccaagaatgaagaacctcaaattcctacaaggattgaaaaacctcgaactcctcccaccaagaatgaagagcctcaatttcctaccaggatcgaaagacctcaaattcccaccagaaatgtaagacctcaaattcccatcagaaatggaaaacctcaaattcccaccaccaggaatgaaaagcctccaattcccaccaggaatgaagaacttcaagttcaaattccgaccattaggaatgaaaaacctccaattccaaccgggattgaagaacctcaaattcccatcaggagttttgcctctgcagatgttagggatggtactgaagaccttatgcaaactcatgatgtattcttgagtacccttcgttctcgcttgacaaaattacaggtatactgaaagccgatacaatttctattcacattgatatttgaatacttttacttttggcgaaaagaaagaaaaggaaataggcctgatgaccaaaaaatacaggtggtgcggcatttttgggaacgaaaagatattaaaggtgctattaatgccatgaggaagttaccagatcattctgtgagtatcttggaagagttcatttgtctttgcttattctgttcgatgtgattaatcaaccgacattgactttatactaatcatttacgagttgtttgattaatgagaatttgatgcaggtacaagcagatgtaatcaatgttctcatagacaaaatggatatcgttacgcttgatgtgttctcttgcttgcttccggtgcttatcggtttacttgatagcaaaacagaaaggtactaatttggtgaatagatctttatgtcattccaattagaacaatctttaaaattcatgaaactcgacaggcacactacactgtcaatggagattctaattaagcttgtagcagtgttcggtccagtgataacctcagccatttcaacaccacgagcagtcggtgttgatcttcatgcagagcaaaggtgcaaccttttttttgactacatttaggctttcgatttctttttctcagcttaggcgaatgaatgaacgaacgagaagtttaacctgaaattttttctcggtttagggtggaatgctgcaagcaatgttctaaccatctgcaacaagtcctgaagattcttccatcacttgtgaggttaggataacattgagactttgattatataatattgggcttataccatgcaaaagttaccgattcaactctttattttgttaaatgataaattggatcatttatttttcgaaattatactccgagctaattttttgtcgaaataaaatttaataataacttaatctaaaggttctaaaacaagtctgattacatgttctgcatctattcgtattagaaattgtttcaagttggttatattaaaaaagaaattgttgaaaattgagtttggagtattattttgtactattttgaaaaatacaaggtctaattttctatttaacaaaagagaggatttaatttgtaacttttgtaaaaatacaagttctaaaataatattaatcctataatatttagaacaatcataaatctataaaatatttaaaaataaatatttttccacaaaattcttcatctaaccaaaaagaaaatattttgatattgttatattaaatactatcatttcttgtcttcttatcatttttaggaagggtggtttggtgggcagaagtgctcaggaattgaatctagttcttcaagcataaccgagctgcaacagtgtctatccgaagcaaaataggtagggttggtttggccctggcatccgatgatgatgatgaccgggtgctaagaacaacgagtgggtagcgggttcagctcgagttatcttttctcacatttcacaattttggtcctaattcctcccatatctcgtattgtcgtcttcttcttcgggtattactattacgatgatgatttttatatgagagatacaactcgggagttactgcgtggctagacttaaaaaaccgaatgtactagggtagggcgccatggcgaagaagaaaagtgcccgatcggttggttggttcgcgcagtgcggtgcggtgagatctcctaattttgattctttgattttggagattgttaatttgtatgtaatgttcttcaatcaagtacatatttttgtaatactgtattgctcttttttaatggtatataatataatataaatatatatatgaaagaaaaattatattttcttcgaactcttgtgtgatttatttatattttttcagcttgaattgttgatgtgtttttacttagattattactgcaaattacttgtttagcacaaaataatggaatttatactgaatttattgtcacaacatgtataataaatacatatttaactcttttttttttaaacatatttatgtaattatttttttttttgttttgaaaataaatataaaattgacccattaaaaaaagggaaatttttatatatatacattatatacattaatattacagaaaaaacgttaaatgaaaacaatccatgtgtatgccgtgacacgtcatcaagcttaccgtgattagcttcaataattttggaaccaccggcgatgaaggagacgcgcccacaactccacttttctcggtcatccctgcgcgtggttaacctgattcaaacggaaagaaaccaaaccaaacttgaacgaagaaacaccattgacggagacctcgacagatctgaaaatcggagaatcgatcatcatatctctcaaatacgttg

SEQ ID NO: 379797 - DNA, 5827 bp, Cannabis indica
atttatttttttattttcaattttatatctcaacatcatttttaaaatttttaacttaagaaatagtatgtttgtaaatattaaatagtataaatatttatttttccttgtatcactataaatgtttattttaggtagttttaccttaaaataaaccccccccccctccaccccaaaaaaaaatatatactcaaacttgttcccataaaatttagtttttataaatatttaatatattttttgtatatgtaaataaacttttaataaaaaaataaataattttttaaataatttaattagtttaaaaattttaatttttttaagatctaaattaatttattaagatttactaaaaaatgttaaatctttctcatttttattttgaagggtaaaattttataattgtcaaaattttagggataaaattattgcgccaaaatatttaagaagaatgaaatatgagagtgtctgccgtgttagtgctctgaggtagctataatcatttttctggttttttctttgtgttttgtttatccataaccttcccattaactgttccacgtcccttcttttccttcatatccttccctttcattgcttccttctacctgaatcatgaacccacttacaaacaaaatgaagggcacgatgaagctcactaatgaggacgattcaacactgctcctggatgatgaagatgagtgaacaattggtctggacaatgttttggttactcaaatcctcacaacgaaacctgtttttctctctacattgcaaagaaagatgaaggatcattggaatggcagatttcacacgaaaatcactgagaaactgcctgatctttttgttcttacctttggatgtgaaggagaaaaacatagggtacttcttcgggagccatttcacttctaaaaccatcacattgtgttatacacgccaagtgctttacaaaatgtctcacctgaagatctcatctgcactcctttttgggttcaatgttatagacttccttttcttagcaagtctaaaacattggccaaagcattaggaaacatcattagaaattttttgaaagtatatgaagactcggtggaagaaggttggggtccatttttaagatttcgtatcaaaatggatgttactaagcctctgctcaggggtcgtaacattaaacttcaacaagtatgtgataaattttgggtggaatttcgctatgaaaggctccctgaatggtgtatggagtgtggtagacttggtcatccttatgagaaatgtctagagtggatggaaaaaattgacaatagtatcgaacctgaactactttatggacctgaattgaaaggggctacacttccaaataatggttatgatgggtatagaacaaatttttcaaagggaaatgcctggccacttctcacgcatttggctcgtaattctttaactggtgtgattccagggctttcaaatagacaaacatctcatccttggccacttttaccaggggattcttctaaacagaaacacaatattaatattgaggcaattattcccagatcagtaccctccactaatgactcttcttcctcggttataactgttgcaaacataactgacccaactttgtccatgacaaatgctcacaaaaatgtcactcctaattctttaactaccaccaaggtctgtttgcaccagcaacactaacaaatatagtggataatacttttggtatgaagaccaaaaactcgacctcatctccatctgtaacagatccacctacaccagcagttgcaatttcgaatgtagatgatttgacttatctttatataccagacattggtatcaaccacaacaccattgtaacgtatcctcctatgtcaaccacagttcatgctccacttaatggaactggttttcatcatgcaaaaatgaaccctggcacaactacggatgttgtcattaacacaacattaaggcagaatgttgataaagaaaatagttctccaaatcgattattaaaaaggctacctgaaaacatctccacaaggaaaattcttaaacgatgcaggggtccaaagcaacctgaatcttgtccaactttgtctgctggggaggagccgagctagaaattttccaattctggtttttttgacatatctgcggtggttgagtctcagccccacaatcagccatgaaaatcatcagttggaatgcgcgggatctgaggattctaagcgcattctggcatctttgttttcttgtcaaagagcaatctccacatgtattatttatggtggaaactaaacaatgttctaatgtaatttctcattttagacaagctttaaatgttaataatggacttgaagtccccagggtaggtctaggaggcattttacttttgttgtggaaagatgatgtcaatgtaattcttctgaattttatttccaatatgtttgaccgttatcttgcttttggcaatggtcccacttatcactttactgctttctatggttctccgaaacaaagtaatcgttgtcattcatggatgactcttaagagattacgagatgttgctctactttcaccttggttagtgattggtgactttaatgaaatactctccaaccaaaataagcaaggtagtgctttaagatgtgaatctcaaatggaggattttcgtgaaacattagattattgctgtttgactgagctgccttttattggagatcctttcacttggattaaaaattgacacaaggcagatactatcaaagagagactagactggtgtttcatcaatgataaatagttaacaagctttaagcgactaacaacattccatttggactactatagatcagaccatcacgctatttctgttacagttaaaaaaaacacacaagaattgatcatgttaagcgacaaacttgtattaaatttgaaaatatgtggctaagagatgatgaagctgctagttttattaagcagaattagaactcagaatcttcaacaatgggtattgatctcttactcaacaatttgcaagcttgtacatcttccttacaactttgtcacagtcacaagtattagaatatgaagcagcaaatctcagaaaagcagaaagaagtcaccgatctcaatattttgggcaccagaacacagtagaccatgacggagttaaaaaaatcagagtctatccttgatggtttattagcacaagagaaaacctatcagcaacaaagattaagggtggattggatacaaagtgatgatcaaaatacaaagttctttcatgctcatgatacattaagaaaacaaaataattcaataacatcactcatgaatataacaggtatttctcaaaatacaaaggaggaaatgacaacaattattacatcttattttgaagaactattcactgcctctcccattgacaccatatcttttaatcaaacaattgctaccatcccaacaacggttacgactgcaatgaattcaaaacatacttggccatttacacccgatgaaatacactaggcctttgaaatcgatgagtccggataaaagtcttggtagtgatggaatgtcagccatgttctatcaaaactattgggagattgttggcccttctgttacggaggtagttttgggggttcttaaaaatggacaagatatgaatttactgaataaatccatcataactctaatcctaaaaatcaataatcctgttggtatgagtgactactggatgattagtttgtgcatcgtcatttacaaactcatctgaaaagtgttggttttaggttcaaagatgttcttccttttgttatctcaaaaactcaaagtgcatttctatctaaccgcataatcactgataacatcttgatagcttttgagttagtccaccatctcaaacataaaactcaaggaagaaagggttatctgcactcaagttagatatgagtaaggctttcgatcgtatcgagtggagctatattgaagttgtgatgggtaagatgggttatgatgaacgttggatgtctctcatcatgaaatgcctttcttcaacaagtttttccttttctttaaatagtgaaatagttgggaacgccatactaaggagaggacttcaacagggggatcctttgtcccctgtttattttttatatgttttgaaggcttatctcgcttgttgaatcatgaggaatcaattggtaatctcaaaggtcttcgtctcacacggcatgccccaccaatctgacatttattatttgcagaagatagtctcttgttttgccatgccactaacacatcaaccttagctatacattatgttcttgatacttacaactgagcttctggtcagctccttaacacccaaaaattggttatgtctttctcgccaaacacaatagccgcaactcaataatttttccatcaaaccttgaacatgcctataagtgattatcacgaaagatattttgggctccctgcttactctagaagagatgaaaaataaatgttcagctctataaaggaacgaatttggaaattgcttaatgcttggaaggaaaaactcttttctacaggagggaaggaggttctttagaaagcagtggtccaatccatacctacgtatgtaatgagttgcttcaagatacctcaaaaattctataactaacttgagtctatgatggctaatttttagtagggttcaaacaaaaatggcattgttgtgcaaatcaaagtttgaaggtggtatgagattccgttcttttgtgcattttaatcaagcgttattggctaaacaagcatggcgtatctttgaaatgcccaattcccttttcagtcatttactacaacacaggtacttttcaaatacatcttttttggaatcaaacattggtcattctccatctctaacttggcaagaaattttttgcggtcgtcagttacttctcaaagggcttcagtataaagtggtgaatgggttgcatactaatgctgggttggaaccatggatacctggccatagacaatttcagcctctctcctattgaggaccatcctctcttcctgtttcatactacataatagagacaagagaatggaatacatccttgttaaaagctcactttaaggaaattggcattgatcgaattctttcaatccttttagttttttcctgggtttagatcgacttatatggaaccatactacagctggagcgtacacagtaaaatcagaattccacctagctactgacttagaagatgctgagaaagagtcattcttaagctcccataaagagtggtggaaattttttcaaaatctgaaatataattaccaccaaagattaagactttggcgtggcgtataatacataactctctcccggtggctgttgctctttataaagaaaaaaactcagttctgcaacttgttctttatattcacaatcgtgggagtcgataggccatgtattgttccattgtagacatgctaaagctgtatggaggcaattcaactttccaattgatttcgggaaggcacgttgtatggttagtggtgaatatttttttcatctttcaacattactcagctaacaagaattagaaatgttgatatgtgttatgtgggtgatttggactcaccgaaataaataattcatggtgaaacaaagcgtgatggttatgctctagcttcttatgctaggaactacatggagaattataaaaaagctaaaaccatcccaaccttgttattgaacctactgttgggttttatgccctaaataaaactcaatttcaatgtaatctattttattcaa

SEQ ID NO: 379798 - DNA, 4293 bp, Cannabis indica
actccagccttggccttgacctctgagactccaacttggtctggactccaaccccagacctcggacctcagtccagaccttgagcccccggacctcattttcttgggatttttacgttaagtattgatgtgaaaattaagattaggatccaaagcatttacttctctagaatatacaattttattttatttctggaaaatttatcatatatacccatctaacgaataatttgacactttcatgaaaaataaccttttgatttttatggatagaaataaatttatgagtggagaatattaattactaaagttttgtgctttcatgttagctgtgtacatttaaagtaattcttccaagttgctttaaaaaaagaaaattcttccaagtgagttgtcagtatcatttaaccataatcgtctctaatggagcttttacctatgaaaaagtgatatacatcatagagcttcgacagaactctattctccccttatcacccacttttggccattctatctcgctcaaaataaaagaacactgtcattagctattaatggtatcttagctattaatggtatctagtagtactaccacgaattgtttatatatatcttatctaagatgaaaacccctaggaaaacaaaaatatctatttcatcagctgagccctctctcctattagatctctcaattattgcaacaacagtttcatcatgacgacattaacagaaattgaaactgggagtcagagagatcactatgatgattatacaactatgatgatcaagctttatgaggctgcagtgaaaggatgtgtagagacactgaattcattgcttgaagaagataaactccttctaagtaagatttcactcactcgttttgttgaaacacctttacacatctcatcactacatggccatgttgatttcactaaacaacttcttaaccacaaaccaaaactggcatctaagctagaccaccacaaacgctcacctcttcacttggctgcctcggaaggacacgtggagatagcccgagccttgttacacacaaataaagatgtatgcatggttgaagacaatgatgggagaatacctctccactatgctgccatgaatggttgtgtcgacttgattcatctactccttattagcgctggagtggaatcagtttgtcaaaagcttccaagtggggaaacagcactgcatctttgtgttcaacataaccatttagaggctctgaaattgttagtagaatcagcagtactatcactgagtcttaataatagcacagaagtactcaatgcaaaagtggttgaaagtggtaacaccattttgcatctagcagtcatccagaggcaggttgaggtaagcagcttttttattagcttctacaatttttaaatatttttattataaaataatttgattttaatgatatccaaatctatcttatttcattcaattttactaacgtaatgattgtccttgttttaaatcgtgctcccgaactttgatatattaaattgtgaacctcctaagctttcttccatgttatacttctgttagtaaaattgaacaaaagtttttaattcaacaatctcaatagttcatgttagagagtttcacattgctaatgtgtggaaagatagtagaatatatataagatgaatgggctactcctcccattgccaattggttttgagatgcaatatcattcactttatcacaaatcctaacagttcaagaagaacttttataaaagttcgaaaaacatgatttggtacatgtctaagttcgtggaacaaatcctaaatttagccattttaaaaatactacatgtttcttttgataaagggctttattatttatttatttttttctaagaggcacaaaatctcatgattgttaactgcatatacatatataaatatatccagacagtagagtacttactttctattgccgagatggagaaggacatcttgaataggaaaggttataaggcctctgatctccttgacgaccaaccaaatgacttcaacacctaccaactccaatgtgtgatgaatgtgaagcaaccaacgtctacatgtcataacattactaatagtaagaataacaataaatcattattgagaaagcaatggattagtatgcacctaaggaaacataggagggaatggttgaaaaatgtagaaggatcaatcacggtggtggccactctcattgtggccaccacatttcaggcggcagttaaccctcccggcggtgtctggcagcaaacatacaacaccaccaaagcaattgaagactcaactgattgcagcatcgaaacatgtggacacaaaaatggtacttgcactgaaagaaagatatgttatgcaggaacttcgataatggctcaaatcgatgactaccattatgccttatttgtaaggttcaacagcatagctttcttggcttctctaagtatcataattttgattattgggggagtacctatcaacaataagttttgcatttggctctttgatttggtattgtttgccactctattttgcgtgggtcagtctttcttatatgccaatatcttagtgactcccgattatggtgattattatgaaagccttaatacggtgtacaattgctccatttatgtgtgggaggggatgtttgtgctcatgggagcttggcatgttgcttaccttgttattaagcttcaaaaatggttgcccaagcacaagcacaagcacaaccaagagaaataaaattgaagtaagaagaaaatttcaaaatcttaataaaagttttagaattaaatataataaaatgtaaaagaacacatagttattatgttaaaataacttttatgtaatggtattttatatttttaccttacaaatagttgcaggatggttcaaatctcaagaataatattttagttcttttttaaaaaaacaatataaaagtgaagtattaaacctgtgacctccttaaacttttaaaaaatatttactactataccaaacaaccttatttaatattatgaccaactcaaaaaatttatttagacttaaactccaaatagtttaggataggtcctactttcaggtgagacaatagtctaaggtgccttataattaattgatattttgttagcttattttttattaaaaaaaatgtagtgtaatggtattagtgtattagtgtacgtgttaatgcaagttaggttagtgttaatatgttagttaactttattttaagtgttagttaggactctaactaaccattgtaatttagctatatagctattgtaaactaataattgattaatgagaataatttttttctctaactcaaatcgtttctcaatatggtatcagagcatttcgtttatttttaattttttttggaagaatctttgtcattctccctgattctttgaaggtttcaatatttcgacttttcattgtggatccttgtccaaattttagtggttttttctcacaaactttctatttaactagatcacaacaacttcctactttggcgtgtactgcgattcgaggtcacgatctctccaatttcatctcctccacaatttggccgctgagacgatttctcattgagctgtatgagactccaggtactgttaatactgcatattctcattgtaaaattctatttactaatacaacaatgtttgatttctgcaatgcatgttgtcaagaaaaaattcatatatttccttttcccacttctcacactttatatgataggcctcttcaattaattcatttcgatgtttggggtccttcccctactctctcatcagtgactataaatactacgcactttataaatgcattttctaaacatacttgggtttttctgctaaaatgtaagttagaacttttaccaacttttctcaactttaaaactcaagtcaaaaatgaattttattgcaaaatcgaagctttccaagctaattgttgaggtgaatttcaggatttttaaaagacctttcttgcttgtatttctcacaaagtgtcttgccccaccagattacacagattttgttgataagtttaattttaaatattgtttgttggatattgattttctgaggttttgaattagtgaggtgctaataagttgttactaaccaaatggtaataattttgaattgtgtgttaaactttaagtttctatattaattttattttgaagactgtcattctaatatgattttattttttggttttggtatagcgatgttttattttttttt

SEQ ID NO: 379799 - DNA, 1527 bp, Cannabis indica
caaaacttaagatttttaagtgaatgtggaatgttagcctgagttaggatagtttttaaagtggctggtgcagggtgtcctagcttggaatgccaagtgttaatcttagattgtaatgtagtagaatagacagatggagagaaagagtctatataattggaattagtgcttttttcatagaaaattgattacatgagtgagttgcataagcaacattacaattttgacttttattaaaatcagtacatttggaaaatgtagaagtaacaagattacattccagactatggtgggacaggtttgattcatcatctcctagccatctttaagcttccctttgagcagaacagtccccgtttgtttgtccttaacaaaacaacaagacttgtgaaattcaagaaaaatataattatcatgagttaacttagagacactaagttttttgttatgtcagggacttgtaatacagaatttaaatgcaagggagaagaggaatttggagaaagagttgctttaccaacatgggatatgacaagtctcttaccatctccaacaaccacaagttcttggccagagtaggtggttgctgaatcaagattgtccatgttgcaggtgatatgattagtagcacctgtgtccacgaactaacctgcatcatctccaaaatcagggatagattgagtgacatgaacctggggtcataatcgaattgtaattcagtaaggtgggcttgagactgagaggaatttggttttggagtcacccaatttctatcaaaacgatagtgacaaacgagagcagtatggccaaattttaagcagacttgacacaagggacgattattgttttgaggtcgaggaggattgcgagaaggtggtttgggttggtgatcatgatttgggtttctggcatctaactttcgaaactcctttccgaacgacatctaactttctacaagacaccttttgaagattttttcatttggagaaactataccacaatgcttttaaaaccattccaaatgttcaataactcactccaaaaatgacattttgaagaatattatagtataaccacttctttcagcatttgtcaattattttccaaacattacaaaaaccataaaacgacaacctttccaagtgcggcatcaaatgaacttgcaaagaatttgaactaaccaaattcaccaaacaaaacaacagagaaaaaaggatttcccataacgatgtgatcatgctttgtcgtttctgttagagattttattacaatggaagaaaatcaagatattacaactctattgtaatacaatacaaggatcaacaaagagattaaataaatgttacaacaaaataatatacaatatatatacactatatacattatatataagaaatgtagaagaagataagaacacatgtaatataaaatatgtatatatataacaagagaataatatatatatatacactcactcacaaccttgagtgtagattagtggggatcaccatgacttgaacaaggtat

SEQ ID NO: 379800 - DNA, 2987 bp, Cannabis indica
atacaacaaaatagaaatataccgtacaacaaaatctatataccaacaactcaaaataactcataaaaaattaaaaaaattgacataactttaaaataaaaaagattttaacaaaactaatatagatataccataatgtttaaataatttgcttctaattaataaaaaaaaaaaaattaatgatttagggtcatttgctatatttttttgaaatgaggatataaactaacatagtcctatgatttgtggccatttactataattttcctttttcaaataatgttttgaaataatatattgagtgtaaattctacctttagaaatggagaatttttataaagattatttttttatattttatttacaattttacaacttaaagtttttaattacaaaaatattcatgtaaagttttaaaattataaaaatataccttggtctttaaaaaaacaacgagaaatcaagtttgcgataattataaataaattataaaacaaccaaaaaaataatttcatcacaactataatacttatacaattataaataaattatatataaaaaatagtttattatttttattaaagaaatatttctgtaaataaaaaatttaaagagtaaaagtaatttttttttagtattgatgtgtttttataatttttctttttaaatttttaatcagttatctattctttttttttattaaaaaaaaaggtcagcgtagggacataattttacagtgtcttttagttattcactttgattggaaaaataattagggaatggtagagtaatgaaagaaaggaaaggcatataatgtgattttgaagactttgaattcaaactaatacacgtctcattaaacatgataatagaactaccaccacaattaacaaatcatgacatttgggaggactttcttcattccgtactctagaaagaaagcgcaacatgacaaatatctaatatcataactataatacaagacaaaagaagagtttttaagtggtgagaacgaagagagtgaaaactgaaaaaaagaaaaaaaaaaaaaatggaaaacttatggatgatcatcctcatcctcatcctgactaccttctttttcatcatctcaaaatccaaactaaaaagctgccaccagggcctctcaccattcccatcttgggcaacatcatatggctccgcaaatcattctcagagctagagcccatcctccgcgaccttcacaccaaatacggccccctcgtttctctccacatcggttcccgcccagccctcttcgttgccgaccgctctctcgctcaccaagccttaatccaaaacggcgccgtcttctccgaccgcccacccgctctccctaccagcaaaatcataagcagcaaccaacacaacatcagttccgccgcgtacggtcccacgtggcgtctcctccgccgcaacctcaccgccgagattctccacccttcgagggtcgagtcctattccggtgcgcgcaagtgggtcctagacattctcctcacccgcctctcttctcaaactctaaccaatgaacaggtccgagtgatggaccacttccaatacgccatgttctgcctcttggtgctgatgtgtttcggggacagactcgaggagccgaagatcaaggaaatcgagaccgttcagcgtaatttgttgctgagcttcagacggttcaatacgctcaatttctggcctagtttgacaaaggttgtgttaaaaaagcgatggcaggagttttttcggctgcgcaaggatcaagaagcggttctggtccccttgatagagtcccggagaaatgtcaagaaagaagaacaagcaatggtatgttatgtggatagtttattgggcttggagttggcggaggaagaagataagaggaaactgaaaacagaggaaatattgagtctttcctcggaatttctggacgctgggactgatacgacttcgacggcacttcaatggatcatggcgaatttagtgaaacatcaggagattcaaaacaaactgtacgaggatattaaaaaggtaatgaaacatgatcatgatgaaatcgaagagaagtatttggttaagatgccatacttacgagcagtgatattagaagggctgaggcgtcacccaccggggcacttcgtgttgccgcacgcggtgaccaaggacgttgttttggatggatatgtggtccctaaaaatgggagtgttaacttcatggtagccgagatgggatgggaccccaaggtgtgggaagatcccatggctttcaagccagaaagattcctcattaatgataataaggttgagtttgatataacaggaagtaaagagatcaagatgatgccttttggggctgggagaagaatgtgtcctggctatggtttggccatacttcatttggagtattttgtggccaatttgatttggaagtttgagtggaataaagccaatgatgatgatgatgttgacttgtctgagaaacaagagttcaccgttgttatgaagaatcctttgcaagttcgcttgtctccaaggactcatcaccattaattataagaataataataacaacgccgccggcttagaactattagtactgctagtagcctagtactatgtatcactactacttatttatgtgtatgcaagtgttattatgtttacctcattctgtatttatcactttatttccagttccaatatatgaactatcaatagattgatctgcctctgtcaattaagttcagtacaacaaatttacaatttcatgtccaaagataagagatctagcttaggttgcctgcatgggaccatcaactaatttattaccagggagtgatttaaataagcaaaaaattaagagatatcatcatgtataattttgttaacgaaatgtgtaataatataaactacagaagtaagatatttttaatgttagagtttgactcaaattatttatttatttctttatttat

SEQ ID NO: 379801 - DNA, 2366 bp, Cannabis indica
ttcttttttctttttcaatcaaaagaacaataatgtttattttttatttttttcaaaattttctatttttaggctccatgatcagatcagatcagaaggaatttgactaatcattaatgcatcttcctatgtgttgtcattggttgtttaataatttactttgtcagacaggattaggcatcacaaatcatttttttcagattattcttcaaactctttgcttttcggtcgtctattttaattatacatatgaaaaattaatacatataatataactaggcacagcagatatattttattttcatataataatttttcacatgcaagcaggagttttgagtttgggggcaactcagtaaattactttaactgcaaaaatgaagtctctaagattaaaaagaaaaaagcaatattcttcgaccccttttgtttggacgctttattattatcttggattcttcccctcagtagtctgtagtagagtggaaaaagaaatcttttcagagggaaagagagacacaaaaattaaaagtgaagaggcaaagtggaatttgaagagaaagaagaagaataaaaagttgggtgtctttacattacattaatacatagcaatatatatagcgctataggctaataatgctcgtgcgcacactacacaatccttttgagttgagttagtcttatattctctctttttcgcattgttcgtcaatatttattggattattaattaatatacatatacagactactctttatgcttttaagggtcccaccgtctctttctcgaaggaatatacagtgaatggtctatatcatacccagcatgctttgctcacatccattttctagggttttacaaccagtacacaatgtatatattctcatctctctcctaaccccagccattgcaaccctaaactttatgataatatataatttaggcaaatggatgatatgttttatgagaaatgctacgcagcacgtaatacaaaaactaattttgtggttgttgacgttgaaaaacgaccaactccctatcatctaataagcgatagcgaccaccaaaaaaataattaaaaataaagagaataacaccgaattataatagttcactctctatattactatagtaatagaattacgtttacttcgaacttttattatcacaaaactaaatttccttataagagaactagagaaaaattgactaaagtaagcttcaccttacaatttctagaagaaaagaaatgaggagagaaaagctctgatcttgtagagaggatagagagtgtgaaaaatgagctagaggaagtttctttttatagggaagaaggtcccttaaaattacaataaaataatgaaaaattcatataaaatttgctggaaaattatggacgagatcgcgaattaattttgaggccgaaaacatcaaaatcatgggaagaacattagataagcttagatccgtattgcaaaaagctttccaacgccacttgaaatgcgccatttagattaaaattgagtgagctatggttaaaatatttaacagtgtacaggattgaaaaattgataaaactgatgggcgaccaggtttacgtaaaacgtcaatcgagcacccaatactatgtgtcttaggctttaggcatattttgagatgcttggatgatgtcaaggattgcttagttcattcattgactccggtgaggttgttcaccatctccacacaattttacttgtaatgacattttaaagatctaaattttaagatttattaaaaaagtgttgagtctttctcatttttattttgatgggttacgatttgataattgtcaaagtttagggtgtaaagtggttaatttataaagacgcgtcagtatttaaacagaatagtgggacagaacctaacagaaagactaaatttttgtaaatgtaaaagttcaaaagaggattcttaacaagccatatattttagaagacaaaattaatattgtcgaaagtttaaggcaaaaaatttctaattactcttaatatttaccactaaatatcaatattacatttacattaatttgaaatcaattttttttgaatgatcagctaataattaatgaatttttgagtgaaaaattaatatacaaaaaaaatctaaataatatcataatatttgtttaataattatactcattttattgtaatcatttatatgactgttggaattatttttttatgaaatttttttataaatgaattaaagtatttatgaagaaagaaaaacagtcaaagtgtaatgattattagtaaaacatgtgaaaatgatatgaaattaataattaaaaataaaaatttgaaataataagaatttaatt

SEQ ID NO: 379802 - DNA, 6062 bp, Cannabis indica
atggcagcagagagaccttcagcaaccatcaaaaagatatgtaaggggaaagagggtcaccttgtcttatgcctctagtaggggtgatgatcttagaaagggactgattgataaaaatacgatagtgaacaatggagatggatctcataataagagaaacaaaattgagagggaagcccacatgaatgagaatggccttgaaaagctccattctactttgtcgaaagctttctccatgtccagtttaagggcagcccaaccaagtttgtcattcttcctgtaatggatagcattaataagctcattggcaataaagatattatcgaagatgagcctatcggagagaaaagtactttgattactagagatgatagaatgaagaacaggtttgagttgattggcaagaaccttagagataactttgtacagtgtggaatagaggctaatcggtctaaaatcacaaagagtggaggcattctttttcttaggaattaaaaccaaagtggtttcgttgataggagataaatcagaatgattgtttatgacatcaaggatggcagagcaaagatccttgcccatgacatcccagttcttctggcagaaatgagcattcagtccatcagagttgtagcgactgaaatatttagatattaattagtgagattataagtgctaattttattattataattaatattgatgttttatgtgaataattatgttaaatgcaaaatatgttatctctgtgattttagttcggcgacgatggaaaatgcaacgaaggttattttcgtcacttggggaaatatagagctttgtagtgatagagaatatgtcatgtaagctcaaatagttggtgttggcggggttgtggtattggaccattttacccctaagccgatttttgaactaggtttagaggtggggtagtttagtaatttaccctttttttgattgggtgtcttcaccatagtttgacagctgccacttaagaggaatagaggttaattaattaaccttttatcttataatgttgtgaaatgagtaaatagaagaaattgcccctttattattcctcttcttcttgttcggccagcaaaaaccaccaacttagggtggagttttctttcaatgtcagaggttattaggtgtaaatttgaaggcttaatctgtgttaaaaccctaaactttatctattatggatttatgatgttattggaagggttttgttaggtttagggtggattttgatgaatttggttgtgtgttggtaaatttcgtttagggttagtttttgtaggtcccaaataatgttctaaggttatttgtactgcaattggtgtttaattttgaggttgagcaagtttgagttcatggagctaaacttgactcaacaatggtatgttaatttttattgtgtttttcttgttgctattgtgtgggaattgttctggaatatgtgttcaggtgttcttgagagtttggttgtagttgggaaagatttggacaagttgtgcaatttttggagtttgttggtgcaaataggtggaccggttttacagggtctgtaaaaccggttaaccggtttacatgccagggcccccgaaattgcaactttttcgaatctgtgttattttccgagcatagtttgggttcccttagtatttagggtaatagtatattgtatatgtcattaagtttacccttggttatgagctagggtttcggaagggttattcgagttatttacctaattatgaaatgtgacttaggacctccgttcagctcgaggattttccattcaagtcgaccggcacgcttgaatctggaatgaggtaagatagcataaataatatatatttgaatgtatgcttgtattagttgtttacactactaatattaacggaaatgtgattttaagggtgttagtacagtgtaggattttagaatagttacagtgttaccgagacgagtaccagggggtacgtcgtgcatgtgctacaacacttagtaactcctgaaagtacagttaagaccctactaacacgagtatagagttggtactttagtgcatatggtacagtggtcatacttctgttgagaacgttcttaaccatctggtgagctcggttattgagctcagaacggcttaacataaagccgatgcagcattacctttatatttattatgcgcatcttactaagtctgtcgactcatcaatttgctaccttgtgtaggtaagggaaaatctaagctggaggaacagtgagttggagcttggcagtgattatacatattgcggcagtgcagcctggagggtttcgatcttttaacattttttagttgtattttgtagttgcgtgttgtaaaaaaaatatatactaatgatagtttgcaactttatttatagtaaatgtaattttcaactgtgttttaaagactcgggatcccgaatataaggtttaatatttataatatatttaagattaactatttgagattagtaagttttaaatacaggcgttacaagagtcgggtgctttgtcactagagagagcccaaagggccttatggatttcatcagcagtgaatggactggcaaggtcagaggattggcttggggaaaagtgattagtgattcctaataaaatatcattgatagaggcttggtccttgccctgagtagaaaacaaataggaataaaaattcagtgaaaagagggatgatagaggaggtgcctttaacaatggagcaatcctcgagagtgatagaatggatgttgttgtttttctttctggccaaagctttatgatggaaaagcttagttgttttgtccccagatttaagccagtcaatacgggatctttgctttcagtaaatctcatttttatgcaaaaggttctcaagagatgactcgagagctctggcttgagaaaggtcatctctaatggggactctcttttgataaagttgctcaagagtattctgagtgcaagaaatttgatgattaagagatttttgaccagatttccactctttgatattggccacgcagttattttgattttttaaaaaatcaatcaaagattttgtaacgttgtgctgattaaaagttttccaagaggacgcaaccactttgaaaaaatctttatcagaaaactagtgattttcaataaagaactgaccatgatttctaagactagtggtattatcctcaaggatggttttgatagcacaatgatcagaaccaaagaaacctaagtggaataaggaggcaaaaggaaaatgtgtctaccaagagctactaacaacacaccagtccagacgttgaaaaagactaccacgtttccaagtgtacttactgccagtgtgaggaagaggcagcaaattgtacttgttcaaaaagacttgaaattgttcatagcataattaagggatctattggtagtgttctgatcgttaatggaaagatagtcgtttaaatcaccactaatacaccaaagcagagtaggagcagagtcaaaaatgcaaccaggagagtccaagtacagtctttagaaacagaataaggagaaccatagaaaccagtaaaattccatataatatcattactaatattaacagtatagtctatatgattaagggagaaagttaaaacattaacattgataatattgttctaaaagagtaaaaggcctcccctaaaaccactccgagacacttcaaaaacattatcaaaacctagactagtcttgatacgcattccgtggcctggaaggagcttggtttccatcacaaaaagcaaaataggttggtgttgcctcaccaacagggagagattacgaaatgcacgagggctccccaatccttgggaattctagctaatgaaattcattttcctcggtgaggttgcaaagcaacacccgtcgtttcatccaagtttgagagtgaaggaacaacaacatcttcatcatttactgcacgggccctcttaactgatcgagccacccacttgagcatgttggcgtgtgaaaggcctcttgacccccgtcgtggtggcaataggggtactggaaggctcttggataatgatgcctttgttgtgggacctgacaatcttggaagtgggcaaactagagtcatctggttgggctatacatttccccttgttagtatgagtaatcaccgaagtgaccctgatagggggaaggaatagtagaaaaagccatagtcgagttggtattagcaattaagatttgggataaaactgattcatgatcttgggcaagagtaggaatgacaaagttcgagccaaggtttagaaattgatcaacaacttgttgcagaccctgtttagagttgctgccatggcttatatactcatctatgagggtggagttggacatgtcaaagggatttttttaacaaattttttgacatagcacaaaggtcttctgtgtagccaagttcagggggatggcgaaattgtcgcatctcattaggtaacatccacacttgttgtaagtatggtcaagagtaccacagaaatagcaaatgttttgcaatccctcatatttgaaagcaatccatttggttttggtaattattcggaagcagatattcatacctctacagaggggtttagtaacgtctagaaggacgcaaagacgaaggtatgggtcgaagctttccagaagggataaaggatggatctctataaggtcaccaagctcatcagcgatgaactgagcaagctgaagaaatttctggctgaaaggggtgttgttggcttggacccagattgggacataacgaagctggtctattgacagagtgttcagaccctcaaggtttgtgaagatcataaggcatttgtcaaaatgccatggttgatctttaaggacacgtcgtctgtcaccttcgcattggaaagtggcaaggaaaagccttgagtggtaatctgtgatttccacagggaaacggagcgtccaggcttcacgcatagctttttcaatccaaagcgatttgggagatttagtagtgagaatcttgaagacgaggcaataggaggtgttggtgtctcccgagtgcagagaaacatggtcaaaatcatgaattaggttttcctcgtgagtgagttggagagtgtttggtggattgtgggaagaagaagtcatatgaattgattgagaatctggacagatgagggtctaggatggtttggtgggtgatccgaaataccagatctttaaatagtaaaaaaaagagaaggaaaggaagatacctagagatggagagccaccttgaaaatgggagatcaagaagtcgccatgttgggatttcacaggggcatggatgaccatcattagatttgcaatgataatttgataaggtttgtggaggttgaaaatggcagttaagggaggagggtggaaacgttggagcggaggattgccattagttccttgaacccataataaatatgattaaacgtgcaccgtcaggattaaatggaaagcagagagagtaatcgatgttaggcaatttagggttttggtaatcgggttggtaatcatgaaggtacacagggttgaaattaattgcaataaaagtgacggttggagcaataaatgctggaaggtgtaggtggagggaataaaaaccctaaaatacccaaagttaagcttggtggaaagcttcactcggaagagttctaattcttcataaatttaacactaatacaaaaatccactaagtatatatgttaaggaacagaatacccttgcgagtgaggtccgaggatctcattttttaaataatacacaagctaagtattctataagaaaaatacctaattaatgtctttagtattgttattgatactataagctagttctaaagatcaaggggaaattcttgagcacgtttatcgatggcacagattgatgatggtaatattaaggaatcttttaattgttgtaaatatcattttagaccttgtgttttgttaaatgataaattggaccctatattttctaaaatagtaaaaataggatcttga

SEQ ID NO: 379803 - DNA, 1626 bp, Cannabis indica
accccaccctaccccaccccccttctcatacataaggcatatagactcagaatcccgaaaacacacaacctcaacaccacattctcagctcgagtgaattaatacaacaacaacaataacaatcacaacagcagcaacagcagcaacaacaacaacaccacctaatattttggttttcagccaaagggtgtttttatttttactttctggtattagtaactatctatatcagtttctggcctccgaaggtagtaacgcaaacagttcactagtacctacacattcaaaaacttcattagaaaattgaagggaaattgagacaccttgtcgtgccaataaggaaaccagagtacctgagacaatgaacttgggagtgccgcccctctatagctgacatgaaatttatctttggccaccaacccctgttagttcaaagtagtgaagttcagtaaaagaaaaagaagctaaattaagggtttggggaacattattagaaagaaaaatggatgaaggccaatacttcagtatcaatctctgcagattccacgtcaatgttgacatcagcaatgattttgatgatttcaacaagcaatcctggtctgtctgcagtctctatgtagagcaagctgaatattcaaataacataatgcaaagttaagataatttgccaagctagaggttgcatgattaaatttcaactttatgtcgcgacaaaccttttcttgggtccatcttccttcacatgtatacgagttgcaacatcaacatcaagctgtaatcagcacatataccaagtcattacaaattatagagcaaaaatatgcctttatgagcactgttggtttaaagcattcagtttatggtcattgtcaaaaggtggagccttataataaaacaaagtagttcatttcaagtttcagagttaaagcactgatgtaggaatacccacaaaatggtggacctatgtattataacaatagacaatgacaataaactggccatttgtgtaactatagatatacaaattgggtaagttattaatgtggatagactacaaaaggttgacagtaacccaaaccattcaaaacaaggctactaatttgtctacatagcagacagatgttatattccagcataataaataaataaaaacatcaatatatcttattcagactcagatatactgtgatcatcaacatcaactttacttggtccatttataaatactaaggaatgggtcaatacctaaagtgcgaaactcaagaatggaccaatgcaaagatgtacaaatttcaagactaataaatttgaacatgcaccttcttttcaggagcttcaattccaaaagcctcacccattgcaagttgccgactagattcctagtataaaccaaaatataaataattaaaacaggaaatcgagatacttagaccaatcaacttgatgagatatagctgttaagaaaaacttgatgagaaataataaagctaaaatttaaaattttaattcattattgtatattttatttttgagtaatacggattatgtatcccattcttgtgtatagttgcctatctataaataggcttaactatatcagttgttgctaagactaagatgaacgaa

SEQ ID NO: 379804 - DNA, 2636 bp, Cannabis indica
tttaaaattttaaaatttgactacgatagaaaataaaataatgtatatttttattaaaaaaaatgactatgtgggttagattaatactattaatcacccattatacaacatttataaaaattactaaacaccttttatgtagcctatgatacaacatttttaatttttaatagtttttaaactatgtgagatttttgcttatcctaaaaaattctctattattgagtcaaaattaacaaagataattaaaaaatacaaaaaaaataagcaaaaaagaaaatattgagaaatcgattattagaatgccacgttgtgcattcctttatatatatatatatatatagatacttagatttatgtacctgattgatccataataattatgtcaatttaatagtgcaatactatcagctaagtcttcctctctagatttctaaattagaagcaattttaattttatctgattatcaaaagtatacaattgtgttgagacaatatgtatttatagaattagtgaggggacttagctacatcaccgtagttggactggatctgctcatcaaagacttcagttaactagaaagcatacacttttacttcacctagactttacacacataaaagttaagctcattaactattgattaccaacaatataagctaatacaacaaagaactattaaatcaaatcaagttttagtcaaatcaataaaagttaatataagtcctaataaaaatctaacaatattgtctctaaaaaattagttgtagtattatttaatgtttttggattttaaaaaattgattttgtgactagttggaaaataaaaaattaagagaatgatgataaatactattttgaaccctctacgttacaaaattactaattgtactatttgttttattaaatgataattcagacgctatgtttttcgaaatagtataaattagtatctgagttcaattttcgtcaaaataaaacttaataataatttaacctgtaagtattatgaccaaagttgttactttttctggatttgttcgtgcttgtattaaaaataaaaaaaaattgacaaaaattgagctcagactctcaaagtattattttgtattattttaaaaaaaatatatatataagatttgatttgacatttaataaaataaatagtgtcatcagtaacttttgtaaaatacaatgtctaaaatagtatttacccaaataatatttgaagagtttttaaattcaattagatacataaaaattgttgtttttatttgtttagctagactcaaactcttatttaaatttagtttttgaaaattcgggcaaatttagttgttgtgacgatccctttcttagtgaaagatcgaaaaatctttctcttcatcacgagactgatcggatctgccgtagacacccgagagacctccacaaggcaggcaggctaaaagagtaagaggacaacaagcaaagagttcttcatttctttgttgagaaaacccgacttagcgaatcacttccaggcgggcattaaatctatctcgtgccagtggctcttgtgcgcctcatttatgttggtggcatatcgtaccgtattgtgcggaatacttacaaaagtcgtggccttccgctatgttagaccctcccctagaagtataatggtctaccaaccaaaattttttatgtggactattactttttaagttttcaaaaacgtaaaatcttgtcctcaaatattaagaattaaaattttttgttgaaaaatagtatcatatattatgttaaaccaatctaaatttgacacataaatatagtaataactgtcccagaaaaatccaacttttcattacaagacagcctaaaatggtaaagctaataaaagaaaatttagtttcaaccaaatcatgaaattgaacatagcactactaataaaaatgatagtacgagtaaaagagtagtttgagatgtgtggtaatttcacaaaagagtgattaattattgttgttattaaaagggtttgtttaatttagttaatttgttaataataataataataagttgaatgaagtgaagagtgaagatggtccatggacacgtgcaaatgatgacaatgtctactaatgatggattcccaccgcttcttccacttggtgggttcccactcctatcatgcgacccaacccaacttcgttccctcttttctttgaccgacaaaatacccatttcaaatcaatcgttgctgacaattacgttaatcatcaccacctgctgtctcatctaaacacaaaattgaaatgtgatgacacgtgtatatctaacttcaatttctgtccaaattcatcgtcatatatacccaataaattccttacatgtgtgcacacatatacttcaaaaatcattctcacgctcatttttcaacttttgcacttattattcaaagtttcccgtacaccttattattaatttctacaatacattaattctaagaaaaaagaactacagtacatcatttattgaagctaaaatgagaatcatttggcaccaaattatttgtaacaagggaattaatctgcacgattgtaatttttttttctttttttaagtttttgatctttttattcaattattcatataa

SEQ ID NO: 379805 - DNA, 1364 bp, Cannabis indica
ttttttttttttaaattttcctacgtctttaaaaaaaactttttagttactaatgatgttgataagtgtttgctgagattttcaaaaaccgattataattatattaaaactaaagaaatagataaaaaaaaatagagaaacaagactagagattttaggtggttcgaggattaatgacttttagtccacgagttaatgttatttagctagacaaacttttgaatattacacaaatatttttgtcaagtttataaatcctaaaggtctatctggtgacgcccggcccatgagccattgatcttctctaacgtggatgacacatcatgttgatagttgtcaaaatgtatcctacttttgtggataataaaaatacattaatacttgattgataattaccttgtatccttattcggaatatcagattttcagacaaaatcttgaaaacaaagtcctaagatattgtgagatataataataaataagcgagaaactatgtccaacatccagatactcattaattactctctcgaaagcactacttggttttatctagaaagctgcttcactggacctatacctcgcatggacaaggtgtctattaagcatttggatgtcttgacattgataatgggttcattttattatcttgagtgggcctatagttgtgcctgtataagttgaaatgaagtcttggaattacatgtatcctccttctggaaacatagataacatttactatttaagctttcggaactctgagatttcgaaggcttgcaatcttcattccagatggcatggaggacatgtggatacttaaaaggtgaagacctttttgaattccaagtagccaggctatggttgacaacttcttgttttttgaaatagagtgacacgtaacattatttctttggctcgtgaagactccatattgaaagagcacgtgtaatgtgaatttacgaaataggaactgatcatgtcaacgaacgagtgccctgaagagaagatcattattcaaatatctcgattccaaacaatgtattaaatgcaaacttgacagtttttcgggactgtcagaagtgtttttttaaatgcaatctgagccattaaattaggggcatgcagatgccattttggtcttataaataacatagaaacaatctgtttactatttttgcccatttttttcaattgtactcctatactatttattaaaaatatataataaaacattgaaggtatatatatatactagcaaaaaactacgtgcgaggcacgtatgctaaatttatgctagtttttttatatgttatttgaaagtgatacaattaaaaattaaagaaaaatattattaattattaggtgag

SEQ ID NO: 379806 - DNA, 4597 bp, Cannabis indica
tattgttattattattttgtttttgtaagtggttcatttatgctgtattttccctcatgcataatgtatcttttgttacttctttgtgtttgtgattgtagtgctatgtaatgttaatttgttgactgtttgaatttttgaatttaagagaaccccagagagtcgttagtatgaatttatgtcaaagttgagcttctttcaaattctttctcatgcatttttgcttccaatattgcagaaacgattggcaaaggaggcccgtgctcaagaaatgcaagcaaaaaatatttctcttggtaaaaaggtcaaagagtcacaaccttcgaagggaatgaagggtcgaggtgaagcttcattttatcgggtgacatgcaaggtggattcatatcttatttcacagccttcttttaacataacatcacttatttgttttcgtcactgtaagtgaaaaccttatttttataattggttttaaatgcaggataatggaaaaggaatgccacatgatgacataccaaatatgtttgggcgaggttcagaattaatttattagtcaagtttccatactattttggtcattctcaaacttcttgatccttgttctcttccttaaatatccataatcttatgtaaatgaacaaacccatgcagttctatctgggacaaaatatggccttaagcagacacgagggaaatttggtcttggtgcaaagatggtaagattggacttcatattcctctgctctaatggaattcgtttgttgaatgtatcttgataagatatgtttacatttttcaggctttaatttggtccaagatgagtacagggcttcctatagagatatcatcatcgatgaagggccaaaattacagtacgttttgcaggctggatatagatattcatcggtatgtcaaatttaatggaagaatgatatttttctttctttgtttatcatgcaaagttgcaaacccgattaatatatttgtatgtgtaacttgtacatgtgatgtttttggttggggtgtcttggtttagattttgttgtccatagtcataatggtgctctttccaagttgtcaggaacattccacatgtacatgcacatgaaaaacgagataataaggagcgatggcatggagctgaaatacaagttgtaattgagggaaattggactacttatcgtgtatgcaattcatgactggcacatctctcttatttttatttccaccataatatcttaatctgagaaaacttctttcttggcatgtgcagtccaagatattgcactacatgagacaaatggctgttatcactccttatgcccaattcctatttaaatttgtaacagactcaactgagtatgctctctctctccctcgcacacacactaagaaatacatgtaatagttcctaagaaatagataaatatcaagtcacacttgtattctcgttttttatgcagtaaaaacgtaactataagattttcacggagaactgatgtaatgccgccaattcctcttgagacgaagcaccatccatcatcagttgacttactgctgatcaagcgtcttataacagaaacttcaaaggcaaaccttttacaatttcttcagcatgaatttgtaaatataggaaaaccttatgctgaacggttaataggtaggatcactcgagaattttaagtatctgctgattatgcaagttttaggcttttattataaccaggagtatgtgtaaacctagaacaggactctttttttttaaaaaaaaattccctttcataaaaatggtgtggaaaattgagcattctacacttaaaaaaaactttacatgtaggcgtactattgaagttaaatttcaagaatttgttgaaattgctgttatggtatgctagcactctatctcttgtacattacgaacatcagaaagttgattcctaacttgttattttttcttaataaaggggaaatgggtcctgacttcaaccccaaaacggctgttaagtctctaacttctcaacaaatcgtccgcattcatcaattatttcgccaagctaagtttgatgatcctagtggtgatgtaagctttcacaggcactttacgttaatcattgagacaattttacaacgttagtgacatttagttgtctatctgatgttaatgactcatactccgaaactgttttcagtgtcttagtcctgcaggggagtacaatcttcggcttggaatcataaaagagctgcatccagacatggttgcaacttattcaggcaggttgtgtttgaatctcgtgtttctttctccttgtcatgagttttggggaactaacttttgtatctttctaacataatttcactaatgtactttggaaaaatgttttgtttctgagtatgtttctcttgacaataactgtatacagtgctcaagttttcgaaggccacccattcattgtggaagctggagtcagcatgggcggaaaagatgtgaagcaagtaggcttttaactctcaagatttcacagtctttgttctgtaactgctatcaactaatgaagcttgaatgtttgtttgtagggtgtgaatattttcagatttgcaaaccggataccacttcttttcgagcagggtgctgatgttgtaaccagaactgcccttaagagaatcaagtaagaaagtgggaaagggttagaaaaagtctagtgatgaacacgaaattagagttaaatcagtctaacgtattctgaaaataacttttcagctggagtagttacaagatcaaccagacacaagataaaatcggtgtttttgtgagcattgttagcaccaaaattccctttaaagggactggaaaggagtatattggagatgatataaccgaaatagctacagctgtgaaggtatgaattgcccacttaaatttcgagatttccattacgaacatgtactaaattacgaagctttttttctttttgttttgtttttcaggctgctattcagcagtgttgtatccagcttaaatcgaagatagtaaagaaaatacaggcacgcgagcagcaggaaagaaaacggaatctgagcaagtaaagttcaaccaacacatctctcaaatgtgtaccgagtcgttcaaataccgatctctgacaatctcgttatcaattgacaggtacattgtggatgccaccagtgctgtatacgaggttttgaaagaaatggcgaattcacacgcatcaaagaagaaaaaggtggctgatgacgacgaagactctgaattactcgataaagtttcagatcgtattattactaaagaaactctcagggaaaaacttgctcaacatgttgaaaaggtaagctcagttttcgaacaagaatgttcggttgttttctcgcttttgaaattgataaaatggcaaatctaaatgagtttatggtcattgaaggtggattatgagatggcaatggagtatgcaacacagagtggagtgagtgaagaaccaagagaatctatatatttacagtcacttgaagaagaagctgatgataaaaatttcatcaatttacacaaccccatatttgttttcagattgtataattaaattagtcattgcatttatttttatttttattatatatttcaattagggaaaaagaaaatttaaagtaggatttattgtgtatccttttaaataaagaaggtggtcatgtagtatttttcatttgtttttatcacttttcttgtactaataaaaaaagtgtctttgttttttatttcctctgattttattctaccaatttcacaaaacttggaagatatgattagtgtattataatttagtacaatgcttttttgttaatatggattttggctcaattagactaagtatggtgagttttttgaaaaatttgtaaaatgtcacctatagactatagtcatttatcattaaatttgtggttaagtaaaaaacaaaagtgaaactattggaaaattctatgttaatgatgcattcccttctttaatcttaattttttatatatattaacaatgtataacttaaggttgttgctcatgtgtttttttatacacttttattctgaattttttaatactttgttaaatgttttaaataattataaataaaaaaaagtaatataatatacatcatcatatattaaaaatgagattacaaactaatcaaatacaaaaaataggaaaagagtgcaccatttttggggtccctaaatttttttaaatcttgtattttaatgcttacataataagtttcattttccactttattatttgttcccatttgttttcattgaaaagaaatttattggaatacaatacaagtaactcaactcattgccaataaatatatattatctatataaaattaaacctaatttcacatgtaataacatgtgcttactataaaaactttcaatacaaatttaatttataacttttattttgcttaaacttaaagtataactttgttagtataatctcaaatctaatttaatttataatttgtttttggaaatttttttagaagtactcttaatgggttgttttaataaattttctatctattcgtca

SEQ ID NO: 379807 - DNA, 6067 bp, Cannabis indica
agtaatttttccccgaactttgaattattaattagtctttcaaaaataaatcaccaatttaaatggagatactcttatataaaattatattttttaattatataaaaataaatcactaatttgttaaattgaattttaacagccaaaaaagtttcataagcacgatttaatacctatgaaagttcaagaaaaaaattactaattaacctttttaaaatattactcatccgctaaaacatagcatataccactgttattgctaaattcaaataaaacaacatctttataaaatgtggacctctactattacatgagagcaatcatacctcatcttttttctacccgagtacatttgatgcaagtaataatcaagaaatttattcagataaaaaaaaaataatcaagcaatttattagtctataattttatctgccggaccaaattagttggcccaaaaagagacaaaacttctgtcttatagaatattatagaacatatattagaatactctattcaaaataattttcaatttatcataaaaaatcaaatttaaatttaggtaaatttaagaaagtaaataaaaatttttaaattgtaattagttgtacattttttaagtctcgcaataaaaaagtatatctctatataaaaataattatatttttataaaatatataggtaaattaataattttattgtaaattgtaatgtatacataaatattatatttacttaaaaataattttattatgatgtagtatttatgattatttattattattattattgttacatttatattttttagtgtttaatttttttttctaatgtaattctatctaattataaaatctcaattaaaacataatttacttgatccaaatgtattcttaaacaaaaaattttctctatcaagaaaatcaaaatttgttattaagaaataatattcgttacacaaagaaatggtataaaacatcatattaatatgtaattgtgccaacacataattgaatccctcaaacttagttgagaaccctaaattaagaaaaatcaaacacaacccatcaaagaaaatttaaatccgttaaaattataaaaaatttaacaaaagaggccataatactaaaaacaatttcaatggccttctaacaaaagagatcatcataatacacccatacatatccaaatatttttaaaaataaaatcttacccagaaaaaatttctctgtaagaaccaatttgttatctcaattcttaattctcatatttgaaattgaagagagagtgtaaaaccttactataaaaaatcaaagtgagagaaaaagaaatcggaaaaaaagacgagagaggagcccaatattttaaattaagaaaacaaaaaaggaaatgaatttactgaaaatgtttttaaaatattttaatttttctaattaataaataaataaataattgattagaataacgtaatcctatacaagagcatatccatttaaattggtaatttattgctaaaatgtagcttatttttttataaaatttgttcgtgctacccaaaagagttttttttattcattgttccaaaagttgaatgttatttctttcatgtattaaaatcctgaagcaaacagatgaagtggagattgaggaatcaaataacagaaatggaaactaaaaataactacgcccaccgtggggctcgaacccacgaccacaaggttaagagccttgcgctctaccaactgagctagacgggcctatttgttgaagcaatgtcttagatatctgaagttacttataataatgacagcactacaaactacaaaggaaagccttaccatagaatcagatctcatctcaacactataaaaacattgtgatacatatatcttataagtatactttatatctattatttttcttctatctacaacacaatgtacaaaattgctaatgctatacaatatatatcccttaagcagccagtaatctcaaccatcgattctaccaagacagagggttgagataggtccatactcttgacttgtatggcttataaacaagcaaaagacaggccaagaagaccactttgaaggaacatatatatagtcatggactaactatgtcaaaccccaatatggcttcctctaggagatcttcaaaaattaagtcttctacctcaagaccaacacactcactgtcaaattgaaggttcatccacccatgacttttagctaaatcacgccccacaacataatctagtgattggccaacctctggtttgaagctcaagtaccaacttataagggaccacacttctctcagaacatgtggccctgctggcattggactcatgagtgaaacacaagagagtggaaatggacagtaactgtatgaccttgcatatatctcaatcaaaacctcatttattatatcaaataacagcatgtgatcactttcaaaatcttcatttgcacaagtgttaggatcaacctctaagcaaccctctacttcttcatatactgagggatcaactggttgatcatcagagtgccaagttccaaggaatgcattgctactgaacccagacagttcaagtacatctctcacataactgaactcagctttgtcttttgaattcactttaagatgggaaatttcttccattatttgtttgtcaagtgtttcttgagccttttcagttccagacacttggggtgtagccatgtcaagctccttgtcctttaccaacttaactagttcatcagcaagtattgcttcgttctctgattcttaccaaaaaaaaaatccatgtttagctgtaaagtgcattaatcttaaagataaaaccagtaaaccctttaagaaaaggtaggcaagtagagaatagtttaatataaggaaaggctaagaggcaaaccttctactgtcaagcttccataatcatgtatatgagaacacaactgagtatcagcttcactatttgatattgatgttaaacccaactcatcatctgtaacaaaatttactgcaccagtctcaaccgaagatttagaaataacgctcttggttgtatgatcatcattcatgtgcaattgacctgcaatgcctactgcaacaccaagatcttttggttcatcataactacttgtgctaacattctgatccatgacattgttggcttgcccttttgaggaggacaaagcttcaggagattcctctggatcaagaaaagagttaaggtcaggtaaggagtaaatccttgccaagtactttgggacactattaggggaaccttcttcttttattttgattttcaatccttcagtgttttgatgtttagcttcccggttgaagctagtctcatacaactggcaataccgatccaacgattcagtgagagatgaggctcttctcatttggtggcgcagccttgctttatttttcttaagggaagaacttgaaaaatcagtttcaaaaccagtaacatcaatgtctttacattcttcataatttgccgaactattaagtttattatcaatctcctcctccatattatgtccatgtggaatcttatggatgatggcgtccatactaattatatgcctctcttttcttccttctctaattacatgtttaatcttctgtttaagagtcttgaaatgcttaacaacagcatgagtatcgccattgttcttttgttgcttagcagaagctggagaagccttcttcatatgtttgagtctgctaggttctaaacctctataacctaatgaaccagatgaagggaatgtcttacacttgtctagtccttgttttgcactcagtgcttgttgactgctaaaatggtgagccaaaggagaccctggatcctgcaaaattttcatcaccaactccttgtttacactgattatatccaaggcatctaaacactctttgggatgactagccaaagcatccacactgcattttctttcatttgtagacttctgtttcaacataaatgctgtggtattctccaactctccttggagaagttttggactctcatcaaagtggtcatgttgtggttcatcctcaacaaccctgacactacattcttgactagaatcactattcattgccattggattttgctcattggacgcggaatggatttcgatgttttgctcataatctaactccaatgttttaataagaggttccaaataaggaagttgtgaatgatggatggaatctgttcttgtcaattgtcttacaggacaggatgaactcctatgatgcctgccctttttatgagttatctcttcagcaagaaatgactttattcgggatttgacagaattgttcttttttggagaggaatctctacttctttcttcaacctgataattttttaaatcagatactccagttggtttggttcagtattgaaatatcaaattgaaactaagaacgtgttttttttttttggcttctttaatctaagaacttacactaggcttatacatatgcccatcatcttgttcttgcttgttaggattagaacttggcatctcttcatgattttctgatgataaacaaacaggtaatttgaaggaaaacccatatcagatcttttcaaacataccatataagcaaaatggatcaaaacattaaaaatgaaataatgagtgaaacaaaaaaaaatgtgtacttaccaacaagagatgggtttttttgagtgagctttttcttaacacgacgccagtgatgatatttgatgatgtgaagtaaaccccatgcatgtcctccttcattctcattcgatcttaaagatatgattgaacctttttgtctcaagttcttccccatttcttttttaccaaaatactgcatctaattcttgtatataaaaatatatattaactaaaacaaattagttgattctttcaaacaaaaaataagataaaatataacatagtatgagatctttagattgaaattaagagcatttttgctacattttaatggaaaataatgaacaaaattgaagatatgaagctaaatgaaaatccagaaatttaattttatcatgattgtgtatttgttggttaaatataatatgaaaaaagaccagacttacccccaacaaaaagcaattaaaatttggtcttgggtagatagttgtcctcaaactcctttttccatcatagatttataaggggaaagaactttaatgtgtgagaaaaagaactaaaccaactcgagctaatataggaaaaatcaatttgacaatggtagaatgtggaagcaaccatctattcaaaaacaaacacacacaaataaaataaaataaaatcataataataattatcttttagtttttcgtatataaaaaaataagggtctaaaatggtggacaatatgaggtcgattgtatgagggatctgttaggtgtcccaatggacacaccacaaccactagtataacattgaatgaaggttgttcattaataattttgtgttatggaatggaccaagccaaaccatattcccaatagcttttgatgtgatgtaaccttattagttatcaacatagaagctataactatgaaattaacaaatgcatcaaacaacaagtctaatttttccacagttggagacaatgtatgtaggcccttcagcagaaaaaaaaaaagggataatgtaggcccgcctttcctttttgcttaaaacctttccatttttttacatgttcgagccatgaattacataaaaatagtcaaaatgtttgattgaattgtgcatatcttgtaaagtttgatttttttttcgttcgagccatgaattacaaatgcatatatttatatacatacggggaagagagagaagcatagtcttctgtgagaaataattgcttatcatagtatttcacattatatatgtttggttaaattgcgacataaatatttaatattttaaatttatacacttaaaaacctaatatttatttttggagacagaaatacttaacgttacaattctcttacaccgttactaccattttcgttaactcataaatatagaca

SEQ ID NO: 379808 - DNA, 3343 bp, Cannabis indica
gacagcagttatccaacataacgcccttctgttagatataccacggaattggataataaaatgaagcagcaaaacacatacccaaaccccaagaatcaatggcccacggtggagattttctaattgcagcccagtcagacttcgacaactccactggtttgtattgtgatccaataagccaagcatattgctggatgcaagtaacaatttgtgagaaataaactcatttatcatttccaaaactttcttcttctcaagagaattttgacaaaaacgaactcagacccaagaaaaacaacagccagtaccagtcacaacatactaaaagatgtgtgtgcggtagaaaatagacaaaagcaactggataatcaaataatatgaatcttattttaccagcattgatccaccagaagcttcagtgttattatcaatctcagacagaacatcaaaagcatgtagcttccagtctaaagttggtgtaacaacaacactagctaagcaaacattagcatgaacctgtaatagaaaaagttagttcagcagtataaagaaaaaaaaaacaagtgcatatagagagtgttatatgaagaaggttttcaagacacatgcactcgtacaaacaaaagctatcaacagcataagcaggaaaaaaaaacttacaagtttgcaatcattatttaagaagctcacagctttagctatctggtgtagtccccatgcaaaatactcatccctgccaaccaggtcaaattaaaaatgtaccacagaaataaccaacaataaaactagcagatatatcaaaagttttctgcaaattttttgtgtacaaaaaagggatgctatagcctgttaatcatagaacctgaacctgtaattatcacttcatccatccacaaaagaaaattggaaaaagaaaatacatctaccatataagaccgggaaaaaaaatattgtttatgtttatatacctctgtgtgccttctaaacccagttccttgatcttctctgatagaggcataacaggctctgtgacaatgtagatggtaacctttgtggtggagccatcaaaagtttcagtctcagtactgtgaagaaacgataatatatttggatgcctgacctgaaaaaaatatcaaaaataaaaatttagctggtaagtgtcggcaaattttcattttcatgtgatttctacattctgtgaaacaaaaatgtagatatgcatgaagaaattgagcatacatattcaaagtatagttctcttggaaatacatgaatcttgaggctcaaagacaggaactctcagcaataatcaggttatctctaattaaataaaaaagaattaatattgtgagttctaaaaactgttcattgttggtattccagaattttgaaagattcttctttaacaataaacctttacattgttttattaaatctaatatatatatatatatatatatatatcaatgtgtaccagttatgaaaattataaacaggaaaagatatcacttttttatgcatgaatcagataaaagtaaatatgggaacaatggtagagaacaattcaaatctgccaaaagaaaaacataagatagagtacttggcactactcctattgatttcttcagattttattttatgtccagcaaactaaaacctgagaatttatttcttgacatgaaacaagttaccatctaaactttctggtagcaagtctatgaaagactaacatgctcagctaattccctagaactaaaaatttcctaaattctgcaatttagtccttatacttaaatcattagcattttcaggtcaatgtggaaattgaattgcttaaatttaagcgactattttgatgaaaactccaatcaaccagccatgaattacaagattactcaagagctataatcgcaaaactgataatagtaataagcattcaagctaaatgagtatgtgagtttatagagtcaggggtaaaacaaattaatagaagttagtactagacattgctaacttacagttcgaaggcgcttcacaccattgcgaccagctgctagatgcccatcttgggcattacttccagaaagggaaaagatagatactggtgagccatcatcctgaaatgtaatcaaaaagcatttaagaacataacaacattaaaacgtacgtaaaatttttgatacatattgtctaaacatatcaaatcagataactgagccctggcctcctctaaaaatgatgaaacaagcagaaagtctcctgatttaacaaacaatctgccaaacagtcgatacgaacacttgacaggcaatcaaaactgcctccacatgatatagttggtaattacgactaaaaacagcctgatcacaattagaaacacttgagattcaaataaatttcccaattacactaatattccaactttataaccaattccattagctcagcaacccagaaatcagataatgaaatcatcacggtttaccatttccaaataacactagtccaattcttcttcgaaacaaaactcaaatcgttaaagcaattgcaaaatgagatccaacaattgaaactccaaagtccaaaacaaaaatgcaaatccggaaggtttccagttcgaatcacacaaagaagtaacaattatgatcacaataatcgcaagtgtgaagcgaaatcctataaaaaatttgaaattgagcaatgatccatatcgaaatgagagattggatcgtataagataagatgtaataccttggaggtgccgcgagagtgagtccaagagccccaagcagaagagtaaggttcgccgatggtgtagggcagatctttgggaccggcaccagatccaccgaccactcccttaaggaacttaaacatttcttcttcttattcttctccttcttcttcttcttcttcttcgggtactccaagactcagtgggagaggaaagagaagagagtcggaatcccgattggaagaacgggaaacaagcccaatgaacatcaactaaacaaacaacgtacgtgtaattacaattcaatccctttactttctcaatttacatagcgtacccattatgtttctaaatttaaaattatcccatccactacttatattctagtgggtaaatgtcattttgagaatcgtaaaattacagtgaatgaatggcttaagattataagactatgaggtaaattgaaaaatacatattttatttattaattaatcaaatttatttttaatttatatctattctatataaagtgtgcctatataactaaatttcttggtttatgagaaatttatgggtgactttttatttatatttaataaaataataaaa

SEQ ID NO: 379809 - DNA, 5566 bp, Cannabis indica
ctaagcagtgatgaaacataatataggtattcttaaggttaactgtgatgctgcaatctctttaatctgattttaattttaattttttggtcaaacgatctgagaatgttgagtgctcaagctacaatgctgaataaacttgctgtaacaatttctattattgtgtcttctaagcggtgatgaaacataatataggtattcttaaaattaattgtgatgctgcaatctctttaatctgattttattttagttttttggtcaaacgatctgagaattagacaactgattatttgactagtttttttaattctaatctagtcgtgtctctaacgataggatgcttcaattgaattttaaactattattttagttgattgccattaatattatttattaaaaaaaatacaaatatggtctctttattatatcgaaattttaattaaataaccttatagaaaaaaaaaaaagttaattaaataatgtttttgaaaataataatacaagattttattttatttttttgttgatatataatataataatagaaaggtttaggaggagagacagatagagacgtaatctactcggttgagtctctttcttatgtttttaattttttatttgaaaaaagaaaaagagagaaggaaaaaaaaaaaaaaaaaaaaacaaaaaacttccattatccaatatctttctctctccaaaaagaaaatctctctatctcctcagatcgtttgctggttctcgggcgttttttcgtcgagaaagcaacactccaaaataaaatcatctgccataaattatttgtttcatatattatttttaatatttgatttctattatacattttttttgatttaattttgtttggtgtcaaataaaaaaaaacaaatagtttttttgattgtttgtaaatgttcataagggtgtaagggccttgaaactcataatccgttttttctttttgaggggtttcttttcaccgtctggattattgtcttcttcgtatttatagcaagacggcgtgaaaaatcagaagagaaggggcgtttttcttttcacttgttgtgatttcggttggattttgtttttggctatttcttttttctttctattttggatggttgtggtgtggtagaaggagatgaagacacttggtacttgacttggatgattttgaagttgtcttttggggttagattttataatcccttttcttcggtttcacttagaaacagcctggtggggtgttatgattaagacatattttgaagaaccattggtgtttctcttgtgggtttcttcggttattttcaaatctttccttctggcgatgaggaatgatggtggccaaaagcagcagggtggtggccggactaatggtttcattcccagctcgttccgagctatatccagttacttgaggattgtttcttctggggcctccaccgttgccaaatctgcggcgtctgtggcctcctcaattgtggatagggatgatgatgctgcccatgatcaggtaagaggtctataactttagcttatgtctagtggaatatttgactaaagagttgaatttttttagccttttttctggcaactgtcatctgaagctgagaatgctaaagggattttaaaatgtttgtaatcaaattttgtttatgacatgttttgcaattgcctttgttttatacaattggtggtctttttgtattagtggaaacctttgtggatgaacaattaatgcttaataaattgtctaaattagtaagttgacggtagattctatatatgtaaagggaattttctttgggagatagttcttactatagaatgtttcatagcatgtattgaaataattgtttatatgatgttggaagttgttatcagcaagttctatatttagactttactgatcattatacttattaggctgttagaaatcaattagtgatttggaggagttccgttgcaactaccaactgttagttagaatgagagctagtgttaaggattttgtgcatgcatgttccaatcttaactcaattacactggttggatttaaatcaggaaagtggagtgacattatcgtcattattgtgtttgtattgagtttcagttgtagttttaaagtattgtgtgtgtataagctattgaaagtttcctttttctctttcggatgtagtattggttttgttgcttgcttttgtaattgagaatcaacatgtggtaggaaccacctaacggttattttctgtgtcattgacacacgttttctgcatatgattgagacacacgacatggttcaaataagacagctatagtgtttgacttgctgatctgttttgtgacttaatcttaaagcaattatatatgtcggttctatttcaatcggggaaatggtgtggcatcatctccattattgtgtttgtattgagtttcggttgtagttttcttcttcttagttcaaatcacaaaaggaaaaaagatgtgaacgaacaccttttcacatttctttctatatttaggccaaccattgcttcttattgacagtaattacctgcattgatggtttccagtgtgacttggatgctctaagagctatgcacaatgtttaatgttttcatttttttgatcaggcacaatgatactagaagacttaaatagggaagcatcaagtttattaatataattgttatttgaagtggcttgaatatggaaattgaaaaacatgtacacattgtctctttgctgtgagaacttgcattaactaatgccttcttttatttatttattattatttttataattgttatgttaatgtggcttgaatatggatggtgaaagacatgtacatatcgagtcttttacagtgaatgctttttctaattgtttgtctagtaaagctaaaattttaaacttcatacagggcacatgatatattttattatctatgctaactgttcagaaacactaaataatgcattctttcataataacggagatggtttgcgtggtctgttatagtttcattaagttttgaagcattctctcatgactttagagataatatgtttttcaatcaggtttttgagttgatttttcaattcttaattaaactagtctagctttttactaaaacaaggtaagtatgacattaggctgtctaagcggatagaaatatattgagagctggaacagcatgcatatgggatgtcttgcactagaatctgtcagtacttattttcttctggagttttctttgaagttctgacttttagatagtgttgagaatttgtggctttgatggacttccattcatgtgcattatcagcatttacttgtataactttttccccttctaaactatttgctctttcttctcatttgacatgaaggtaaactgggccgggtttgacaagctggagggtgagggagataacattcgtcgagtcctcttgctgggatacagatctggtttccaggtttgggatgttgaagaggctgacaatgttagagacctagtttctagacatggtggtcctgtttcattcatgcaaatgttacgtaaaccaattgcattgaagagatctgaagacaagtttgcagacagccgtccattactggtagtttgtgctgatgggaatctttctgttggaaataatatgcaggatgtattacccactccacacaattcgagcattcaaaacggccatgatgcaagcaatggaagttttgtgccaactgctgtattcttttattccctaaggtctcaatcttatgtttacaatatcaagtttagatcagctgtttattctgtaaggtgcagttcccgagttgttgctatcactttagccactcaggtatacttttttattcttaaagttgtatctatattgtatcttctgcttaagtatttttttttatgaatttagccattatgtatttcagatacactgcattaatgcttcaactttggagagggaatatactattcttacaaatcccatagttacagggtgcccaactccagggggtatagggtatggacctcttgcagtgggtccaaggtggctggcttacactgggtgcccagttgtatcctgtaatgctgggcgtgtaagtccacaacatctgactccttctgcaagtttcccgtcaaatgggagcatggttgcccactatgcaaaagaatcaagcaagcaacttgcagtgggaattgtgaccctgggagacatgggatataagaaactgtccaggtattgctccgagctcttgcctgatgccaataatgctcatcagttgggcagttcaggctggaaaggcaatggaactgttaatggccatttgacagatgcagataatgtcggaatggtatgtatgtttacttcatattctattttatttgctttttcttttctctctaagaatttttctcaatatgattattattatttcttttgtcaggtcattgtcaaagacattgttagtaaagctgttatcgctcaattcagagcacacaagagtcctatttcagcattatgtttcgatcctagtggtatccttctagtcacggcttcagttcagggccataacattaatgtttttaaaataatgcctggccatgctggaagttcatctgcatgtgatacagcttcatcatatgttcatctttacaggctgcaacgtggttttactaatgcagtaagtactgcatgggtctcgttaattttgtttaatttgttgcttttgtgtttagtagttgtttatttattttctgggtccaggtcatacaggatattagcttcagtgatggcagcaactggataatgattagttcctctaggggaacaaaccatctctttgccataaatcctatgggaggatcagtaattatccctgatgctgatgctatttttactggcaaaagtaatggattgggggctgtgaataggtcgcatagcagttggccactcaattcaggtctacaaatgcctaatcggcagaaccttggtccatcaggtgtaccagttactctctctgctgtaagtcgaataaaaaatggacatagctggagaggaactgtaagtggcgcagcagcagctgcaacaggtaggatgagttctctctctggggctgtagcttcatctttccacaactgcaaaggcaaagcattgtacatggattgtagctcctcaaggatgaaacaacacctgttggttttttctccttctggttgcatgatacagtatgcattacgaatatcaactggtatagatgcaatgactgctgtgtcggggttaaacactaattatgaatcaggtcaagagcatgatgcaagattactggttgaggctatccagaagtggaatatatgtcagaaacaaaatagaagagaacgggaagataatgttgatatttatggcgacaatggcatggcagacagtaaaaaggtataccctgaggcagctaagaaaggaaataccatatttcctgaagctgagggtctggggacaaaaggaaagattactcttgaagaaaaacatcatttgtttatatctgaagc

SEQ ID NO: 379810 - DNA, 1457 bp, Cannabis indica
gctttgagtctgtctacctcaccattgggaaggtattttattttatagacccatttgcatcctatgggtgtgtatccagggagaagagagatgacaatacaggtgtttttatcttccaaggcttgagtttcagtattcattgccttgttccatctcaggtctttggaagcagcagaatagtttgttggttcagtaattttataggcagataagatagcagtaaggaattgtggagatagtttatgataggaaatgtattgctggatagggtgagaagtggggtttgccgtggttttcacagagcagatgcagtcctgtaaatgctgaggttttttgagtgatcttccagtttttgaaactttgggtgatttttgttggggggggggggggaattgctgctggtgtgagatggaacagaagcagggacagcagtgtggaaaaattgatctaaatgatcctgagtagtattatttgggaaatgggaatattgtctcatgaaaaacaacatctctggattgaaaaatctgatttgttgccaagtctaataaggtgtaagccttcataccagaagggtagccaagaaatatgcaactcttggctcgaggagcaaatttatgtcttgctctattgagggtggaggcatatgcaagacaaccaaaagttttgaggtgatgataggatgattgttaattgtgtaataactcataagcaattttcttgtttaaaattttagatggaattctattgattaagtaggtggaagtttgtatggaaaatggccaataaactaaggcaacttgagattgaaataatagtgcccgagccacattaagaatgtgttgatactttctttccacaactgaattatgttgtggggtatcaacacatgaattataatgcagtatgcctgcattagtatagaaagaaatgatgttgaattctttagcattttcagtttttatagcttttatctttgcaccaaactgagtcagaatacttttgtaaaatgcagggatgatagtttgaacctctgatttagttttcatcatatgtatccaggtgtatcttgacttatcctcaactatggtgaggagatatccatacccttcaagactaggaagatgaacgggtccccaaacatccatgtgcaataaatccaatagattggcagaaaaattattgtgtgaaataaatggttgtttcttttgttttgcttcatgataggtagaacaatggaataaaggctgctgatgaaaagaaaagacaatctctttattaattcctgttgaaattgttacagatggatgactaaggcgattgttccataggtcattcttttgaactatattattgacagtacatgtatgattaagtagagatgttgaaccaattgtgattggagaatgcttcaagatgtaaagcctgccaatctttctagccatcccaaccttcgaagt

SEQ ID NO: 379811 - DNA, 5978 bp, Cannabis indica
aactttggaagatcagaatctttgacttttaatatatatgaataacagtaattattaggccgtgttgggaggaattctacacggtaatgtgatttcggtattccgagtttcgattttcatggtcgagtgcgagtaaacgactttctcaaaacttgttaggatggacaatgatcatgctgttggggatacgaccacaacagagactgtagttcaggaagaggtgagggtggaagagagtttaatggcagtcgaagtggaagagataccggtgatggacgatgataatgggtgtatggatcaggaagcaggggagttagatgatatgcgacaacacttctttgattctatgactctggaactagaaccggatgtggaactcagtgctgaggtcacgaggaaaggggttcttgcaaagatcttcggaaaaagaaatgtggctagaggaagagtgaaggaaatactctcaaacatatggaacgtgaaaggtaagtggcgaatgaaaaccctgtcaccaggactgtgggagtttttctttgacaatgaagacgataagaaggagattctcaagaaaagaccctggctggttaatggggttttactgaacataagagattggccagaagatgggtgttgggaccgtacggatatgaacaaagcaaggtattgggtggaggctcatgggctccctacaccatatctcacttgggagaacacggatgttatcgtaaggaaggtaggagaatacgtggattttgacagagcaccgagaaatgttattgctcgaagaggttttttgaaatttcaggtagacattcttctaaaccaaaaattagtggcagggttctatctgaatatctcatgtgacaggaaagaatggatacaatttaaatatcacaagcttctgaccatatgttttacgtgtggtcatttagctcattactgttaaaaatgtgatagaacaatggaatatgcttaccccctgttggtaaagctgtaccactctacggggcatggataaaaatgggggttccaattaaaagctatttcgacccatcgattccgagaatgaaaccaatcgcctattaccatgacgccggtgacagagctccagtggggtgatgggataagggtaagaaggtaattgtggatggtgaaaaggatggatcgatgccagggggacaagaagcagtacaggggaacgttgggctgaggctttcaccaaagaagatggctgtgctgaatgctaagaaggcttgtgtagaaaattagagaaaaacacccttatcgggtaagagaggtcttcaggggtagaggtctttatccaatataaaaagacaccctatgaataatattgataatagactgagagatgcagggattatagctagtcttatggcagacattgggccttcacgtgatcagaaggtggaccggccccatgaggaagtttgcaagtctagggtccctcaccaacatcctaaaccaacctttgttacatggcccacggataaaagccttgatgaggtggttgatcaattagttggaccagcccacaaagaaaatgagttggtccaagtgattgtttcacatgagagtggggatttctctacaactaggtcggtttttactggagcaaaaaaaaggaagaaaagcttgaacattatcccagttatttctgagaaagaggaggcggagaacttgggagacaaagctcctacaccggttacattcttaccaccattggaggtcaacaccttcacaccaggaagcagtagttgagataaaacaaatggtaaaagaaggtgcaatccgagaaaaaggggtggtagctcaggaggaactaggaaacgggggaagcagggacttacaatcaatgataataagaatcaagaggagaagggtgaaccgcagctaaaaggtacgacaaattccaactcaaatttggataatgaattggttgacattaaggtttatgagtcacttgatcgttttatgggcgaggaggcggcccttaccaagccccctccgtcgacatgagactcttatcttggaattgccggcgtgttcgtagaaccccgacaacccaagcgctcttagcttgggctagaagatacaaaccggaatgtatctttttgatggaaacaaaaacaaatgtggaagggatcaatgggttagcaagactgttgagatatcaattctcctctataattccctctgtgggagtgggagggggattttttctattgtggaatgatggggttgatttgaagtttattgatgctaatgatggtgtctttgaggtggagatcgtggaacaaattacttcggtgaaatggaggttctttacggtttatggtaggccgtatgaaaacaaaaagaaagatttttgggatatgatagaagtgaggataggtagatgctcagaaccgcggatggtgatcggggatcttaacttgatagcgaacccctgggaaaagtgtggaggtagaagagtgtcttcgagtgatacgaatattctctcaaactttatgcaaaatacgggagggattgacttgggattccacgggagcaagtttatttggcaaaacaatcgattcttggggggtttaaccagagagagattggatagagcggtggtgtcgggggattggatcacagccttcccctcggctgatgttttcaatgcccccgtcacggtgtcagatcatgcttttattctcttggatagtaatggaagaagacggaagggagtaaaacccttcagattttttgaagtttgggcaagggagaactcttgtgaggttacaattaagaatgcttgggaacctagagacgggagaagagtaaatatctgtgggcggttaagtgatacaaggacagcccttcaaagatggaaaaaggagtcttttggggactgtgatagaatgataaggaggcggagaatcgtcttaaatggatccaagccaacccttttcgatggctttgagcgtgaggaagaaaatcttttaaattgggtttcagagttgtggattcgaaaggagggaatgtggaggcaaaaatcaagggaagtatgattgaaattgggggataggaacacaaaatttttccatgcttccacgataataataagaagaaggaatgagattaaagcaattaaaaacaagatgggtatttgggtctcgacagagaagaagatcggaggagtttttaatgaattgttctaggagctttattgtgcaagcaacacgtgtatggataattatttttttgaccttcaaaatcctgtgattactggggaggaaaatgatatgattaaaagattccaccaactgaagaaatttggaatgcagtggcggctttgcaccctctgaaggccccgtgaccggatggaatgccgggttttttctatagaaggtattgggagattgtgggaagcgaagtgatcactatggtacaaagcctttttggttcgggtaggatggagggccaactgaattatacctacatctgcctaattccaaaagaagatgatgcttgctcagttgataagtgccgacctattagtctatgtaatttcgcctataagataatatcgaagatcgtagctacaagactcagggcggttattgacaagctagtttgtcctcttcaatcggcttttgttcctgggaggtggatagctgagtcatctatcctaacacaagaattgattcatacgatcaagagaaagaaggggaaaagagaactcatggccattaaattggatatgctcaaggcatatgataggctagagtggaatttcctaagggaagtgcttagaggaagcgactttgatgaccaggtgtgtgctttaataatggaatgtgtaacaacagtttcatattcagtccttctcaatggagtgcctcagaagaagttcttccctaagcgggggctctgccaaggagatccgctctcgacttttctgctcctgatgtgccataatatcctatcaaaattgttgttacgagaacaagttgagggtaagctgaatggaatttctatctctcgcaatgcccctacgattagtcatctcatgttcgcagacgatactatcttatttacccgtgcgaacatgaatatggtgtcgagcattctgcagtgtatcaacaagtacgagtcgtggtctgggcagaagtgtagtttggcaaaatccagtgttcttttctctggaaatatgggaggcagccaaaagagcaatattttgaagtacctaaatgttaaggaatgtagcggtcaagagaggcaccttgggaacccatttgttttcaaaagaagaaaaagggaagagtataagtacttaaaggaaaaggttctcaagaggattgaaggatggaaaacaaaactcctttcttttgcgggtcgcactacgctggtgaaatcggttgcactatcaattccgttgtatgcgatgtcgacaaataagatccctgtatctacatgtcgtgaaattgatagtatcattcatagattttggtggataggaggctcggagaaggagaggtttatggctttaatcagttgggatcgtctatgtcgccctcttcttgttggggggctgggatttcggaaaatagaagacatgaacaaagcacttttggccaagcttgcttggcagttggctgctaatgtttatagaccctgggtcaagtgccttgcagccaaatattgcagaaccaattcaatttggagtgttgaaacaaagaataatgattctgctctttggaagggtattttgagctccagggatattctctacaagggtgggatgtctatagcgagaagaggtgatttaatagacatttggagacaaccgtggattctgtggctcgagtatggggaattcagagaaatcatggaccaagctaggctgcgttatccccaaccgaaatcgattgctgatgtttcaaatgatgatggaagttggaatgcagcactaatccatggcatctttgggggttcattgggggatagaatttaaaatagctcgaatgcctttggggaacaacgatatgctagtttggaaggaagtaggggatgggctgttttcagtgaaaaggggcttcgaggccattcatgcgccaggggttaactcggacaacagcctatggaagttgatttggaatcaacgcactcatttcaggcattcggtcacgatttggagattagttttgggttgctttccaacaagagataggctggggttcgttgcggacaaagtgtgcccgttgtgtgaaatagaagatgaaacgactcttcacattttttgggactgccattgcgctcgggcaatctggtttagcagtccttttgcttgtaatggagggggtgatctcgggtttacggttactgtcaaagacagaattgagtggatgctcactcgcctaccgaatgagctcaaattcaattttctgaattttttgggaagcttggtcgaaggagtgtggaaagccagaaatgagtggatgtttagaggcaaagagataaacattgcagcagttaggtgtgcgattttgaggaaatatgctgaatgtttaatggcaggggagcccgattccgagatttgcacgagtattaggcaagtaagagcaagtgggaagatcaacaatgagactgaggtgattggtgtgtgtgatgcatcatggaaggatggtgaagaaggcttagcagtggggctgctggaaaccagcggaaacaaagttttctggtttgcgaagaaagagaaggcggattcggctgctgaagcagagttcaaggagattagatgggtgatggatcttgctactcaataagggtactcctctgtagcttttgcctccaatgctatggttttgattcaagcattacatgaaagaaaatgtccacctctgtggaagctaagaccaatggctttggagttgttaaactttagacatgtttttgtgttgggttttatgccc

SEQ ID NO: 379812 - DNA, 9182 bp, Cannabis indica
ttgacctctttcgctttttcatttttcttcttttcttttctacgttctttcctcctctctccctctcttgtatattatgtgtataaatatttagctaattaatttttgtcttttttggctactaaaatctaccatattaggagtacagaagaaaaaaacgagacccaattagaacacaacataatagattatagctaggttaaaaaaaagcaggaatttttggaagtagaagctaactttctgataattttggatttgttggaagaaaaaaaacacttgaagaaatggcaaatgttcctcaggaagcgatcaagcttttacaagctctcatggatcaaggtcagtagtctctttctctctggactagtaaaattagctaacttttccctttttccttcttcgtcttcactgacttattttttttctttttaacaacaatggcagttgaggagcctctgaagataactatttcaggttcgttcctttttcgttttgtaactttttttattttcttactttttatttttagtttttgggtaataatatgtccgatctgatgtgctgtctttgactacaaaagaaactcttctagttattttatactcccccttccctttctttcttcctattactcttccttcctgaatatgcaaaattacgtctttatccttcagctacatcagtatctctgactgtatctccaccaatccagtatagcgactcttttgggcttggtcggttgctggtttttttttttttaataccgatggaaaatgttgtatggcaaaatgtgaagcggtgacttttttggttttgataagaaatgtgtggtgatgactttgagccttgcctagccaaatcaggcccgttgatctgagacgtttgagttgaccccgtcgttatcggtttcctgggttttgatctgattcaccatacaactccaattcaaccgttatttcattttatattataattagttaaaattaatttaattattggcactacaaaatacaaatccaattcaaccgtttttcatgctcactaattatacaaataatttctaaaatcttttttctcacataaggaattagaggattcatgaatttcatgtccatcactgatttagttaagatgatcttagataaaatttccttctagtacaccttaaaccgagtgttgtggcttaaagttggtagaagatgaatgtactagcactaggttgagaagggatctttattattcctgagtcagactcaacttgaagtgtttgaatacttagttattgccttaataatactatttggatgtgtgccaagattggagggaaaatagtagaaaatgtatttaaaaaacgggtgcacattgttactatactgtctgattgagaacatggacatttattatgtatgctagtattaagggccgaaaggacagtagccattgcattatatatttatattattcattatccctttattattttagtgtgagatacaaggaaaccgttgtttatttgatgttggctgcatgctttggtgatgctataatatatggataattccttgacagttttttcatggctttctcagaatgttcatcaaggacatctggctgaaactttgaagcgttttctaaaagcaagagattggaatgtttccaaagcccacaaaatggttagatgcagctcctttgattgtaatagttttgaagattgggatatttatgtttgttcttttcgttgatatcccttgtatcgtgttctgataatgcttctatgatgtccagttgatggacagtttaaattggagggtacaaaatgagattgacaacatattagcggtaagtttttgatttgcactaaaatttctctgagtacctattgtcagtgaaattccttatttgaaatattaactgttgtgtgatgtcaaattcactaagaaaagtttatgcttagggaaagcaactgaatgcctaggaggctaggaatagcaagtggtgctgatgttgcctaattcatgaataaatctttgaacggataaaaaagggccatcaatacattactcgtctcacaatgcaaacattcatcctgttttctaatttgcatttttatgtttgctatttcttgcgaaattaccattacctgctgatggtttgtgaattgttacatctattgtgttatttgtttgtgcagaaacccatagttcctgctgaattgtatagaggagtacgtgattcacagctgataggactttcaggttactcgagagaggtgctcattccttgtaaaaccttatactgtgataaaatctatttcgtaaataaaacaagggttgacaatttcaaaacttcaacatgttttgcacgcgttgaacgcttgcagttgcactgaatcattgttattgtacatctattcataagattattttggtgaacattttgtaatgcctttgtcttaccttttatccttttcagggcttgccagtctttgctattggtgtgggcctcagtacatttgatagagcgtctgtaagtattttggcacttttcttttatccgggggccctttagcttttctattatgttgttagcataatcatggaaatttatttttccttgcaggtccactactatgtgcagtcacacattcaaattaatgaatacagagaccgtgtaatcttggtgggtattagaagtaaaactattttatgttgaatgatttatgagtatctgtattgactattatttcttgctgtagcctggtgcttcgaaaaagtacggaaagcctatcaccacctgtgtgaaggttttagatatgaccggactgaagctttcagcactaagtcaaattaaggtattgcactattacatcaactatcataattaaatttttatttgtgcatgatagttttagctaaatgatatattcaatgtactatctatgataaacaacttacgcatactgtttcatttttatgtaaactgtctatgttttatgtttggattaaatttataaaataagtggaaaaagaaaatgttccaattagttgagagataaacatcaagtgaattttattggaaaggaagttgtgacttttgttttgtataatttcgaaattcttgtgtgggattcgagtaatgatttatcctaaaatttgggaatctatacctatgaactaattagtatcccaacctgtaatgtgaaaggaagtctctgtggattttttgtactaattttgtaatattctcacacagttattgacaatcatatcaaccattgatgacttgaattatccagagaagacaaacacctactacattgtaaatgttccatatatattttcagcctgttggaaggtaagcctttacattaatatgattattgtgacttaaccttcggtcaaaccctttgcttctcccacgccttctcttctctttttgtggacttttttttaaacgcatttgtgagatgagctgtttctcgctactcttttcccctagtataataacgattcgttatacgttatttgttacattgcaagtgttaccttaactctttgcacttttcaggttgtcaagcctcttttgcaggaaaggacaaggaaaaaagtacaggtgttatcaggcagtgggagagatgagctgttaaaggtatggtattattactattactgtttctggttgttattatttagttctctttgtagttccttaagtcccttgggaatcaagtgttctattcccccagacatgagtaacatgctcaaatcaaacaaggaaaacatggaaacaattgttgaggattggaactgattactgactatctattgttggctgtgtttgctatagattatggattatgcatccctaccacatttctgtagaaaagaaggttcgggatcatctcgacattcagatgatggggctgaaaattgtttttcctttgatcatccctttcaccaacaactctacaactacattaagcagcaatctgtgaacaacgaacctactgaaccaattaaacagggttcttttcatgtggatctacctgagccagctccagaaggaacagagattgtaaaaacattagaatccgagtttaacaagatcggaaagaaaaattgtgcaaatggtctatctgattctctcaatggactaagaataaatggtgcttgaaatgatggagctgaatgcgtgtgtagcctaccatggaggtgtttcttctaccctattactatctcaacctgagaggactgtgaaagaagtttggtcttcgtagcccggttagttgcagctatacaatataaatcgtgtgtaatagtaatgtctcacattatctacgagagtttaagcagggaaaagaaattattagtgtaatctacgtaacttgacatgttagctggataaatagttcatagttatgcttaacatgatcaagtggagcggcagctgcagagaacaccatcttttgcttccacagtttttagttaaatagtaattgcacatattatatatatatttcccattaaatttcatgcattgatattttagctagtacacttgtccagccttcaacaaatcatgtgaaagcaaaaaaatctttctagcttgtcaattatctcaaatttcttaataaaacaatgatgagcaaagctctaaatgagtcttaccaaaggggttgtctggttttcttgattcagtttatatggcgtgtttgccatgcagtccatgcaatgatcaatttcacccctatcttttaaatctttataagctgagatgagaccaaacgataacaaagtctctgttgtatgagcttcttagctgccattcctttgttcttgctgttgacgccatttatgaagttcaccttcaaccacagtttttgctgaatctgccatctctgctttcctcaaagccatatcagttgcaatcttgatttcctcaattgctttcaaattagcttctacctttctttcagcttccatttttctctgcttgatttctcccacctgggcctcgttctctgcctcttttgcatcggccatgttttggaactcctgaacttttttagtaaaagactgaaacttctctaaggacagttttatcttagcattgctttctgcattaacaaccttaaccgcatcaagtaccttttgctctgcttctttcactttctcagcttcaatcaaagtcagctctagcgttttctccgcttcctgtgccactccttgaaacttgtctgcctcttgcttcatcttgttggctttattcttcatttcttcttcttcttgccttgcactattagtttcttctaatagattttttagtttgaagctgagttcatcagagagttctatttccttttgttttttgttcagtatttcaacatcataattggcaaatagagattctgtctccatttcctttttcacattctccaactctagctttagcgagttcactaagcttttaagagagctctcttcttcagaagctttttgtagtgttgttgttgcttcgttgagctccatagttacaattctaacattatccatttcgacaacatgagactttctcatctcctcttgcaagacttcaatctcagcatttgtttcatcaagctttacctcgagatctctggcctcttgattctgtacaatattagcttctttctttaaggactccaatttttcctttgcttcttctttagctattatataagactgtaaactagcctctcgttcttggatgagctttgattgctcttcttgagcttgtataaaagcgagcttgaattgaccagctgatgctcgcatctcagcgatttgccttgaaaactctacagccttctcagaattcaccttggctaaacgctgagcttctcctgcctgttgaaatgcagctagtttagcttccaaagctgcatcaaaatcttggcggatcatgttcagttcttgcttagttgcatcaagttcaataacagtagatgcgtattcctttctgatttggtctagttccgttttccaagcttcggttccaatcagtttctttgatttttcgacctcaagcttcttggctcgttccttaacaacttctgcggctgcatttgctgtttgcttggaatccttcactgcattgagctttgtggtcaactcatataatgtcttcttagtccctttcaagctctgaaattgctcgagattttgtggtttcgaccttttcaagaatttcctttatcttgttaagttctctctgagctaagacaagttctgtttccttgtgcagaacattctgttgtgttattgaataaaaatgtcagcatattattttgacattgtttttttttttcttcccaaaaggagaaattaatccaagttgttgcaaataaaatacatacctctgaagaagctcttctcttgatgacaggtcttccttttggggaagctactacgccaaacaaattaacagcagcttttactgattgaaatggagcccttgtgtcaatctctcccacctccgttcttggagaacttgagaccttttcactaaattttatgcgaagattagacattgttgttgttattcttcttcttcaatgtttagaatgtcaccacctatatttgagatatgaaaagcaacatacacatcattattcaaaatggggatatgatcacatcttcaaacgaagctgtttacgtatattgcctcaagtttgattcaacatttctagatttatatggattcaaaatcacgttgataagattaacatgtatctcatatctaataatcacacgcaaatacacataagagaatggttttaatagcataattagttgaacaatttattccatcataaatacaaatcaattgatcaatgaatacaatcattccattcccatcattaataaataaatattcaaatggaagatgagatcttaagaaaaacacacgagtgcacgtacctttgataaatgggtcaaaattaatgcacgcaacgagtaccaactgccacaaccaaagaaatcaatgattaaaacagaattagctagggctagaattagacctctgtgtttgatttcgagttaatttgaaaacaaaagctagaaaataaaatgcctaaaagaactttgccattgtggaacaacaaatgccttggttattttagggtgaatcacaccgaagatttgcgatggttaattgacgattccaaccgtttcagttaaacatagaatgacataactgccctttttaacttccaatttggttgactgattttttgttttctgttttggaatagtattgactgaattagctattgtatattatttacaatcttactgtattccccaaaacaaattgttccttttttatcacaattaaatttatgtgatctgttttgtcaattttttttagtattatcaatacataaagatctgctattaaatctattattcttagttgtcattataaatatatttaacgtgattatatatttaaaatatttttgggactacaatatcacatctctttgagtagtgtttggcagtctttaaatattttagtttgagtgatagtaatcacattaaatgaggggtatagtagtaaataagaaaacaattgaagaatagacctttcttgtcctcatccttgctgccattaaaataagtaaccaacaaacaccacccatatcatatgttctccaatcaatgaagaggccatttttttcattcttaaaagatcttcctaatttcatatgtcaaattagtatttcaaataaaagaaaggtattaaaagggatatatatatttatatatatatatataaataaaaatatcaaatggatatggattaaggcacaaatatttaagtttaacttttgttttgtaggtacctgacctaatatcaaatatgttttatatatatgttgatacatgtgaaaatatcaacacaaatacttacataaagaccacagaaatagatccacatatcctactaattaataccatccttttcattctagtgatatagtccacatccctgtatacacatagtcaaatttataatgtcactacaacatattactatattagcggcggaccactaacgccctccaaatcggttgtaatagggtattagcggcggaagttccccgctaataaatagccgctaatactattattagcggcggacttggtttttaccgctaatgcagtcggtaagtttcgtgtttcgaaacagcagagagcattagcggcggggtaccgccgctaatgccaattaaaaataaaaaaaataattttataaataatgttatataaatatataaataattattaattataaatatataataaattaaattacaattagtataatttaaatccaataaaatttattaataatttaaaattatctcaaaataaattactttaacgttaattctattacaatattatctcaaaattaaactaaattattaaaaaacacaagcaaattattccataacatcttcattaaggtctcgaattataacgtcttgatccggattattatcgttacgagttcccgaagcccgtggcaaagaaggaacatatgcttgatctgatgataaacctagtgttagattctccagttcagcttggtaaaaaataggagttgaaaaaaattgttgctcctgtgacgaactcccaaataatccaaaatcagcaaaatttgagccgagcataggaaactctgatggtgttctatataagaactgatttcccaatagtggacgagactgttgttgctgttgaggaaaagattgatgttgctgctccgaaattttttgaaattgttgttgcgaagaagactgaaattgtgattgtgaaggaggttgttgttgatgttgtggaggagcggcagaactctgagaagacgaaccaccagacgactgcgattgactatatgtttgaataaagttctcaaatcgtgggttatataaatgagcacgttgttcaggcgtcaaattaccccccatgtggcacacatagttgagaagttttctgccacagtgttcatcatttcagcagatggcggaggaggcaccgttgactgactttgagtaaatgacttctttcctttgcctttgagtcttttacccacgcctctttgatagtcagatctttcgcctagaactatttcca

SEQ ID NO: 379813 - DNA, 1869 bp, Cannabis indica
ttctttggcatgctaatgcaccagaagagactaccctttggaattatatatatgacaaattgtaataaactctgattggtaatggccatagataaataagcttaacgttgtatttattttctcccgacattttatgtcacagttttaatatttgcaggatggtacacattacatgatatataccccatctgatccacttctatttgttgccgttaaggtaacttttttttttttcctgccaatatccaactctcatggcatgtgaactctctgtatattctgatggagatttgattgttggtagcggaaccttattaagttgaatcttgttttctgcaggacaataatggacttttgcaaattgctgatgatgtaagtaatttcactcagatgttttacagtagccattctgttaacatcttattatatattctaatcattgtttagttcgtttaaaggtcaaattctttggctttattaaaaaaatccctggccttgcctcagtcaatgactttcttaatttgaaacaaattgtgatgatttagatgttggtgttgttgtatgttgatgagtgattttatacttgaagaattaagtaacaaaaggtttttattttgggtgtattattggagcattgctattgggtactagtagtgcccaacaccttttatagctggcgccccatgattggctagcgatattctcgaaaaactattttcttaagttatatgggactcgatacttaattacaccaatagctttataacaccgagaagagtgctaggcaccactggtgccttttagcaattctcatattattgagtattttttgctgcatgaaataagtaatatggagtcacatgcacatacctagctagagattgtgaagaaattataagaacatgtaagagttagtgttaggctgctggctttcaataccattggttatttagaccaaacttccaacagatctatctcatgtggtcaatattactgttttttgaggtcatcattatagcaccgaaaatgatcatttttcagcgccatgggcaatggctaatgaagctatgatggtcaaacatctcttcttgggttatcccctgagagctagagaggaagtaaataggtttaatgtctaatacctaggtaatggctgctttcaaaatagaagactgagtgatgaatgactttcagaaatatcatgtttagtagtttagtatagaataaatatgcatgttttggccatcttttttatttgttcttggaaataggatctactggatgaccctgccataataagcgccatagatgaggagactgaattcaatgctttggtggtatgtcgctattatctctattctcagtggacttctatgttaaaagtgacagtcttgccaaattgagtttgtctttgtcattattgtaggaagaggaagctgctctacttgattctttgttagggaaagaataatagtgtaaagtaagaagagctgcccaggggtgtctggactggccatttatatggctgtaaatgtggggaagaacttgaaatcttgcaccattagatgccgttagcagcatgttttatttggtgtatatggtaaattttgtttccatgtttaatacgcgaggacttcactctactgagtgtactcaatatcagttttaggcatttttattagtattagtgtaatagtaacgatgtttgaatttgaaatagtgggccaatgatatgtttttattagagatttttatttcataaaatacccaaaaataacaaaaaaagttaagaggctggttggctttacagtttaaaaactgttttcagttttttaaaactaaaaacagtttttaaaaactattaggagt

SEQ ID NO: 379814 - DNA, 829 bp, Cannabis indica
attatttattatttattattttgtaaatatatttatgatctatttgatttagatcatatgtgttttatgaatttatcttagcaatactatatagaattgagttatagttactatagaactcgattcttatagatttgtttgtgttgttgtagattaggtggaaagtgaaatcaattatggttatcacttttagatgccaacattttagaaaaataataaaatttatggattgttttatttaattactgtttttttaattaattacattttgtatataaaattaactaaatatgcttatcgtgttcttctaattaataaaaaatattacactaactacaaaatcataatcacataataagaatttggtaattagataaatgggttttataaaaaataaaagatatttctacagaaagtatttatatttttacgaacagcaatttaatataaatctgcaaaaatattaaaaatattttgattcatattatataatttcttatgggtaattaaaaaaaaattccttaatagaaacaagagcttatcttttcaaaatggaatattgaaatcttaatgggccgagttttgggtttagtcgtccaactctattgtcgtcgtttaattaaattattgtcgtttatatccaatattgtcgtttttcacggctgctgtcattcattgtcgtttgttattatttgtgtcgtttactgtagttctcatgagtcatgattgtcgttcatgtttgtatgatggtcctttattgtcgtttttcactatttatgtcgtttattgtcgttttcttattatttttttgttctgagggaacgttatt

SEQ ID NO: 379815 - DNA, 8048 bp, Cannabis indica
gaaatattactaatattaaatataaaatattctaataattaaattcatcttacatataataattttatttttatatatctagcaatgtgatactaactctaataattttaaaaaatagcaaaattatcgtcgtggtcactgctcactaaagagtccttatgcacaagaaaaaaaaaactcttactataaaaagatattaattttcttatattgaattttatatattttaatttaataaataatatatataacatttaattatagcgaggttatattaattatggccaagatatttgaattgtattcagaatttaatcatgatcaaattattcagattctattcaaaatttaataatagctaatataccataaaattttaataatattcccttcttccttctattttagaggggtggagttttgggttttcttctaaaagaaatcttttaaaatgtcaattattataaataatatgttagatgttttaaagctacgaaatgttagctaaatggtgaaggagatctgggaaaaaaagagaaatcatggatttaaactcataatttttaagctattaagttattaattgattgtaaatattttaccctaccctaaaaaaaaaagagttgtataatcgaaataagtgacttaaacttattaagaaaaaaatgccaatcagctttctctctctcaaaaaaaaaaaaaaaaggtttgctgatcctatttggcatcaactgattggacatgtgaagacttataatgccatgagtccaataataacttttaaaaattgtaaaaattcaatccatcaagttgtagtagctagggttccaaattaactataaatcttcacgaaaaattaattatatgagcatatatgctctaaataattttctcaaatttcaattcatgaggtcatatatatgccatacaataatgacgattattatttatttacttaatctgcatttaaattttatacaaggtagtgaggcagtaaattaggatatttaaaagtcatatatattcatatctgtatataaatatatttatatatctgtgtgtgttacactaattattaaataataaaagctcaacgcggataacataaaataatgtaaagagagagtgggtagacagcacaacactttgttcaactttatatttatataaatatatataccagaaaggccatatattggacccatgcataatataattatatttatatattcttttgaaaggtaaatgtgtacatatatataagaattgaatagatgaactctaatctagttcatgttatggaaaaaacttgttctttacgttgcaatctcgacagaagagaaaaagaattcaggttaagtgtatataaggtttaaaatgcaaggctcaataaatatatatactcaaaagatgagaaaggtgatacgtatatataaggtggtttggatttaaagtgtttgcacatgaagaatacttttgtatatatgggcacaaccacagcatttaggcttgatttttaaggctgctatatatatatatatatataaaattaaatatatatatatataggtgatcgatcaacatatatatagaaaccaaaaataaaaagaaaagaaagatttcagatgtggaaagagtgtgggcacgtgcattttacgtaaagattaaagaagaaaacatatggatcacgtgatccaaggccatttaatttattaactaaaagctggcgaatcttcaggtctaagcagattgtggtatcatgcacattacattgggatcgatccaaattctcaacaagacattcttattagtttcaacagttttatcctatccatttatacaactttcttccttttattaacacatataaaaactagtaatttatatatatgaatatataattaaaggagtactcattatgatgagtacttccacatgagtctcataacaaacaaaccaatgatagaagcaaacttcctatacgagacatgtgtatacaaaataacaaaacaaaattcatcacaattattgatattattttttttataataataatactaatgcactacttaaaaaaaataaatgaaactgttacttgtactcaaccttattttgtgggaatcctgtatgcacaaccaattaaattttttaatttgagctacatttatcaaattattagagagccagaagccagttgtactgctcattattttcgtcaccaataatttggttatatgtagtataaaatacatatcatcatgttcatgtgggtatatatatatatacgcatgatcctacttctttaattaattcatattgcaacatttatatatatatgaaaagagagagagaattctagagaagatcaagcatggaaagctgattctcaaatgtaccttggtgatcacagtgttaatattatcattatcaatcatctcccaaatagtacgtacgttgctccacaatataaatatatataatacaattttttggagattttcatttcttactttttttttcaactgatcctttctattttctattaccttatttaattatatatataataaaatacagtttttggagatttcatgcttttaactactaccaaaccttgtaaggactaaggaacgtttgtgtacgaactactaagcaacagaaacatatatataatatggacaaatgctaaagtcacccaatgatgcctactatccttgtaatatgtaatatgattattaagtgtaatttaatattgagtctctcacatattttatttaaataaagattatagagaacccttaattaattaattaaatattataggacgtcacctcgtaatagtattagatattttggtatcccataacaatgctctataatatatgagtaaatgagaaatgctaaaggacatgaataatacctaacactgatgtataatatgatgtttttcaattgaagctagctagccagaaatgtaagattattattaaattatgagagcaattaataaattcatcatgaaatttaattaacttacatatttacacataattatataacattaattaattttatgtatccttttatatatactgaatgacatttgaagagaaaattgatgattttctttcctacaaggggttgtttggctttgtttttagtttttagtttttaaaattatatttttaaaagtgagaatagaaaatatttttgtcattttaaaaatttaatggtgtttggctcatgttttttaaaactatttttagatatttttcttactgaaaaaatattatacatcataccacgacatgaatccatcccaccttggcccctggaccctggacctcggagtcggactcaaaccccagactcgacccggacctagacctcggactcgacttggagtctagggtctgagtccgagttggggtcagggtctgaggttcgggttcggggtcgaggtttggggtttgggtccgaggtcaagtctgggttcgcatttgggttcgagttccgtggtttgggtcagggttcaggttcgggtccaggtcggggtaggggtcgaggtccgggtcagggtcggggatcgagtctgagtccgggtcatggtctgatcagggtttgggttcaagtttgggttcgggtctggatcctagatccgaatctgagtcggggtccacatctaaggtctgggtccagggtctaagtccggggtttgggtctgagtccggatctgggtatgtgagcaaaaatataaaaaacaatatattagataaaaaaatagaaattgtttttgaaaatagaaaataatatttttatgttttctgttttctaattatttaaaactcagttttcaaaaaactatttttcaaatatttggccaaacacccctactagtttttaaaaggaagttttctgcttttaaaaattgaaaatagtttttaagttatgaagtcaaacaatccctaactttttctattctctagacatatgtatagtgtagtggtaaagctaggtaatttgtcgagtatgacacaacaccaaaatagagttttgacattagttagcattattgattgacacaatttaactaagatttgatgtgcgtgcgtcactaaatcaacgatcaatagcatcaattaataatatgacgcaagacaaacgtatcactagacaaatggtgctattgattgatgctcatggctaaaaaagaaacccacatttaaaaagtccatcaatcattaaccctaaatgctcctttcaatctccctctttccattccaaaatttaggtctataccaaagataaaagttctcgataaaagttaaaatgtcatcctaaaaagttctcattagagtctcttcattagaaataagtttctaccgaggaccaaaattacgttgtcagtaaaagctataccgaggaacgtagaaatgttctcagtggtaaccttgcaacccatttgactgatttataccgagaatatagttctcgttataaccttttattgagaacagttgctgttttatttttaatttttaataattcattttcatactaaatacattaaaatacatttattttttatattaatatttctcaaataatgataaaaatataatttattaataataataacatacatttgtattttttacatttttaagtttataagtttagttccctaagtactaaatatacaaataaaagaattcacgaaacaattagacactaaatataaacataactatcgacttggtctttattcatcaggatgatcagatttttaaggtgtattctacgatccctgagtgacagaatttttcatatcgctagttcctccaactgtctaatatgtccctgcatataagttatggcatcagctccaacatatacaccaacctaagatgcatgagattcggtaaacgtaggtggcgcttccatctctcttgtgctaattaggcacccataccctttttggtgtccatgatgtcttccaaaaatagtttggacaactgataaatcttcatcttctagattgatcacattgtcgggcttttcagtattttgggtagaccatatttattgtgtctcatgtatgacagtcaatttctcctattacacaataaatgaattaattatatataaaatttatttataaaaagaatataaagaagataatatttatttaaaataaacatatgtttcttttgcagtgtcagtcactcgtcccttgtcctgtttatggtgagtgatttgctaagcatctaggatgagtgccaatcgcttaggctctagatcgcattgcaacatagaagtttttttattcagagtataataacaacaataaaataaatatgataattatattataaattaacctaatatactcttttataacacaaatcatgtatagattgagatcatatatggctctactttttcaatttttttcctatttaatgtgttgatctttgaatgtttctaccaaaaataaatatggagatattaatatggaaaattaaaatagtttagtaaaaaattcaattggcattgaataaaattaaagtaacttcacttcaggttgttcaaaaaatacaatgaccttgaccactagtttatagtgcctccaatatattgagttctggaactattcttttccaagtgatctttcaattcatgcttgaatttgcaatattttttgacaaaagatttatcaatggatgttaaaatatagcaaagggtgatctaatccatatctttcgcgatcaatatcgaagatattgtcatataaaataaattttattagtgaatataatatacaattagcgagaagcaatataattgtaaaaataatttacctctactcttgacaatatccaatcttcatgaagttaggtacttgtgcacaatttttgtagtttggggctgtgtgttgtcatacgagaaaccctaattccctcaaaaaatcataactataagaacttacctcgttgtatgtttttcctatatttttcttgtgtcggatgtccaagttgttcttgcttgttttgtgtgcttcatcccttatgacatccgcgtttctttaaaggagttgttgtagtatgttcacgtaaatgttaataatataagttaaacgcattcagccccaatatttgtcggtccaagaggaggatcacatctttcataactcccgtgagaacatgcaacatctggtatatctatgatatacaagtattaggaatattataataatattaatgtcacaatgtattaaagtacaaattaacaatatatatatatttaataaattaccacttattcatcactaacgtaatcatcatcattataagtttttttctaaattatcatttttaaggttgtgctcattttcatttttatctttatcagcttcatcgtcatcttcatgttctatttcttctatgtattcctccactacttcatatctgtcttcctcttccatttcatccatgcagccctcctcagttggattattatcttaaatatccacaaatttcgttggacccttatacgttgaaagttaatttttggtaatgaaccaagatcaacaaacaattgaaaatcagatgaatttgtgtcatgcataacatgtactaaaatatcttctaaatattttccaatttgcagaatatcccacacatttagatgatgaactgcttagacgactttctagtcaaatttattttttagataatcattgtagaaaacttatatagcttgagtctctagaatgaatttatcatctttgaatccttcaaaactaatgttgatactaatgatgttttgttcagacttcaatctctttgagggctgattagtgtcaatctattaacaattaaataatacaataaaacatctactaagatatgacataacaacaacttcttttaattggccataataaggtccaaatcagggatacacaaacctaaaacttttcttgtttttagaatccctttatctttcaaagaggctcttcaacaagaaaagtggttcaaagcaatgaaaacaaaaatgattgctcttataaagaacaaaacctggcttttagttccacttccagatgaaagacaaccaataggatgcaagtgggtaaataggataaagggaaatcctaatggcagtgttaacactctcaaagcaaggcttgtggctaaggagttccatcaacaacctggttttgatttgacagaggctttcactcctgtaatcaaaccagtaactatcagagttgtgctaactctagccttgtcaaggaattagataataaggaaacttgatgtcaataatgccttcctcaatggagacttgaatgagaaagtctacatgatttaacctctaggttttgaagaccccaccgccaaacatcttgtatgcaagctcaacaaagctctttatggtctcaaataagcacctagagcttggtttgacaagctacaacaatgcttactctcatttggattcactacctcaaaagcagacactaccttattcattcaacactctgcccaaggcatcatccttattcttgtctatgttgatgacattctcataataggcagtaatccacatcacatagactcactggtcactgcactcaattaaaaattttccttaaaggaccttggtatactcaactatttccttggcataaaagtcaattacaccacagaaggcatgtatctctctcaaagaaagtatgctgaagatcttcttgccagaaccaaaatgcaaggtgctaaacactcaaacactcccatgaccagtggcctgcaattgttaacatatggtagtgatcctgttgaggacattcaactatacagatttgttgttggagctctctagtacttaacaattaccaaactagaatccttttgtgtgaacaaggtctgccagttcatgcaaaatcccctacaagctcattggataactgtgaagagaatcttaagatacctcagtggcactcttcactttggcttgcatctaaaaccccccaccacatttga

SEQ ID NO: 379816 - DNA, 2182 bp, Cannabis indica
atcagtctcttactgtcaaaaaaatgaacaagtctagtcaagaacaatctcgtattgaatctccacgagtaaaataaattttattagtttttatgttcttaccactttgaagctttacgccaccccataaagaagtaaaacatggctgatatggggtttgttcagctgacaaaagcttattcctgggatactacatgaaaaaataaagagaagcaatcaaacacaaaacgcctacaaactgtagatagtttagttgggtttatttatttatttatgtattgtattatttattaacgatgtcattacttttagaaagtgggtttgaaaaaataggtcgtgggggagtgaggcacgtgaggcagttggtcctttgtttggaatgaaactaccactacgcactgtaggttgctctctcttaaaaactctagctagaaatttcttactcaggaataatgagaaggaaattgtaaatcttttattgaatgatatatttataggttatgaaaatgatgactcttaattatattctaattaggaaatcaacaaattaaaaatttaaactaatatatatatttttgaaacataatgggaaatattgggcgcaaagaaagaacaaagataatgagaaatctagttctagcctaatgcagaaagatgtttaaatttatttatctgatatatttatgataatatctaaaagattttacgaaataaaattatttctaactgattttaactaatttatttataatagtcatagttcgattacatgaaattataaataaaatattacaaaatattttaaaagattttatgttttttttattaacaattaaaaggttgggatatttgtgccatttgctcgtgtattttgtcccacattagtaatttgtgatagatgtcgagtcttaattccctaataagattttagtaattgaaacaatattatggtgccgtttgctaacacttttttaatcagttttctgtttttaaaattagaaaagtgaaaatatttttcaaaaacatgttctataaaactgtttttacttttcaattttttaattgaaaatcaaaattttaaaaataaaaaagtcacttttattatttttttaaataatttttttaatcaatgttttagacttcgactcagacccaaactcggccctagccttagtgccgaacctagcacccgatccagacccgaccccaaccccggacccagacccgacttaaatagaatcaaaaaataaaataaaaataaactttacagaatatacttttgtattctgtttttaaaattaaaaaataaaagtggttatagaacgcatttttgtttttcaaaaataaaattttaaaaacaaaattctacttcatttttgtgattaaaaaattagaaaacataattgttaccaaacggcacctatatgaatttaattaaaatctatccaaaaaaattaatatgcgccataaatatcttatatttttagttttataatatatatttttttaatagattaaatattatatattacgtttttgttgcaactcttactacaaatttcgtcaagtgttaacttagattagtaaaatgtcacgagtcaatatattagtggtccaactcattttatttttagaaaattactaaataattttaaaataaataacaataaaaattgaaatatgaagaaaaaaattaatagaaatatgttttgattaatttatttaatttacaattaataatttttttttctcaattttaaaattttttaataaaatttttattgaaagtgaacaataatcaacatatgcctgttggtttagtcatattgaataagccttaatgaaactgaaattaaaaactacaataaaaaggtaacatataatttttaattcgtcgaaaaaaaatacatgtgatatataaatgtatgaaattgaaaaaatgaaatatttaaggagcaaatatatatcccaaaaaatttgattttaatttaatatctttatcgaaattttaggttaattatagagaaaattatagaccactgtttttatttttccttgaaagtatctttatatataaaatgtagatatttaacagtttttgttagtttaacggaatattttaagaatataagagcattccgttaaatttaacagtgttagtagggttagttttataaatata

SEQ ID NO: 379817 - DNA, 3237 bp, Cannabis indica
tttttgaactaaagggtctgtccaaaagctacagcaagtctctgtagatctttattagtgtacattatttctgatgaagccgcttgtagctgatgatgatcgttctgatgatgccacgtggggtttgatcctgtagcagtagtagtattactaaagtgtgattctggtttcacaatgttactgtacaaaatgggttgaagatgtgaagaagaagaagaattttgattattagtattactaattcctccaccaagaagaaaagggctatggagatattcagaccattttatgtcttctgggtcatcagattttatgctaccaacagtactttcattgactaatccccacgagaagttattaggagcggcggccgcggcggccgcggcggtggaattagtgttgtgatcaaagaagttgttgttgttgttattattattaccttgtaattcgatattgcagctactactactacttccgttgttgctgaaagtactagtttcccaattttgtactgctccagtagttgttgtagtagtagtagtgctattactgttgttttggtgatcagataataaggggagacttatggagggcttgacacgtggaatattggagggtggtgatgatgatgatgctgttgttgttgatgaaggtgatacttgttgttgtagtggctggatgagattactaatcatctgattatgatgatggtgttgtggaggtctagttgaattttgattaatgttgaagcagaaactggccatgttgttgttgttgttttgatcttgatgatgagaaacagcagcagcagctgcagcagcggacgacgtcgtattgtaattgtttgagtggaaagagaagtaggtagaaaaatcacaaggtgatgatgatgatattgatggtgatgatctggtatctgttgatttttctatgaagaattcttgtgtcggcggagttgaggatgagacttccaatagtgggtaacgattgatggccgccattgattgttgtgactgtcagctagattcagatgatgatgatgatgatgatgatgatcattggataagtttcctaatgaagaagctctaacagtagaattattaatattctcattgttgttgttattggttgcagctttgttacccttgttctccaatttattaccaatgtcattttctacctcagataatggcttatgagtatttgggtcaatccctttttgcctcagtttcttcttaatgcaagaattccataagtttttaatctcattatctgttcttcctggtaactgagctgcaatctgtgaccatctgaaaaatttgcacaaaattatttacataagtacccagaaatgaatttcaactcaaaattaatgtcattcttcttttttctcaagaaacaagtaattaattacctgttgccaagaactgcatgaagttctattatcaaattctcctcttgttgtgaaaatgggcctcttttcaaatcaggcctcaaataatttatccaccttagcctgcaactttttccacatctctgaagacctgtcataaaaaattaatgatgaataaatatgtaactaattttgatgcaaacatacagaaattattagcattgatagtagtaatagtagaattaataccagctagcttagggacagagctccagcagccatgtccatgcttggttatataattaagaagtttctcatcttcttctggtgaccacaacccttttctcagtttctgcttgtaacaacaagagtgcctccccatgtggactaccaacccacctgaaatgctggcactttacttttgtttttttttctttatttttattttaaaaaaatagaaataaagtgtgggcgaaaactttgtacagagagacttaaatgagaattgtcagcaatgagagaggagagaaaaactaaagaagagagaaagagataggatttaagtttaattagtttccctttctttcctaggcgatgtgggattttgatttgaatttgtggagagaaagagatagcaaaagagagagagaagaaaacagagatagatagagaggttaagaaaatgaaattggcagcctggtagggaatcaaattaatagggggggagagcctcaaaggaaagacgtcacatccccaagagaagggtgacctttgtttttttgaattataagtataaaaaatagagaattgttattgggcaccagtagtgttgatataagtggtgctttacgattagttaatgatattacttaaaaggtattttttttaagttatatgaaacacaatacttatttatacaaataacaatataaccccaaaagaagacatcacatccccaataaaaagggtgacctttgtttttttgaattataagtataaagaatagagcattgttattgggcactagtagtactgagtattttttataactggcgcttcacgattagttaatgatattgcttgaaatatatattttttttttatgttatatgaaacacaatacttaattatacaaataacaatatatgataccgaagacatcacatctccaagagaagggtgacttgtttttttgaattataattataaaaaatagagtattgttattgggctccagtagtgctcaatattttttataggtgacgtttcacgattggttagcgatattgcttaaaatgtatttttttaaattatatgagacagaatatttaattacacaaataacaatacttaacaattttcatataaataaataataatatttcattttggagagttggcttaggcttatttggctttggctttggctttggcttcggcttgggattgtgtttgttgggtttggcttggctttgatttcaatggatgatttttcaagtcagcgtgaggacccactaatggggcacaatcttcatcattagtgaacggtcctgatgcaacctcatgcgtctctctactctactatctcttccccacccctctaagtaagattagacaagaattatggtgtgtataatttttgagttttctttttaattatttgactatgcataggtgtctcttcaaggttcgaggaatttcatcaaacacctcggaagcaatgctgatgatacaaaatatagaatttaatgttatcatcagctttttcttctttctttctttttcttgaccttaagcttttttattacaaagatattttgagttgatagtgaaattcatgcatc

SEQ ID NO: 379818 - DNA, 3586 bp, Cannabis indica
aataatatctctaacaatttctatttgaaatatatgtgtttacaaaaagtagcaccaatatccactacaagatcggccgagttgaattgaatcttaagaaatatatattttcggggcttttattataaggatagatggtatgtttaaaaattattgaaacaatttgtataattttaaaggaattttttcttttcatttggcccttgaattaggtgagctctaggcgcgagccttaacctagggctaacactatcagggtcgaccgtcaattttagtgagcctaaagaaaaaaaataggaccttatttaaaaaacatgtggtattttcaaaagaggaatttacactccatgtaggattttaaaagttgtttacttaaatatgacacttttaagtttgaccaatttatgtggtattttttatttttaagtatttttatggtatttgatatgtcatatatatatatatataaattaggttttcaaagcccacatttaatagttttatttatttttaggcaattttatagggtaatttttagtaatttttcgatcacattagttttactataatgagtttccttcattttttttattgtgttttgtttttttttattataaattatacttttatataatcgaaaccagtttcctaataaagaaactaaggaaacgtttggttgggaggaatgaaaatataggaataggaatgggaatgggaataggaataggaatggaataaaatttaaaatgcataaaaaaaattgataaaaaaataattaatctttttttcttgttacattggaatggtcattcatttctttttaaaattgaatagctattccacgaaaatggtggaaagaatattccattggaatgtcattccaataccttaaaatgcaaccaaacaaaggaatggaatgaaaattgttttctttccattttattccatttcattacctccaaccaaaggccacctaatttcttaatgaaaaaccagtttcttgatgaagaaactaatttcttgataaaaaattagtttcttaatgaaagatctttggtgattgattttgatcgcagaaactaaatttgaatcgcatgagaaagaaaaaaaatcttgtgtggttggagagagcgtgagccttttttgaaaatttaatcttttttttaaaatgttttttataacattttctatttaaatagctatatatttagttaatttgattataaaatgctatatttaagggcattaactttacatgtcatatagatcaaaatttttatttattttcttatatttttataaatattcctttttaaaattaataaaaaaaattatatatatattttgaaagagaaaatatttttttagactcttcgattaagtcgatcttaagcgcggacctaacttaactaatattctataatttaaacataaatcttattcaaagtcgaatcatgtaaaattgcgttcttttattcttatttactttttcaatccctttttcatatagaattattacatctttataattcttatactaaaagtaaagattatcacttaatgcattttataaaagttatgatacattaacctaaatattttatttaattatatgagattattttcaacaacacttatgtcacccctatatactcatactatatacgtttgaatttttgagtctagtgggtattattattttgttaatttccattgctaaatttgaaataattactattgacttatcattttgattttattcataaatgtcaaaagagtcacttacatagaaggatccgtttacattggatggagtaattttcacattacacatataatccttaatcattaattaatttatttaattagtacttatgttatgttttcatatattttgcactcttcttacgcaattaattcataattattatatattatttgtttaaaataattatagtagtctagaaaatgttactatatatgattgtgatattttttggggtttccttataaaaagtttgattagtgatgtgcatgtactaatttgacaattttcacattatataatcttcaatatcaagatatacaaattctaattatataaatgatattagtggtccaaataatatttaaagaaaagtagttattcaatgatgatgatatcatataaatattgaagagatttttcaattacaatatataatcacaacattgtaaaatatttgttcaaaaaaacaaaacaatattgtaacaatttgacatagacgttttgaataggtttcgtctaaatcaatatgaaatataatttgtgttcgaacaaaaaactcatattaaaaaaaaatactatcatatcttataattgataacattgaaaaataaataataaattaagtaatcacaattcatgatgattttgaattttaaattttgtattgatcaatctcaatttttttttaaaaaattctctaaagattatcttgacaaaattttaattagataataagtgagttaacattacgtaaaaaaatcaagagtatttttccctcgtaaagaaaaataaaaataataagttaaatctgttggaaattttttaatgtaattatcatcaataattataatttttgtaatatatacaacacaaatcttgttaatcataggaccgattataagggtaagcaagccaaccctacacttcgagtcccgaacattgagacccaagtaaaagaaaaacttattttttgaataaagagataattatatatggcactatttttttgtaaaaaaattacatttttacatttaaagaatttgtttcacatttttacggtttctataaaaataacacgaaaacaacataaaagtaacatgaaaataacatcaaaacaacaataaaaaataacatacagataacaaaaattcaacacaaaattaacatgaatacaaaataaaaagaccgtatttttctataaataaaattaaaaaattcgtaaaaatatttaaaattctgtgaaaccgtatctttgtaaattttttgttatttttgtgtatttattaaattatcccataaataaaatattatataattagaatatataacaaatgctatttggtatattggtacgaggttaaaggctcaattctaaatttctacttttaaacaaatatttaatgtatagctatgaaaattgaacttatcttgatgattaaagtagtagaattatttcgataataattaaaatatatacaaggtctcaaaatttaattttatcaccccatataccttatgactagtcctacatctagtagccaaataattacaatataaatatatattttcacaaattatactaatttaaatttaatagatcttcatttatcccctacttcttatttcttagattctctcaaacttaatatattacacagacaaaactatttaaaaaaaaaaatggaatggaccaattgggagttaacttacttaaccccatgtaaataattcatgatgtaatagaaacaaaaataattaaaaaaaaaaaaaaaaacaaaaataaataattaaaaaaaaaaaactaaaattttaacgttg

SEQ ID NO: 379819 - DNA, 2367 bp, Cannabis indica
ggataaaaacaagagctacgagcgatattatgagtgtagttttatttacagaacgtataataaaataaatctcaacagactccaaagaagctaagataagcttacaatatatgaaccaataaatcaggtgacggcatatggccgatagagctatgcaaagcttggacaacaactaaacaatcgttacaagttgtactcccatccaacttttttttatccaacttagagcctctttgatgccgacgatctcagcaataacaacatcaacacaacgaggcttactaattgaaaaagcctcaataagttggccatagcaatcacgggccacaccttcagtcccataccaaccttcagaaacaaaaatagcactatcaacattaactttaatcttatttaaacccgctttagaccaatgctcaagtcccgtgcctgaacctgaaggaaaaaataataaaccatgccttttagatcgagcaatgtttcattgattaagagttgttctagccaaaagtactacttcagaagttgtaggacactttcctcgcctaacgacatcattgtgtgtaatccaaacaaccatgactgcttcctttcgaactgttgcagaagcacgcgctgtagtaaaccagcaaagcagccccaaaaatcatttcccaacaaactttcagtgctgatagtagagcaattccagtaagcttttgcaaaggagcaagaaactagtaaatgaaatatagtttcttctgcttagttacacattagacataccacatcgactggaacatgtttaatatgaagctgtgattttgttgcaagaattcccgacagtgcacgccacataaaatgaagcacttttggagggacaaaaagattccaaagtagcttccacatagccacatcatccacatgaacttgtaaagagtaatctttgtgaaaaaatttgtaagcttattccttcaccaaataagtgccataaatattaaaagaccagtaccaaagatccatggcaacaaaacttatttgcacatttaaaataagctcacgatccctaagaataaaaatatcggctataacctcaacatcccaacttctacttcccacaatcatcaacctatcaactgtacaaccatcaagcccaaccaaatgagaagtaacaaaaggattattcttgtccgggagccaagggtccttcaaaacattaacagaagatctagggtcaatattacatctcgcactagtcttaattaagtgctgagtctcaaagatgccttcccaaataaagcttgggttatttccaagttcagctgtgagaaaagtacctcgaggataatactgagccttgtatacccaacttacatgaaaagaatcattcacttaattattatttcttaccaataatatgtatgtataaaaaataaaaatatataaattatatattattattggatgtgagtttgtgactataggtcgttacacctgaaagtgttaatttcagtttctatccagaaaatcggatcggatctaatctgatccaaaaaaaaaaatcgagcggggcggcagagcggatctgatctgagatccaataagtatctgaatatttcagatgagaagtgatccgtcagatcagagctccgactcgctccaactaaatgaatttttttaacatgcctatctgaaagagagcatccttaacttcttgctcaataataggcagtaataaagaatctatatggaagtagtgatagatggtgcaatcccgttaatcacaagagaagaatcactagatgaactagtaaacaaattattaaaataatcaacaacctacctctgaaagtcatgcatccccattaacccagctatcgtttcccctttgcggctcattaatagtattagaacgtcagtaagtagtcgctttagcgtgacagaattactattttgaccttcttaaagtcacgggttctttgaacgttggcaccaaatatctcctttcgattcagctcctcaaacagattagctttagcctctttaaacttctgaactgatgtagtatctcgaccctttttgaacttcttggcttcattacgccagaatttgatttgctccgtaaagtttccacgatagtatttattcaactcgtataagttagtaccgcaaaactgaatttatcttgaataccagtcatagaaggctccacccaattgtctttaataacttgtaaacacattggctcgcgtagccagaaattttcaaatctaaaccttctctggcctgggataataggaatagaaagaggatcaagcaatataggagaatgattagatgaggtcagtgttgggttttatgccctaaataaaactctgtttcaatgta

SEQ ID NO: 379820 - DNA, 6787 bp, Cannabis indica
agtttaggctctttgtttatggtagttttcgggttgagattctttctgctagttgtttgagattgctgacaacggtgattttgcgttggttggacttggagaattcacacttgctgttagtgcaccacgaaggagaccgcctctgtctgggtgatttctttttttctttttcgttttttttttttttttttttgtaaaggggtagttttcctttggaagccatattttcgaaagaaaaaaactttgcaaaagtaaaattgtttaaaaccccatatgataatataaatgttataatttagcagtatttccctataagagaaacaatcccttcaatacgaattatacactaagacttaactacaggcacatatttgccaaccatgccaatctgataggcctcctagagtcttattcgttataataataatctcactatctatcactcacctgctgagctgaatgtaccctcgaccatttgaatcagctactgcaatatatttatatatatgtatacaatacgaattatacaatgaaatgaaaaagaacacaaaatatccctaaaaaaattacattttaaaaatggtaagataagcactcatgtatatcttctaccaaacttacacacatacaaaatggacacaaggatgctttccatccatccatccatattctaatgtcagctagaagtagccgtatcgttgaatggtaaagatcgctgaatttgaacatgaaccagatatatctgtagttaagccaacttaatccttcaattttccctgtaatgactatttttactatgacatgtacgctgcacaataataacacgagcgatgtgctaaatgtgatcgctcaactactatccagatctcctgacatcattctcaaaagaacaatcatcaccttctaatcaaagttagtcgggatgtctatgtccgtatctgaaggattaggaagctcgtccagaggctcctgcagatcccaaaacctcaacattaaggagctgttttatcattcaaattgctctacgcaatactgaatgcgggtcttgctgtgatgactccactttttcgagtatattgatcagcctatctatctattacttcaggaagagtgtaatcaaagagagaggaagagagaaaacacaaaccagcagcacttttttaataaatcgaagtcgaacttataagagtatttgctatgacagcttatacaacatacatttcttaaacctcactaccaacagcagatatatacctgatcatcatcgttgaccgaagaatgcatgattccaatgggcaaggtatttgcaaaatcttcagtggctccatgtaaatcctgtacacagcaaattaatatttatttaacaaaataaaacccaaaaaaaacactacaataattttctgctagctcaaatttaataattttctaagttacttaatactacagcagtaattcatactctatcgcagagcaccgcaaaatactatgtaagtgatgaatgactaggaaaccaattagagcgtgtgtattgctatcaaaataagataagataaaaatatatgagcttcactcaagaaatcaatgcttcatagggaaaaaaacaaacaccagcaaaaaccagattacataagataggtgaaggtaaaaggaaagttcaaacatacttcctcggcagggttgacagaacggtcattgtaaccttcagtaactatcttagaaggatcttcagcagaagttccctgcatgtgccataaatcacattagaaaaataacaccagcatttcaatgggaggtataaactagctgctatacatgctcatcctggttgcctgaaaattctccttccacaaccaaaggcttgacatcaagtagtgtttcctacaatatgaaatgaaatatataaaataaataatatttatttgaagatgaaatgtgtcacataagatttgcattggtcgaaaactaatacattagtaattactacaaccaaactgattcttgtcactttcttcaattctcaatccaagctgaacaaaataagaaacaaaattaattcactattattacctacatttgattcattgcttttaatagattgcaacttattcagcttctagacaaactcaaagataatatattaaaaagtcatttttatcttctaacccctaaatctttttattttttaaagcaaaacaccgctacccagtaatattaataataatacaagtaacagggtgtacaaagactaaaaaacccacactacaaagaaacctaaaaagtcaacaaaagttcctaattaaacacaaacaggaactatacaaaagcattacaagaaaacctgcctctaaatatctcagagaaaggcacatttctaaactcgttcacattaaacagccaaatagctacccagtatctcactttatctcaaataactactgcactatcttcttcgttcttccccttcaaaaaatcttatatttctttgcaacctctataatagctttttagtttcatttcctgacacaaattgaatatttaattcattgcatcttatatggcatgcaccactggttgttgaaggagttcaagaacctagaccgtatgtaatcattgtaaatgcacaatgtaagaaaatgtgggaagaatcttccccactatttttaagtaaaacacaccatccaaggtaaagtgtaacataaggccgttgaaagagcatcatgaacaattagtgatctaaacaccaggaaactataacaattgctatgtgggtatgcagaagggactcaaacctcagatcttgtgggcaaaccacatgtctgaccaagctacccctcttgagtttattcggttttttcaccaaaaaaaaaaaagaaagaaagaaaaatctggatacaaaccttagactgacatgaaattcagcttttgtgagaagccacatcaacaatctccaatgaaaaacaacagctccaacttattgataacatatatgcaaaaaaataggaaaatattaatgtcatagttatacttacagattctacaagatcagtacaaaggtttctcccccccttactgagatctctcagtgttccctgtataatcaatgaactggtgaaaaaaatgaataatcatttaatgaagtgggctggaaaatatgatcttgtggaaatagcaagaagagtaagcgcatggttgtcagtcttaaaaatacacaaaccttatttgcccacattagaccacacgcattacataacgttctaggaccagctggtccacgacgcattgcaggtgtattatgctcactaacaccacagtgttgacatctccgcaaactgaaaagtattgcagcaaaataagggaaacccaaaatcaaagatttgacatcaagaaaaactcaataagatgataaatcaaatagaactctattgaactcagaactcacacagtttctggacgaatagtgccatcttgagggccagtttgtgacgagtcccagccagaagttccagaattttcttttaaagatgcaaattgcccattcttccggtgcatcctgggaggaccaataataaaataatgagatctcttataacagattaccaaggagtcagtgaataatttatttggattttggcattgcaacttctatatctagaacatttcaactaaatcataaccaacaaatcacgagaaatttcacttccattggatctaaagaagtttggagagagggagagggaggaagaagaaattatcaaagaatatcaatgtctagaaacagataaagcatcccaattatacaaatccaaatctgtacaattacaaacagaaaatcacgaaaaataaatgtacattgctatatcacatttactgcagcttactcagattacttctacagtatggactatgaaactaactactatttcatcaaaagttcgggttcagggaaataattgtgggtgaaaattaagtatctactcaaacctagaaggtgtatcctcaaaataataataataataatgacacttattttaaaatgtggaagttgaactaaacaacaagaccagagaaccaaaacctaataggtaagttcaggtatcgaaatgctattaagtaagataaatgctaaagggcacaaatggtggcagcaccaccatgcggtgttaatcttatatattttaatttaataattattataaaaactattaatcattttcaaggcgccacctcggtgttgggctcattaaagtaaagaaaaagaaaacactcatttccatatttgattcaaagtaaaaattggtactacattacctctgtgcaacctctttacgtacagtgtacctaattttcttctcaaaacatctctccttcctcttctcacggaaccgaacaagggaggctattcttcgcgaaagattcgagcgctttggagcgtcgacaacagctacaccctaaagaaaagaagaatgtggcacaaaacacatagatgtaggtacaaaaaaaataataatcattgttactttcaataatggtctgaataatcattcatagcatctgaattacccagttattttgattgtaaggcacttccactgtaggtataccagttggtacatcacgtcccccaagtagcaagagcacggcttgcacctattgtgaaaatatccccaaaaataaaatgagaaaggcaaagtatttcctccaattctggagtccactcctagaaaaattcttatacgtgctttatttttagcttgaaattaaatagtttcagtactcctaatctttagggaacgtgaaagtcataatcatctaccagtctagaggggagttgaccattgaagcaaaccatcgaaaccaaattactctatgaagagagacagagagaagtacaattgaatatacagagagaaagtgacatactttttcaggcgtaacagcaggaaaaacatacacctccccttcgaaagaaagagtgagctcactagtcctggaagccataaccacacctccatggctggccacaacgttgaccgaattcatatgggtctcttccaagtcgtccatggcatcatcgatatcattactacgaccatcttcatactcatcttcgtcatcgtcttcgtctacaggtataggaccccgcatgtggtcctcaaatggtcgggcttgcagaggttgtggattggcagccgccatgtagagaagaaaaaaaaaaccactgcagctgtccttgaaaccctaagaaagctctcttagaattaacagaaaccaaaaccctaataattagcaagtgtttccagcaacctgttccataggagggaaatcatgaagagagagagaaattgaccaagtgaagtgaaaagaagctagcatgaagaagaagaagaagaaggtggttggaacaatgattggattggatagggaggaaagacaaaactacccaaaattagcactcggatttggatttgcatttgcaaggcgaggcgtgactcaaattttttttatttgtgaagtgaaacttttcatttataaaattaaaatacagttttttttttttggaaatttaattaaatatacttaaaaatggtgtatggtgttttaatatatggaaattttatttgtaccctaaaaattgtaaacacatcctattttaataatttttattttatataaaatttatatgtactaagttttttaatttttttcttctaattcatattcttaaaaaaaaatatatctattaaacaaaaataaattatattttaaatattgtgacaaaaaaattagaataaaaaattatatgaatttttttaaaaaaaatatatatatatatacgtgagttagaaaaaaaatatgaaaataaaatcaaaataagtattgaaattaatataaaataatgtgagaaaaaaaattaaaaaaaatattaagagtaattttaaaattatttaaatattttttttaataatgggtgtatttatcattttatggggtgcaaattacattaaaaatataggaatataatactccaaaaaatcttaaacccaaaaataccctttccatttgaaaagtctctctctttctattttccctctctctcacctaactctccctctctctctctaaatctcacagacaagactcacccacaaccaccagcagcaccactcccatcccaccagatgtaacccagttgaaagctagccacaccgacgagacccacgaccagagatcaccacgtcacacaacgaaattgcgaaacccaacaaaatcgagaaacaacaaaattaccaagaagaaggtatatttctaatcttctacttgattttaaatgggttttgggtcttaaatgattgattgttaggaattagattcattttttttcgggttgagtttccatgtttacgatgatctgcaatttcgcctattatcgacatctcacgactatgttcgcgacattttgtcgatttctttcccaaggacttcaaaatataggcaattgttgtttttgtgatgtttcacgacatcttgcgatgtcatgatgtgacatgttttgtactgtgtttcacgacatcttgcctaagttgctgcatttttttagctgtggaaaacaataaattctaataagagaggaggccccaaggatacttaaggaagttctctacatttctactaacttcagcatatctgtcatttatacacaccctcgaatcgtggcaaaaaaatgccttcaacaaatgcacataatgtaatgaccgctctagtatgtggattagtaaaggcaattagc

SEQ ID NO: 379821 - DNA, 10299 bp, Cannabis indica
ttgtacccattggatacttctttcaacaattcactattgtggatgaaattcaaataaagtatctaaatggtgagttaaaaaaaaaacattataagagagattaagagacctgtatggtggcagtttttctttgttcaccaccagactctggtgaaaatgttgaaccatctcctttctcaatggtaaattcaacaattcctctccctgttagcctgcaagtaattagaaaaagaagtatattgacattttttgtacaaagttaaaatttctttggtttcagagtacttcatgtcccacaagacacagagtgataagtgattttccttttttgttactttaatttagtcagcacacttgctgctcttaagaaacaaataacgaggtctcaagtactgagctagcctcagtggctaacacacatagtgaaacttgacccgttacatgatatacttagaattaataaactagaagtaaaatttaaagttcacagacaaaaattatttcaaaaagggaaaataaaaatttgatacctacgaagaaaaaaacagaatacaacctattaaattaggacagttttaaagatttttcatttgacaaaaggccaatatatttagtttcaagaaagttataatttacaattataataacttattagtactgacctcggatattttgaaaattgttcaggcaacagaaatgacaaccctggagcctgttagaaacaatatcaaaatgtaacttttacaaacctatatttacataataacatacatgtaaccattgtccatttgtgtgagtatagtggtacttatcatattacaaaatattttatgcacttcaatacctctatggatactggataggttaatttcttattcttattattgagtgtaaggattaagagaatttatattcttccattgactactttcagatacctgcaacaactctaaatcagcaattgtgtccagtgaagatgcaaggcgtatagacactttgtctggatccttttcctttattggcttctaataagtgattgtaatccaccctgcataagtttaaaatttaaaagtttcttgcagtgaacaattacagtaagtgtacaaccttataagtatttaaagtattgaattggcaaaagatagaattctgtctactagcactactctattgaagattttaatcctatgtgaatataaaataccgattcaaccctaacattaagctatagtgtatgcagaatattaaagtttaaaaatatgaaataaccatataaatgttcaaaaatatttttctgcttagtttaaatggcatttttcacatattgtgctaagctttaagccaaaatgtaccctcttatacctttccatcaataagagaagtgtacaatgttgaacccctttcctttagatctgcaggaaaacttgccaaaattgaatccttttcctcttttgctatctgaattgagaggaaaacatgatacaggtaaacacaaatgacactgaagaaattccaaataaacagacaagtgaatatcagaatctcttttatttcaaactattatcctatgactatgcatagataatgttttgaaattgctatatcaaaagagacctgatatcctattacgggacgaaaagtgtgaaccactgatggctgcctgctatatcaaaatttcattcagcaattgaaacatattgaaatccactatgttcaataattacgaaatgaaattaagtacttttaggtagttatttcctttttctgaacatgaaaaaattgtatagggtaaagaaagaaattttaaaaatagaatataccttcaaagctttcttcacattgccttccatggttccataaggctttctctgtggaattcttaataagtatgatatgtcttccagagaatcctagcagaagaaacaagaatttcaaaaactgatacaataacaataaaattaaaaattaaatccataaataaataaaacacctgtatagccttcatgtttgtgtttgcaggaatcgccttccttagtgctagctctcctgttcttggaaccttggtgtctggagaataaagtactgccattgcaggaggcgaagaccacggctccaaaccaagaaaaggaagtggagcagaaatttgaacaagcattaggatcaaagcaattaatctctcaagtttcctttcatgcccattacttggcttctccatgtttaagggagcattattacattggtctgccagtttctgcattactgaaaacccatcttagaaagcttatcgtctatctcactaaccaaaaaagttgatatattcttccaattcaactacttacaatgtccaatattccctactaaatgctaaattcattacaataaaacttcaagtagtagaagagactaatccaaaactaaaaatcacaaattttcaaataaatgaaaccacttcaaacacctaacacaacacctactcttctgattttacttgacaagtgataaccgagtaaaacaaaatgtgtaaaacaaaaaattacaaattaacttgacaagtgattaccgagtagttgaaaagaactgagaagagactatttcataccctaagtagctacatgagccaaatatctctagccaaaaggccacaatcatttcccctactggatttcattctttcgcaaaacaggaattttattttcttgcttggcccaacaaagtctactctctcagccatactggctctacaatattatacataaaaacaaaactttgacattcaggtacaatatatggtcctgttctccaaaactaataaataagagatctttcactcgcaggacttaaaccaaggaagattatggactaaatacaactacaggcatgacgaaactataaaaatgaccaaagcgaataaacacatgaaacataaaaattaacaaagtaatagatagatagatgttgagtggaagctatttcaaacatgcaacattttccttttgagtatgtatatgtgtgaaattgcgtaaaacccaactggaatctagtctaaggattcaaaggtcaacatataaacgtgtaaaattccagcataaaatagactgactcacatgccagtaacattgagcaatggtaagtaatctcgtgatggcgtaagaaccagcctcgagcacaatggtggcattgatcgttctatcaatcagtctattatcatcctcattctctcttccatcacctaaaccagacccagacccaaatccctgaaattcagtagctccttcgaacgacaacctcccttcgttccctccgaacccactcacctggctcgccaactcgctctccaaacctcctcctcctcccccctccacgcggctcaccaccactccttcctgctggtccgtactatccgagctctgtacagggatcacgtcgaagaactcttcctccactacagagttcactagccagctgcttttccgtttgtttctcgagaaaatcaagtttggattcactttggggaaattggaggagctggggtgaagcttaggatgagagtttgttggctttggtttgggtttggtaaaggaaaggaatctctgggcagctatggtgtggaacgaagccatggctgcttaccagcctgagttctgaccaagttgggaaaatctgagttggagattttatatggctgacacacacttatgattggatgagtggtaatataatgcgattttttcaaaaatatacctaaaatctaaaataatttcaaaaataccttaataaatctcatttacaataatacattgccacatcattaaattataccttcattccaaactattaaccccaaaaattgatacttgtaatttttaaagttagttgaccaaggtatgaaagatcacatggtgaaagtcactcggctagactgaacatttttaccgagtttgactcgaacctgaccaaccccccggacccgatctgaccaacccgaaaatttaaagaaacttgttcaattcagtgggtcgggttcaacccgatacacctttcaagcgggttttaggttcaatttttcaagtgacccggtttcaggtcagagctacactcgcctgtgaactcgatttttttttttactcttacataaactttaataataataaaagtttacactctacatatatttaacctcaaatataatattatatgctatttctaaaaaaacgttacataatacaatatatatatattttatttgttaaaaatttatatgtatatatactattaaatttaataattttgttatatatttatatataattaagtaagtgtttaggtttagttatatgtttatatataattaagtacatttatagataattaggtgagtgtaaaaaaaaagttcgaccaagttgatcagctcaacctacccaacccgaacccggccaacccgccaactcgtaaacccaaaacctgccaactcgcaacacgtgaacgggttgagtctaggtacaattttttcaacccaaaacctgacaacccgaaacctggtcaacccgtccgatgttcagtcctacactcggtccaagagtgactcaatgttacttttcctcgagagtggctaatgtccctagcccaagagtgactaaaagtcactcagccccgtcatgaccaaatgttactctgccttaagggtaacaatgtcactcgaccttaaaagtaacaatgtcactcggccgcgagagtgacaatgtcactcaaccttgggagtgacaatacatgacattgagaagccacttgacaaaggaattgagaactcactcgacaagggcattcacgaatgtcactcaacaatgacttctcaaaaagtcactcagcagcctcccgagagaagtcactcggtaatgacttctcaaaaagtcactcaaaaaacctcctttgaaaagtcacttggcaccctccctagagaagtcactcaacaatgacttctttaagaggtcactcggccaggacattgcaaatgtcactcgggcatgaccttgcaaaacttggcgggattttcccaagcaagaggagaataaagcaataaggatacgatcacaatgataaggtaagcacgcgaggagagtacagccatgccttctgcaagctctaaaagtaaggaggtacgagtagtggagacaccgcacctgctgaggagtcgactaagggtacactacagccacaacccctacgactcgggaccacctaaaactagacaaggatacgagatgcaagaccacctcctgcacctacgatttgcagcctgaaagtgatagcttgtcctctttgggaccactatgtatctcaagccacttaggcctataaatactccatcctcaatgtgagagggggttggaaaattagatttgtaatcttgagcttgaaagtaatagaagaaattttttctttactctaaaatttcatggtcatttgaggttacattttatcatcatcatctccatcttatttctgagtttaagtttagattttaattttccaagtacaaagttagttgacgagttctcaccatcaataatttggtgtcatctgtgagcatgacaagcttaagtcaagtcatttctgtgcacacaatcattacaaaatgcctagatgctctcgtcgtcttcatgacgtggagatttgcctcaatggcaaccagttgatcgtttcgaggcaggacccaccaccacctgtcgtcggagaagagggtgtgaatggtcacagacctcaagtaggagaagagaatgtgaacattgacaagcctcaagtaggaggagaaggcccgagcggacgagggtctcaagcaaggcaaggagacaatcgccatgaagagatcccagtggatgagcagagtgacagagcaactgcctccatcatgactgaaggggaaggtgggacacaaaggcagagggttccatcacccataagacaccctccaccaccaatgccaaaagacccaaaaacctcgcatcataaatcgggaaaagagaagaggatttattccataacctcaagctcttgtactcacatacgcaatgaagagatgaacgagttgagaatgaacaacttacgaccggaagaaacagttgtaaatatgaaaaatgtgttggacaaactcttaaaagggcattctgaggtgcctttgtcaagaaaagagagccagatgtaagaaaaaaaaagctagaggaggaagggatgtccaagtactcaacgagtaacacgccagagtcctcaccaccaaaggctcggcccaaaatgatctagaacccttgtcgcggccaaagaaaactaacttaaaggttgtctagagcaatttaagggaaaaactcaaccaaaaagccactgtcgagaagtgagtgtcgtcgctggtaatgccctgccataaggatgacccaaagcacacacttcctgaccttgggaaaagttgaacagaaggaggtaggagattgacaaggaaatggaagaccttcgacgaagaatagtgtctgccgcatcggaggaaggtagttgggatgaggatgattttgatgatgagccacctttctctagaaacattcaatctaaacaactacctcccaatttcaaagagcctaacatactgccttatgaaggaattgccgacccaaaataccatttggacgccttcaatgaaatcatgaaaatgaagagagttacaagcaaggcaagatgtcaatgctttgttgtaactctcaggggcacgacatacaaatggtttaaaaggttgacccccagcttaattacctcatggaggaagttcactgatgaatttttggcgcaacaccatgcctcctagactacgtcgttccaaggacgagtttggccaatatcaagtaaggagagaccaaaatcttgaagagctatatatatatccagcattttaacaatgaagaaaataaagttggaagattgtccaaagacgaacataagatggctatagccgtcggagttagaccaaagagtaagctatggaacaacatggtcaagagagagctagatgatctggaggacttctatgaaagagccaataggtacatcctagtggaggatggacatgagaacttaggtgtaggaaagagtgatcaacccaagaaaatgcctgctaaggaacttcgcaagaaatgaggatttgggcacaaagaagacttttgaagcaagaaggtcaagagagaagcagagccacaacaccatgaatactcccattacatggagttgacttactcaatggaacatattttttcatgacaaatgagcatcaggtattgttcaaaagaccatcacccataaggaaggaaagggccaagaatgacccgaacaagtactaccaattccacaaggatatagggcatctcacggaggaatgcaagcacctcatggttgagattgaagaattaatatatcgtgggtacttgggaggatattgaagagaaaattagaggccaaatgaatggcacctatgagaagtacccgacaaagcccccaaagtgttaagagaaatcagaactatcataggaggacctagcctaggaggggacactcggaaggggagagacaagtacacctgagaggaaaggtgggagccccaagtttggagcttagaataaagacttctaaagagtttcaagggagaaagtgacttagtcaccttcatagaggaagatgcaagaggagtgcatttcccgcacaatgatccattggtgcttatagtttaaatggccaacaccagggtgcaccaaaatttggttgataatgggagttaagtggatattttatacttcacagtcctaaagaagatgggactaggacttaaggatctaaaaccttgtgcctcactgatatatgggttcaccagtgacttaattcagccataggggatgatagaattagctttgatcattggggaacaacctcaatatgccacattgatggccactattgatggtgagaactcgtcaactaatttagtggctaaatataaagtaaacccaaaaataagatgatgaggaagatgaaaagatatatcaatattaatggatgaatgtttgctctttattgcattcaatgtctgagttacacaaataattttccaaccccctttcacatctgagaaagcagtatttataggctctaatgacctgagttacacaatggtcccaagtagataagttgtcgctttcgggctacatgttgtagctgcaggaggtggtcttgtacctcgtacctttgtttggtgtcaaatgatccctagctatagagatggtcctcagttgcaaaggtggtctctggtcacaaaggtggtccccagtcgcagaggtgtggctgcaaagtagaagatttgatcaaagatttggacgagatgttcactactctctacaagtaccgaatgaagttaaattcattaaaatttgtatttggtgtgtcatcttgaaagttcctaggcttcatggtcaatgaaagaggcatagaggcgaaacgtgagaagatcaaagccttgatagatatggaatcgcctaagaataggaaagaggtgcaatgtttgactgggcaagtggccacattgaacaagttcatttcttagacacaaacaagtgtctcccattctttatcaccctcaatggaaataagaagtttacttgggatgaaaaatgtgagaaagctttcacaagcttaaaggagcacttaggaaatccacctcttttggccaatctggaaagggggagaagttgtacatgtacttggcggtctccaaacacaccttgagcattgccttagtaagaggagaaggaaagcagcagcaacccgtgtactacattagtaagcattttgtggacactgaaactcgctacccaaaaattaaaaagttggcctattcactcattgtggagtcgcgaaagttgaactcatactttcacacacatctaattgtggtgttgactaatcatcttttgcgacaagtcctgcacaaatctgaaacctcaaggtgcctactcaaatggttgataaagctaagctaatttgatatcacttacatcccaagggtatcaaatcaactgtcaaataatgatggaagatttcatggtagagttcacctatcatttagatggggaggattaaaggtaggaaactggtggagagttgggagaaagtggagaaggagaggccacctaggagctacatgtagacggggcctcaaatgataatgtagcaaggattgggttagtgatgttaactcttggaggaatcaatatgtattgtgcaataaggtttgccttcaaggcgtcaaacaatgaagctaaatacgaagcaaagttggtagggttgaagactcgccaaggatttaaagttacttgactacaaatttttagtaattcacaataggtagtttttcaagtgtggggagataccaagcaaaagggccaaaaatggtggcatacttagccaaagttaaaagctacatggagaagctacaacatttcacaactgagaaaatccaaagggaaagcaacgtcaacgccaatgccctagctaagcttgcatccatataagagattgacattcaagagcctgtgtcggtggagttcttagcccaacaacccattgagagtgatcaaatgttgcaagtaagaagtgggaaatcctcctggatgacaccgtacattaagtacatccaagaagggaagttgcccttggacaagaaggaggctcaaagaatccattataaagccactagatatgtcttcatggatgggattctatacaagagaggtttctccactctactcctgcattgtataagagaaagtgaagcacaacaagtgttatttgaaatacacagaggagaatgcaaaaatcatgcatgaggctatttcatgtcgatgaaagtgttgaaataaggatactaatggcatagtctagaaaaagacacaacgaagttcgctcaaaagtgtgacaaatgtcaaagacacaccaactagagcaggtgccctctagccaaaatcacaagcatgactagtccatggtcatttgccatgtggggaatcgatctaattggagctttaccaataggtagtgccagggcaaaatgtgttatggtggcaatagactattacaccaaatgggtagaagcaaaggcctttgtatcgtccctgcttcaagtctccattgggcccttacacccatggactaatggctcttatacacgagttcgtcactctggctgctttatggactgatgactgaccctacagacca

SEQ ID NO: 379822 - DNA, 5184 bp, Cannabis indica
tggctattttccaattaaacgttgtttaccataaaagattaactaaaaaaatttgtaaaaatataaaaaagaaatctatattttttagtagaaatgcaaaataaatgtgaaaataactgtatgtaattttgtaaaaaaaattaaattcataaaaatgctagaaaaaaaaaactttaaatctgtatttttgtaaactttttgcattattatgaacaaaatcccaagttaaaaaagagcttcacaaaaatttagtaaaattacatataatatataaaagcattactattaagcgtcagtggtgttcgtgtctcacaattagttagcaatattctctaaaagctatttttttaagttatgtgagactcatacttttttttgactttggagaaagggaaatccgaacttaagacctcctctttgtgaggaaagtgtggaaccactaggctatccctatgacctatgggactcgatacttaattatagcagtatgacactgaaaaaagtattagacactaacagtatcttttaacaattctctatacaataaaaaaaaaaaaacaattccttcttctgccaaagaaagaaaggtattgattatatttttttttttcctttccaacataaactcattatctagcgtttttcaaagccaaaacaaactataaggaattggaaggtgcttcagacaaactagtaatcaaaagagttttatcttggaaagctgatatgacctcaaaaatcaagtatttcaaagtgaaaggtattgattagttaaataacaataataaagcataaatatctaagtttaacttctcgttacagagaaataacagcaagaacaaatagagaaccaaaagaaatagtggctgacatggtattgctgtaaaaagaggattacagttaaatggttctctgagattcaaaactcgattcatgcctaacatcactctccccctaatcttctaccttactaatcttagggtctaacagtcctcaacccgaaacagcaggagacaaacatattgcaaaaaaagaaacatgtaaaagaaccaaaccaaatcacctatgaagaaacattattattttaaaatatcaaaatagcatcataaacatgtaatagaaattagcatgcaaaatttgaaattagaaatcagaggaaactcaatgacaagcttaaatgtatgtgttcagtttactatgtaagccacctaagaattctatgattgatatcctcttatgtttagatctcattttatcctcaaaagttgtaaaagcactcaccttctcatgttctgcttcaatttcctcgtaggtggaagcctgcttcttcacaatatcgacttttgttcgatcagttgtctgcataatgacacagaaaacattaacaatggtgagtttgaaagaagtgggcaagggagtggtaggaaaaagaacgaaaagctatgctataacggctcacctaatctcttccagtttacaagggagagggccgaaacagacttattatgccaaggaatgtagaacaaggatcaataattttcagatttgtaggcacacattgttacttaagttacctagcataagcaaatgctcctcctctctctcactcattcgtttcatttccgatcctagacattttgctatcaaacgaatctcctcagattgtggatgggatttgtccccagatgaaaatccatgaagacatgaagagactccaacatccacccaactaaatcctacttctttcttcactcccttgttcttcattattctccttatcattgaaaccttttcccactcctctttctcagcatacaaattggatatcatcacataaggaccggattccattggctccaatgccaacaaatcctcagctatctcctcagccatctctacattcccgtaaatttgacaagctccaaataagctttgcaatgaagacaaactcggttgtcctggaatcattctgaccatttcccttgcctcctctagttttcctgcccttccgagcacatccaccatgcaagaataatgcgcaggagatggttcgatatgataccttttttccatagaatcgaatattagacggcccatctcaaccattccctttctactgcacgccgtgagaacagaaagaaaagtaactgagtcgggcctttccccttctttctccatttcattgaacaactttatcattgattcatagtctccatggccagcataggcagagattattgctgtccaagcaaattgacttctagtaggtgtatcatcgaaaactctttgagactcatggatgctaccgcgttttgcatacatgtcaagaagagcagctgagataattggatcggtgtttaatccaagttttatcaagtatgaatggcatctttgcccatattttagagatatatcctctgcatcagcaatggcactcaaggcactaccaaaggtataattgttcggcttggacttcgtaactgcaactaaaaacatctgcaaagctttttggtataacccattttgagcacaacctgaaatcagtgaattccatgatgtgatatctctgcaattgagttcttcaaagaatttcaaacaatctcccatggactcaaactttgcatacatggtaatgaggctattgcaaacattttgctctgataaaaatccagtcttgatgcaaaatccatggattgttcttccctcttttgccaactttctaaccgatatggcatagattagtccaacaaatgtaacatcattcggatatacaccgtctagtctcatatcattgaagagagacaaggcatcatcttcattcaaagaaatcatcgatgtccaagacactacatttcgtttgtttatagcttgaaaaactagttttgcatcttcaataacatcacacttagaatacgttgagatcaagacattgcaaactgaaacatcagttccatatcctaatttcattgtcaagccatgtatcagtttcccaagcactaaatttctttcatgaccacaagccgaaattgcactcgttaatgagatatgatcaagctccatccttcctttcaccatttcggtgaataacaaaatcgcttctaagccatgatctccttcctgagtatacccagatatcattgcattccaagtaaccaaatcctttttcggcatttcatcaaacaatctccgagcttccaatagacgatcccatctagaatacatggatataagtgcatttccaacaaaaacttcacaatccaaaccgaatttcataataagacaatgcaactgaattccaaaaagaaaatcttcatgatccgaacaatatgcaagaatcgtagtatatgtcacgggatcaaacctgaccccattcatgttcatttgaagagcaaagttcaaaacatcctcgctcttctgaaaccctgtaagtatagtgttccaagaaaccacatcaggataacacaaactctcgaaaacacataaagcactttccaactgcccatttttagagtacacattcatcaaagaattagcaaccacagtatacgaaacaaaccctgaagaaatagcatacccatggacttggcagccgattttcagctcacttcgacaggccttaagggcaagagccaccataacttcgtcaacatttccagagaaacccattcgaagcgtgtccttaaagatttgaagactttgatacggaagattcttgtgcaaatagcagagcattgagcgggtaatggatgcattatcggcttcagtactttgatcaaacaaatgatgctcatttctaaaagaatgaatctttataactctaatagaacgttgatatagcaatctactgattatggtgaaattcagttggcgggtaatcatcagaatcttaagaaaaggtagttattttgatctcgtcgaataaaatgtagtgcaggaaaactgagagacaaatgcatttttcacttgcatcaaattttgcctttgattgaaactcaaagttttcatggcaaataatctcaatcccaactgcaaagccattatgattttagcttatcttatgaacctcagaattgtcctacataagaacaagaaagcatataaattagccaaagttattcttaagaacttcgatctgagttcatgccaatctactctagtctcaacaacacatctcacaagaacactcatcacaatctctctgtatagtttctctcttacaaaaacaaattacaaaatgaatctaaatgctacttatatacttgtccaaccaagtactgaagagacttaactatccttaactgtaactaatgaccaaaacaaacataagcttaactaaactctaagatggtgtttggttggaagtaatggaaacatagaataggattgagaatagaaactggaattggaatgaaaaatgtttacaaaaatttatcaatacattggaatagggaaaatagtaattacactgcaattcttcaaaatacaaccaaactaagaaaatttgattcatttccattctatttcatttcattacctccaaccaaacaccacctaactatgtagtattgtgtatataagtatgagcatcatcaaaaagcttgtcattttgcagaaacataataaagtttagttgagaaattttatcaaacacataatgaacataaaccataaaaatttcaaaatatacaaatgaaaatacaaatcactatctaatcaatatccatatcaaatacaaactcatcatcaccaaaaccaatatccaaaaatttctcaccttctagaccccgagacccaccctagcacttcgtcgccgtcgccgtcgccgtcgggcaattgtaaaagaagatgatgaagaaaatcgtaagaaggagaaagagagggattttttttaataaataaataaagaataaattggatttttacccctcaagtctatgatatttgtataattttacactattttcccgaactatacaaatcattacaaatatctccttcccgttccaattacattcttctaattttttatagaattttttctagctaaattttctcaattatcatctcacttgcacttaacttttgatagtaaaaccctccaaactaggggtaagttaaaaaatacctcttttattaatcaattaatcaattttgcctttaattttatatttatttgaaacatac

SEQ ID NO: 379823 - DNA, 6241 bp, Cannabis indica
aaataaaataaataaataaaaagcgagccaccacttaggttttaacatcactcacatgaatactataaaatagtgatagaaccagtcgttgtgcttcaattaaatcccctggtcctgataaattcagtagaccttgaccatgaactcccaaatttgcattagagtggataacagatgattcctgtcatttaaaaagatgtcatgtacaaacagaatttatcaggtaaagcactgtcagatacagctaagtagtaggtaatttaccttcagaacaactaaattgctagcctcaagtaaggatgttgcaacagttacgtctccccctccatctatgagcatttttgaattccacattaagaacattttcacagacattcgcaatgctccatatacctaaacatattatgaactttttttatcataagcctcaaaaatatatttattgacacaaagttagaaaagcatagaaaaaaaagaaataaactatgcccattaagataatggtccagtgaccacatgcaaaacgaaatgtattaagcatttaccaaccttaatttcagagtcactcatcagcaactcttctgccaaaagctcaaattcagaagaagcataatgttgcagcccaaagctcaacactgcttgacgtaagagacttatctgtccttgaacctacataatgcattgaaagtaaactttcttatatttccttagatgcaaaatgtgcgtattcaaatggcagtgctgtgaatgcacacagaaaatgcaaccagttaaagagatctgatttaaagagtacaactacctatttttagtgtcagtttaatcttagtttttgaacaatgccaaccttagattttagaagtgtcacttatacacacatacaagtgcacgtacatgcacctatatagaatcatcctcctagaagaaaagaaaagataatgatacatttcccaagatcacacacagcctataagcaacctacccataatattggattaagttaagaacttgcaattctaaatttaaaattaaaatttcacgaacttgaacacgactccaaagcaatggaacagtagcccgggcactgtcttcaacataaacattggtccaaagaggctggttaggaaagtctaaaagaagcgtctcagtatctgttgacttgttatgattactaatgataaggcttcgaggaacggcatcatataaagtcccagcaccacctgcattttctaaacacccatagctacttcctcctgcaaatttcaccatttagttcacatttgtgtgatgataaaccacataccaaaaaaaaattataagtcttaaatacgtagcatgtcttttttacacaaggaagccagtagaatgcacaaccacaagccaaaaaatatatttcccatttttaacatgacataaaagcataacaaggcaaagaaataaattatatttaccctgaaaaagaaaagtaagggtgtaatttaacaaaatcaaactagatgaatttagctctcccatgatccaagcatataagattatcatatgttagacctgtatataagaaaacaagacccttgagggccaaggaacttcccagttcttaacccaaaaaaagaggctgttcacaagatcaactagaaataggaagctagcttcaaaggggaaaaatctcaccatgcacaaaaatgctgggttcatcatgcctgctgaatacatcaacagacacccttccccctccaccaccagcataaccattacctccacaagcacttattctaccactgccagtcctgcacttaagaataaaacacttgaattaaatgacttgttaaaggaaaaaagtaatatcaatgtaagactgatgccaatggcaagtttccacagcctaaaaatcacacgagaaaataatatccaattcaattcaaacatatttgaaagaaaaactaaatcatatttgctcaagcatcaagtacacaatactgtactaaatataaaatcccccatgtgaataaaatagacaattacaactggatgcagcaatcaaatttcattagtgaaaaaaatgtttgcgttataaaaatctcataataggtttgaggcattcattaaattccatatccatgcctggcctctttttcattccaccataggagctaaagaattagatacaaagcctaactgttcagaagctagaatacaaattgtaaaaagaaagcaacacgaagacgatgcaatgagcaagcataaaattcaatcacccttctgaaaggttgaaacgaaaaaagttttcaaaagcagcaataacttttatcaagacgcttactatcttgataaggaaattcaaaagaataagtatgaagggatcttgcaaccatgtaaaattttaatcctgatcctcttcattatgaaagacaactatgcttcacattttgctactcatttccttggtcaatataagttaaggctctcaaactacacaaaagaccattccgactagatccaaaagtggaaattgaaagatttccactccgacattttattcagaaccaaaaaaaaaaaaaaaatccaactatgagaaaataaccatcattcccgagagtatacggtttacaacattttaaattcccttttatgtatcctatatatttaaaaaaaaaaataaagtgtgaactatgaagtcaaactaatctggaaaaaaaaaatgtcacgacaaagcaatatgagcggttgaaagattacattttgaaagccttgatgtagatactgccaccagagccacctccacctttcttccctccgtcacccccatcggcaaaaatactgccgtccacctcaaggtaattggtaatcagcaacttcacccttccaccaccgtgtcctccataatccaactccttgctcgttgacccacctcggcttccataactactaggcttctgcagtgacgaccacgagtaagcgtccccaccccacacgtcctcaggaatcttagtcttatccgccaaacaacaggcaccacgtccaccatgtcccccacctgccccgtctatcccttgggggctaccgctcgtctgcgccggtggatctccagccaacgccgtcgtgttcaccacagagccattaataaagctggcattattagccgaaagctcgaatccaccagagacaatcgacgaagagtttcctaaactaaaattaccagtaatgttaacagttatggaacagccaggagtggcacaatgaaacctcaccccgggtaggatataaaaattgcccttcccttgtatgtacacatcgccggtgaggttcaaatcgttcagtatcttacacgtagtgtcgaccgagccaataccgccaaggtcatcggtgcatgaaaccgacggcggatgaggcggcggtggcggcggagccggcggcgagtaatcctggtgaaagagattccaatccaaatctaatatcgaaaagtcatggtccgcaaggccatggctagccgcgagggctatgacgaaggcgcagtagaaaacaatggcgaaatggagagcagaagaagagtactgaaaccgagccattcactagcagagtcagtcattagattgggcggtcacaatttgattccaaagtcaattggatgcgaaatcctagcaaaccaaccgaagaaaccaccatcggaattaatcacacctcttcaagagaaaaatcaccctcgattgattactgcactgaaaaccctagaattcgctctgaaatgggggcagagaggaaagaagaagatgtggggaacactccacctttattaactttttgggaaggtgtgggaggttatcagaagtatcaagtacggtcgcacctacatgagctcgtatttgaagtgattttttattggtagagttgttactctttaatctttggctgaaattaacaaccagtcaaacctattgacctaatgtatgtcggtaagggttatggtgaggacgagcgtagacacttttatccctttgatgaacccactcgctccggtatggaatagattaactgaaaagaaaaagaaatcctcccaagaaagaaatgaatgtaagaaaaagaaagcgaaaacgacacaagcgacgccgtcttaggaatgataaactcaaaaccttattaggtagttggttggttgagccgacacgacgtcgttgagcctttccaagttctttccagtaagaaaacaaaccacacactcacccaacaaaaaaaaaacaaaaataagagagagagtgacaatcacgcgtggtagaagagcgtgagtgcgtgtgatggcggtcggggactattttcaatggctttatcgtcaggtcggggatgagagaaaaattaagataaaagcacccgttggggacgtaagtttcgtcaatgttccgaaccagcaagattcgggggttagtgttgtgagtattaccattttttttttaaaggtaataatttacacttttaccttaaaacggaaaaacaaattttttatttttaaaaatacagtatcaataaaaattacgagagcggctccttcttcgtgtcttagtcgaaccacacccatctcaatctctatgattttcattctcaacacaagaagattgaataaacttcgaagattaccaaaaacgaatcagaaaacaaatacaaggtacaaaaatttcttcttcctaattaagttattttaaaaaaaaaaaaaaatactttcatggttataaatattttttagattttgaaaatcagataaataattaatcatatagaaaattggttgatcttaataaataaatgagaccatattacaattgaaaaaaatactaatgcatatgttatctcgatttttgcctgtctgacgtggcatgtctacgtggttgatatcagcgtcacgtggcagtacagctcaccaacaaaaaggccaagtcatctactcagcacttaaaccaacagggagtcctagcactcaaacgagatgatgaatgacggaccaaccacctcaaggaggctggtcggccacccctgtccagccctatggccagcataggccagccagcttctgaatagcacaaggctagccagccagacattggcctggcaggactttggtgtgcaacttcatgcgtggtcagcaagctagactgcgaactgggccttaacagctcacaaaagtagagggaaagtatctatttttaagggtcattttagtcatttgtattttactaattcaatatgtaaatatatgctcattttacctgataaaagggtttaagctctcctatataaagggccttaactgaaccctaaaatcttaagtctgaagtcataagttaaattctaagcctgaactctctccctctcacacacgtccaccattgcttctctcttaacttgagattttccatatttgattcctacattgtaaccttaagagctatctcaaatcccacccatagtgatctgaatagtattatctctcggtattaatacaactaaaagagaagtaggtcattacccgctaactaagggggccaaacctctataaaatcatgtgttcttttattttcttgttcttattgtgtaatacatggcaagcatcaacattaatacgaccccgctatcggttggccaaatctgaggtcaacagtttgatgctttcattaagagtgagttgatatcatatctaattaaatgtcatggttaacatgaggagaactctggctacaccatctgcatcatcggttcttcctcaaggtcctttgactacagatcttgatgtccatgttccaatgacgactggaatttccatgagcactacaaatgtggtcaatcctaccatatcggtaggtgccacgaatctggccactatagttggctagggtgcacaaacatctcggtggatctgaacaatcagcctttgcctctaagggaggaccctccactggcgcctcccacgaaggaaggacccatggggaacaaaccctaggaacaacaaccagacctcgtccccggtactatgccagagagaccaggaccaggaattggcgagcctgctattggcaagccccatgtacacttaggagaagatcttgagttagccagacttagagaggttgtctgccaagctaaccaaactaaaaaaccacgcattgctgattgcgatgtattctctcagtagagacgcatattcttgagatggatggatgaccaagagtacatcctccgattgttgggttttatgccc

SEQ ID NO: 379824 - DNA, 2318 bp, Cannabis indica
tttggtaaaagtaaaatcacactgcaaattgtcaataatggagaggaagagagagggaatgtccaatcgtcagagcttttatgtcttcgcaaagtttgaagaagaatgtgagcagtaggatcgatatttgggggtttagggatttaaatgttgttttcgtcgattcttaactttagacatttcatttcttgtttgttttataaaagctcacacaacttttacttggtattttcgaactgacgggaataaggtcttctattttaatttttccttgctttattttttcgtcggtttcctttgtagcgtcatgttgttaaataatgctaatcaatattttttaatatcgttttgtaacttaacagcttctatttttttgcacacactattcacgtcgctgatcaaccctatgaacagtagcgttgaccgacacaaaaactaatttttgttgtaatatatcatgcattataagactttatttggtggaaaatagtcattttttttttctcttttttaatttgttgccaatatgatttttgttgatatattggttgttttcgttttagatgtatatcatatcttgttgaaagtcttttttttccttaaaagtttttgttatcttaagtttgtttggaagtttttagtgaggctagttatcataagttctatgtggaaaagcttcttatatttcacaacatatatatttttttttttaaaaatttgtctcttccataattttggaaaggttcgtattttatcactgttgtctttctattttttattttttcctaggatttgctttatctctcatttctttcaacaattataaaaaaaaaaaaaaactttttcacttggttcacgaaccctgcttatctcgtaattagaacacctatatatacatacctatatgatatatttatgaaaagattatgaggccaatcaggaagaaagagttaataaattataagaaattaacgttatgatcactttatactatgttagtttttttattactattgccatataataccaatatataatttataagttgtacgtcgacgtaaactcagcagcatcttccaattgtattctgtgatataaatgcatcatttatatataataaatatgtaatatacatataggtgagattcatttataggcaagatatatatttatttaaaaatcctaaatcttacgtcattatatattatatattatattatatttatatatgatatcatcactacaagatgaattaatgaatgaagaaaaacattggagtgagacaatatataggtgacatgagatcgtaacagggaaagcttcaaaaaaaaaataaaaactgttacaatattgacattcattattgtagattgatgtcatatatatatatatgaattaattaattatcataaaactatatattataataataatttaaaataagggcattattgttagtgttttaatacagccgtcaatttattgaaaataaatatgtaattggatattaaattacactaccaatagttatgataattgttatggtgtttgaggaattcaaagattaaacgcatatatagtaaacctatatatatatatgtcatttaggcacattgtaccaaaatgaaactatgtatagtctggctttgtctcaaaactgaggcaacttatttatagcaagcaagctgtgttcacctcaattataatgtttgttgcgaagtggcaaacatactagccgtaaagtcattaaataataagcctacctatatattcctctataaccaaaatagtgcatttatatgtacatacatacatataatatatggtacctctcctttagatttaaagttttcaattggctttaacttcatttactacacattaattgacattgaaatttcaattccaagtttttttttgttggtcttctacttacatgctttacacacgtatacctcttaattcacactaatacataactatatatacttaattatacatgaatatatatcaacaaaagtataattatttttttaaaagaaaaaaaaaagaaagaatgtcattcaattaaagcaaatcagctgttacaggaggaccaataaatataggacaagcatctgtccacaactgaactcctaaaggactagtaacagacttagctagtgcatgggccacaccattcgcatcacgcgaaatggcacagcaagaaccaccaccaacagccgctaaaagagaaataatctcctcaacaattggcttaaacataagaatattatccggacaattaatccaagaactaacaattgaagaatccgtct

SEQ ID NO: 379825 - DNA, 2430 bp, Cannabis indica
cactcttgcaactttttatcttttcttgaaacaccccgtaatttctttcccccagcactcaggttggtagcacataagttcagtttagccatattcccatattacatccgaccccacaatcttcaatattgatagcacattggttcttgagccacgcattcttaaaacaaaagcgatgatagggagtgtacttactttgaataatcggcactagaagcaaagggcaatggtccgatgtagaatgctcgagattgagtaaggaagcatcgggaaataactgcatccaggaatccaaaagcaacgcacgatccaaccgagcttcgatccatgaactagttcctctgcttttctcccatgtaaaccgatatccagtaagttccatgtcagcaagaccacaatccgataggcaactttggaagccttcaataagtcgaatacgatagggatgaccaccatgtttatcttcctgagacacaacattattaaggtctcctatgacacaccaagggaaaacggagtcgcctgcaattgatcgaagaagagtccaagtttgatgcctattcgcacggttgggattgccataaactccagttagtctccagtattcgttcccctctcctttcacagacaaatcaatatggtttgtagaaaagcccaataagttcccatcctttttatccttccaaagaaaagttagccccccacttagtccttgggcctccaccacaaaaattccctcaaagcccaattgtctccccacccattccattctattcttgttgcacttagtttcacataaaaaaacaaatttgggtttcttatgagaaataatctctttaaggaattgaaaagcctgttggttcccaagcccgcagaaattccagctcaatacattcataatgcacggcgggcctgagaaccagaacccgccccaataaagtttttttgaatgtcttcctcaccaaagcccattacaacatccccctccattgacccaccaataccatcagcagtgttatcctgaggcccagtcctagtctcttcctcgtccccactataaaaaccttccataattgttttccttctcttcaaatcaaccacctgaatcttaggcaaagtaatattctgcattggttgtggattcaaatcaatagcctttgactttccttggatatcaccttcttttccagctggtagactaggtagattattaccatatgcattagccaactcattcgaaatcattcctactgtgattcccgccccctgacttctctccatcccattactttgttgtcccccatcggagctttggccactcgactcaccttgcttggaaacaacgctggaccggagccattgagaacccatattgtaatgccttcttctcggagccgcctttagctctagactacaaggttttttgatcaagtggggaggtgtatcaaacaaccgttcgcaaaaccgctctgaatgacccaaaacaccacaaatgaaacaaaaagttgaaagatcctcatatttgaatcggaccacgcagaaagcaccactcttcttctccaacctcatactctgttccaatggtttatccactcgaattttgactctgatcctgaggtaatccctccaaacaccagaaaaattattagggtcagatttaacatattgtccaatgtaattgccaacgtccctagccacacgttcggacataaacccagaagtcatttcgtgtaattgaatccaatactcctggcagtttaactgaatggatctcgggttttctcctggtttcactctttcaaagatcaatggggcacgatcaaaggtccaaagactgccctctatgacacgttcgatatcaacttcgtggtaaaattgaaaaaggaagtgatttggatgaagttctttgacatacatccctctgcctggttgccacaaagtagccatcttgtgttgcattgcttgaaaatcgactatctgttttgttaggaatctgcccactatacaccaccggtcatcaatctctgacagatcatcatcctcatcgtcataaaccagcctacccatctcctcctcttccatcatgtcattccccagactctcctccatatcgtcgaaaaataatagagccaaagacaaaaaccaaatctagtaacagagcataaaagaacaagaccaaccaaacacacttacaggaccaatctcactttcagattgtaccaatgtcagaacaaaccatgtcaaaagacaagacccccaattggtataatctaatttaatttaatttgtaaagtataaatatttatacttatatagattagattaaattaaaaaaatttaaaatttgtacttgtcactctaaaaaaactattatttttagtgacaattttttagtcacaccataattttttagtgactaaatgtgacttt

SEQ ID NO: 379826 - DNA, 3931 bp, Cannabis indica
aataataataatatataataagaaagaagtttctgtaataataagtggagaataagttagaaaataaaataaacggaaaagggatttagttgtttttattgttttgtatttattaaggtccacacgcaaaagactctttactttatgaatatcaagagaaaagaagagaagagggttcagttgagttaattaagagaagaagagaatgaaacatattatacaacatgagcattgattagccaccagtggtacctagcactttttcgacatgtcgcgttgcgattgactataacgatacttcctaaaagctattatattaaattatatgagacccgatacttagttagaccaataacaatattaacacataagaaagtactaagcaccactggtgccctttagccctttagtatttctctatacaacatcatcaagtccaactgcttccaccgcaaacttgaattcaacctctttattattattatttctatttaattttccattaatgactgcaaaattcatgacccaaaaactaacttcattattattactttttatattattaggaagaatatatattcttattgaaagataattatcttaaaatataaatccaaaaaactcaagtaattctgaccactaaattattcttgtaaaataaaataaaaaattgaatcataattcgttagatctaaacctcttttctgttgacgagtgttgtaataatttgtttaattaataagattcagaaatataaaataaaattgttaataataataataataatatataatataatattaatagggcagcaatgcaaatggtcaatggcaactttggacttaaaattgaggagagttttctcacttcatgtgcccaacgagctgaccggctcccacccaccttgtcccactcaaaaaatctatctaattatcttttctaatttatactctttttattcaccaatttttttttgttgaggtaaattaaattttattattgtgtaataattattaggtaatgtaattacttatcatagtaattactattgtgaaaattctaacatgcaaataaatgtatattacaagttatagattcatgagagtgattgatatcgggttaattaccaaataattaaattctcaattttatttagtgataataataagaaaaaaaaggtttttaaattctacttgagaaagaaaaaaaaaattattaaagtaaatttaacaataattaaatgttagggtaattgattttgattgaatctagctactttatatgctttaatataatttaattcccaaatttcaatttcatgtgatagtaaatttactaaagaaatttatattcaggttaggacatataaatctcaacctatatgtaaattttatattctcgtacaagtttaacaaatacgagacattaagcataaaaatcttaaatgctacacaaattatataggtaccctcatcttatatcgaaatttgtatctattttactatagcataattaatcaatacttactttctaaattttgtattcaaatcataaaacagttaattagtgatcagacaattaaaagagattaagtacgaatgaaatatgtacacgtagaaagttgggaaaaaataaaattacgttaattaaactaaaataaaatatcaaacaatctccattaacaacactaattagctactcatagtcattatgaacagttgattaagaataattaaaaacataaaataaagatagaaaaaagaaactctttgaaaatcaatgggtgtagccttccaaagtcgttttctgcctctattatcgtcctccttaaattcttaatcaaaaagcctcatttttccttcgaaattagggtttaaaaatatcctactaaccctttaaaaataggcgggccgcgacatggccctttcagtgctgcgactcaagaacttggtttttgggcagtaagcttcttggtgcgacgaccgataatattttttggccataaatctttcaatattgcttgcaattggacgattcaaaatgttttagaaagcaaaaagagatatttagaacttttattaacaacatttttcctaaaagtaaacgaatcatagtaaaaaaatgtcttaaatattcaaacttgatttttgatcataacggagcgtgttgagcatccaaaacttaattagaatatttcacaccattatatcttaaaactccaaatttcatgataaattcatcatattcatctaatttaacatgcttcttctaattttcaatacattttataatttaagcctgaaataaatataaaataagcgtaatttttcacaaaatgaatataattaactgaaacacacctttaaaatacttcacaaaatgcacctaaaactagcctatcaattatattttattttaaaatgcaaagtgtgtttggatgtcaagtagtaattgtatatgaattcttattttcacgtttagttagtaattgcacagtggtaatacccaattctcatggggtcatgagaatttgagagtgtaagtgagagtcttcaattaccttcaattacatggttactgtgtaattatctgcctgaacaaacacgtcaaatcttatatttacttataattacactcaattccaattacttaatgactttccaaacgtaccttatatatctagagaattttggattctgttagagactcctacattgttaatatttagaaaaataatatcatatatataagatacacgaattgcatttttaattgaaaccttatgcgtcttaccatgtaatctcattattttattctacatttctccacttacaaaattctaacaaattctttcatcagaaaattactactaatgtatgcataaaatgttagaatattttctacatacattaatgaatcaattaatcaacttaattaatttataaagcaaagtccattattggataattattgacaaaaatctcctaatcgatggtcactatttaattagttatttagattttatattatacaattagtgatctccaaactcacggttcataattacaaataattaatataccaacttatagtagtattagacactgtaattaataaaaagtcttacattattgatatatacaaaaataataaatatataagatttatgaactactcttctcgataataaaactccgtgcatcttacttacaattctaatatagtaagagaaatgctaaaacacccttctacgtgttaatatcgctattggtttaatttagtatcaggtcccatataatttaatataatagcttttaaggaatatcgttagtcaatcataaagcgacacatcttaagaatgctagacaccactgataccaataacaatatccatataataatagcatttagcatttatcaacattaatagaaaattgttgggagtcattctcaataaatatgggcaatgttgttgttattgttttgggctgggtaggcacctcattgggtggtggtagttagagaattagaaaggtagcactgtcaagtgtctcaaaggaggcaacaccaatccacaccaataaggctcgatcatcatcaatcataatagtcatactctcttcttattaatttccaaaaacaaattctaactcatttagctaaactcaatttacacgtgtcatactgttaaaggctacaaaatcattactttcatgtagtgtggaccactccacactagtgtttaattttttcacatcaactaaaacttcttattctaacaatttcttcttttttctcttcaaaaaaagaattacccatatatcatttctttcatttttatagttttagttattttaataatttctacgtgaattgctatataaatttaaattgtaatttaagttattttattagttgttatgtaaatttt

SEQ ID NO: 379827 - DNA, 1735 bp, Cannabis indica
ttatgataatgatgagtacacatgaaaattttctctttttatttttcaaataatttaatcattaagcataatttagtagaatttatgatattttcaattattaaaatatgttgtaccaagttaacatgcaagagaaatgtcattaagtgtagttaaacatcatgaagacttttattgtagaaaaatgttttaaaaaaaaacagtgtattctacattaatttctttttatattaaatctaccctatagaataataggggagtggtagaaaagtttacttagcacttcttttattttattttattatattatgactagtggactacacattattataagcaaaatatattattcttcttcttcttattattattattataattattattattataattgtacaaggcaatgtataccattcttaatgacaattacactacatgcaatgtttataggaacaagacaaatgtggaaatcctcaatcgaattggtgagccaataaatatgaatatgttacctctaaataataaatgacaaaataaaataattaaccacattttgtaaataataaatcaattaattaaacacaaaagaaaaaaaatggatatttagctctactagggtttccctccaaacattgtgtagttgctgcctcttttccctccgactttggcttggtgcatattgaagtttttgatacggtatgagtagtacaactcaacaagatacgaaaaaatatggacttaggcacgatattacaaattggcacagcatgacataaaaaataagcttaagcacgacataacatcataagctcgaaggcacaagactaaacacaaatagactaacttgaaagtacaaaaattcctataatttgatgttgtttagtaattcatagaacaaacaaaatcagattataacagttttaactaacaattgttaagttagttacatgctgcaacatcgattcagtaatattggctgaaatgctgtaacattatgcttagttagttaagtgcaatctaagtctttctttacctatttaaatactttagtcatgcttgtaatgtaacatacaattcatattgaattgagagtgggtaagatccagtgggagacatatatagaaagagagaaataatttattttctagtttatgttattgtttgattcagccattccaatagttcttgttttattaatgcaaaattctattttccttttttaaaagagaaataaataaccataatttataataaatgaaatttcttatatagtcacatttcataataaattttataaaatattttttcagggagtttgcacctgactatattatctctcatttatattatttggtatttagagaaaggtttgatgaatggtggggaaattagttggtaaaattactataatatatattcttttcaatattaatattttttttattttgtaaaggataattttgatattatttagcatattttaaaaatttattacaaaaattattatgaaaaacaatttgagaaaatatattttaatatataatttaaacgtggaagttgactaaaagattatagcataaaggattgtaattatcactcttattttctctaagagaattgctaaaaggcaccatacccttttcagtgttataccgctattagtgtaattaattatcgtgtaccatataatttaaaaaaataattttaaaaatattactaatcaattataaag

SEQ ID NO: 379828 - DNA, 3974 bp, Cannabis indica
tttttttttttttgtaaatgggttctatgaaggcttgtggagagtgttttatatctttattcccaacatgtctttaatctttccgattactgataagctaacccatttttttccccttctttatttcctataatgatctcatgagcaatacttttacatgaaagaaaaatgtacatcattaactcagaaccttcacaagagcttcatacctcaaatttcttcatttcttccacaatcttgctagtcttcttgtgttcccattcgtttatagcagcttcttttctggccaacctgccaggcattgctagataagaaagttgaatcccctttttataatagaggaggataaacccctttttatacatgaatgaaacacaatgtgttctcagttctcacttgtcaataagctcggtttctttagtttttttccatgcttctacctcagcctcaagctcctgcttcttgacttcatctaagaacgtactgtaaggcttcggccgagtcatcaagttatgctgtaaataatccgggctttcaccattggacactccgaagttccctaaactgcaagcttgactactaatctcctcagctactgaattctcttcaattgctgaaacaaatgtgttggattgtcaaggaattagactcggatgctatttcaattatgttggtattaatatactctttttttgggatgatttaaaagtggaaaagggaaagagacctagtggatacttgtcttgaggatttgggtcgttgaaacggccattcttcccactatccgaatcaacgtaatagctctgagggttgttaaatttacagcattttcgattaccatatgcataaaaataaaacgaaaacaatcaagttggatatactccaatcgtggtaacaaatgtttttttttttcatatttaaaaagaaagaaaacagtgtccaagcgaaaaaggttgggcaatcttgaaagatcttggccaagtaaccagagaaagtattattaggtgttgaattgtctactaatatgacgagtaataacaaagcttatccagtaacacaaattcaaactctgagatcataggagattcttgaaaaagaacctggtttcttggagttgctgactcagtggagagtcgagagaagaatgtattgagcttagaagaagatgttttagagcttagtggactagtgcaactgctgcaaatgggtgatggggattctggttgatcttccttgggagaattcaacgaccaatctgagcttttacctatggtccgcctggaatttgtgaattttcttggcaaggaaggagtgccattgtcacataagttggaagtaaggggtgcatcaatgtggggttcggtcctttgggttggttggatgctcgttcgagtgcttagtcttctgtttatcatttttgttggtgttctggaatgtgtttgtttaactaactcttcacgtcaaatctttcttggctgatatatgactgagagaaactatcgagtaattctttcgattattggacactcacggtatactcgatggtttttggtcatgttctattacgctcaaagttgcaaccgttgcccatcataaacagcgtacgcgggattgtgggaaggagctgggaggtttatataaaaactgcattctttccacccacgtcaatctcactcatgtttttttagcattgagaatttctttccaattgtaaattattatcccaaatttaatatgcaaactaaaagcttcggatcttggggaagaaaagtcaaccaaaaaaataaactccagcaataattgaattgatcataatactattgttccaaacatcatcaacttttccatttttgaaaagtccatttgctacataaggcatcatggaagcaaataaagttggttcatctatttctacaattggcaattcatgtatgtcgtaaactacaatgaaatcattagattgacacatgctctattgtgcttcatcaaatgtttttaaaccttaatttccataacaattcaagtattcaaccaatttttgtatgtgagcggccaaattctacgtttgacaaactaaatttgcatacgaattaagccatactaagatcaaaatctatctttcatttgaaaacaaatgccactactgttccaacctttcacattctaaatgaacaaattaacaaaaaggaaaaagtaaacgcaatgtaatgagcaactggtctattttttttttaactcaaatgaaatccagaacatgaacccttagatctctgttgttacattcttcttctaggtttctctgcgaacaaagtagagcttgcccataacatgaagaattgcaacaaaagctatgaaaccaatgctcataatgagaacgacattgggtgagatcttgagtccaggagcatcatctgtgtaaaactggagcatggtcccagcagcaccgccagaagccccactgcttgtcgtcctccttcggcgcatgcttgcagtggctgcagcacttcctctttgaggggctcctcctccacccaaaaccattctgcttttttctgaaacaatcaaacaaacagttataacttccaatggtcacaccatttagcaaactcttaacaaattattatccccccatgaagaacggaaacctgaaaccccatgagacctaaccatggacactcattgttgagatgatcacactttcaataataaagtgcaacatgactatattaaatgcatattaaggcgattgcaagtgccacttctccagcaaataatcggaataatcccaattattcctttcaatgccatttaaaggatacaaatagcataaccagctgagaaaacctttggtgacaaacatttagatcttagtataggttcaacaatgattctaatacaaatcccattactagtttctcagctacacgtgaaattaatagacaaatatcgaagaattcgccttcattttaaataaacaaataaattaaaaaaaattaagggcaaaactaaaaacaatcaactgtagataatgatgaatacagaggtatatagatctagcatatgcaaagagtaaattgtatcaatcatcaacacttagatccttgagaggacgtaaagttttcaatttaatgccatcatttgccaaaagaagagataaactcatgaaaatcaggaattttatacagcagcaggaaaaaaacctataaaatggcctcaaacaaaattccccaaatccatccaataaactaggtaaaactccatactagccccttcaaaaattaaatggttaacacagagaattaatattgacatgatttagagaaccaaaaaatatgacaatattgcacagggggaaagcagatccgatagtcagatccaaagttattattaaacgaaatccccatattcaagattgcatggcctagatctacaagattaaggaagcagaaagagaaaatcaaaactgagaaagataaaaaagtgcgtaaggaactcgcctgagtcgactcggtgttaagaagaaagatgtggaagatcggaatgtgaaagcgtgaattataagaatgaatttgctccgacttggtattcttatacacagatgggagtttatttttctttcttattcccgtgtggcctccctcccaacaattccacgccttttctaccaataatatcatgccacgtcagaaactcggcttggtcatcaaaggcacttgtttataccattttgcaattagagcaaaaatataaaaatatgtaaaaatattatattttatttttaatttcatccacatctttcaactttaattgtggtagtcaaatttcacttttatggcacgtttactatatacactaattataatcggaataaattaatggagaaatataacgagataaataaaaaataatcggaatcaatatttgtaatatgttgtttactaaatttttttagaaatagaatagttgtgatttat

SEQ ID NO: 379829 - DNA, 1358 bp, Cannabis indica
aatcacatgcgaaatacataacatgatatatcaaatgtatgccattaatttatatttatgaaactacacagtgtagctccacaaaaatgggtaaaccaatacaccaatacaggaatagttataattatttatatacataatgatgcttattgtacgtacgtatttatttaagacaacactaaaaatagcattttaattttgttttggacattttaaattattttaaatttcttaaaaaaatttcaagatatattaaatagtactacaatatttagtgtgatataaaacaaatgaatatgatccattttaagggatgcacggatcaaattttggaatttaaactacgtatatatcattttgaaaatgaaagagcaattaataagaatattataatttattattattaatttcttactgtggtgtggaagaagcgcgtggagacaattaaggcgccagtgataagaaagaagatgaaaaggaagagagcattataagatttgggcgatgatgatcttaaccaaaaccttctcgttctctcaataaccatttcctttccttttttctcttcttttgtttcctcacacaatttcaccaactactatgacaatacaattcagttaatcgtaggagtaggacccacaccattaagttggattggggatatattcctcaactcataagaaataacgtttattatatattcaagtttagtaattttttaaaggaggtttaatataacttccaatatgcaacaaaacaaataccttttccttctcaaaaaaatcattgagaataccaccaatctttcttacttttatttttttcaaagactaatcttctaaaaactttctaaatcacaatccttattattattattattattattattattattattattattattagcccaacttctttttctttttttggaatataatagccaaacttatttacaatgttctttctattaccgccggccaatattaccatcactacaactatgaagcattttattttattttattttcttctttatgaaaatttaatacgtgtgttgaccgttgaagaagtgcctgcttatttggatatatttttgctaaaattaattaaatagtttgtttattagcggagtgaaaacagatgacaaagaaatattgtcatgtcaaaagaataaataacatttttcttaaaagttagatctcatggttgaaatcagaataacactaatattttttttttaacacagacttagacacattatggacattaaaattacaagttttattaatagggaaatttgattttttatgcttacatttaagttaaaaaaaatttctaaacaaataataactaat

SEQ ID NO: 379830 - DNA, 4547 bp, Cannabis indica
atagaaaatttaccagggaaagaaaacaatttgtcacagaaaacaacatatcttagaatgtactgtacataccccgaaaacaacatgcttgttatccagccaatcgcacttagcacaagtaatgaagaactgtgttcaacaatggaatgagaaaaagtttagtcaatactcggtagttgatacaatttgaatatttaacaaattcgaaaaacaaaaactccttgaaaattttgatactcttcattccactatggaatttattttataatgaaaaggacaaggggaagaatgcagatcataatgtatgccatttactttatataaacaaggaaattttagtgatgttagtcgtaagaagaaataaataattagtactaaagaactgaaaagttgaatatgaatactaggccatttgaaaacacacacaaagtgccaatcacttaatatatgattagtaaatgcatttgagagtagtggctttgtgggtatccttatgtatgtctgttcgaatgttaaaagtttaagagattacctgacatccattggtatttggcccactgtttgcctgaaagaggaggaaaatgaaaaacttgccatcagtctacaaaatcaaatcttttttctcataaaacttgagaaagaaaggatttcaccaaagaaactaattgataactaaataatattagcagtgcatattcagtatcaccattagcatgttgacgagaaaaatacataagcaaagaggagaaatggcgagaaaaattccaaacacgatttggaagctcttttggaggcacactgcaaattttagtaaaaactccaccagaattgcatcgcttctcaagggttggagaacaagatatacccaaaaccccaaggatgcctatgtgaattacacacagatgaaatttcagtgggaagagccatcataaagagagagggactttaaatttgaattctgtcaaacctaaagagggctccaaccccaaggaatattacaatgagaaacttgaaggaaccatactgtgttggttgaaactttacagctatatcagtataccaaggaactacacgatgttagctgaaacttcacaactataccagtataccactcaagggaaaaaaaaattcactagaaattctgtgacttatcttatgtaaagttggtttccttaaggatgtgtttggaatgctagatagaagagggctgagattatataattttccaatgtgttttttatcatatattcatataatccacctggtatgaaataatactattccagtaagaactttggactatctttatcctaatcatttcaagaggcacttctcataatttccctacatttggaagaccgtaatcccttcagaggtcaaagttttcagctggctactctccttgggctctttggctagaaaaaaacaataggatctttagggtgtagaatttgagggattaatcaaattatgggtagctgtttgtatctataagactagggattttaatgtgtttctttttactaagaaattggaacctgtgatattcatcaagatgatctcttatcatcttccattgtaggagatcataccttatcatcaccatatgttattctttcccccatcaataaaaaatgcggtatttaatcaaaaagaggaatttctgtttctaaatgagcaaactattcataccctattcttttttcttatttatttcactgtaaaaagacaagcaactcactcagtcatttgcatttgtagctatcttattttcatgtgatgcaaagttatcctaagcaagcatcaaacaacaatatctgattggataatttgaatgaacaactcacaataataagataaactttataaaataaattagctggaaactagaattgagaatgtcttcgagttggaactttaaagaaaaaaaaattaatatgagtgatcagaaacaacataacattagtgtgatagaagtggaagcataccattgataagaggccaggaccagtgtgtttagcagtgaaattttcatcgtcaaacttatgaccatagacagaaacacaaccactgccatcaccctgcaaagccaaaagaatcttccaaatcaaaatctgaatagagttgttgaggaacttaaagaagagagaggatgactcaagaggggtaggtctgatgtttgagtccccggtacctacgtgccacatagcaattactatagagagagagagagaaagtgacaggtaaccttgagaaaatcaccagcttgaatcatgaaatctttaatgaccctgtgaaactgagagcctttatagccaacagggagcccagcttttctgtactccccagtacagaactgcctgaagttttcggcagttttgggtgcaatgtcagcgaacagctccattttgatgcgcccggcagggatggtgccgattgtaatgtcaaagaaaacgatcggattctttgggtttggaggtcgcacatgccactccacaccaggagccgccattataaactgatcaaaaataaggttttcaaatttaaaaacatttgattacatctaggcccaaatggacatacgtataacatataaaatttcatccaaattgagcaaacttcaaaatccttggatttttcaatgtataaacagacagtttaaattaataaactacttatgaaaaaccaaactattagacagcaaaaatttgaattattactcctggcaactcaatagtttcaaaatcaaatgaatgcctaaaaaggaaagaaaaatagaacagttcaagttcaaccacacaaatctccaactcttgaaaactccactttcaattatgtatcacttaaaatgttcgtggttgatttgatttaagcacctacagacagaaattggatcatccatatctttaacttatatttgctagcacaaacctcctatggaacttaaataattaagcaatttccttgagaaaagatgtaaaatacacgtatagaatgagcattaaagatgaacaaaaattgaattgaaagaacgggaattgcttgagtagtgtacctcaaattagtagaaggagatttacaaactttgtcgtgatttatctgtggaatcaaaagagaaaagttgttagttacctaacttccaaagactgaagcaacaaaatcagagagtcactgaagaacgtaaaatttcataggaaaagcttcaaaggttgagattttgcataaagattgaaaccctaaccaaagcacatcgattgataccttcgttaggtgggtgatggcgccagtccacagtagggaagggctgcgtgtcgacggagatggtcagggcggcaaatggtgaggatttttagggttaaaatatgaaatttgctttattattattattattatattaactcaaatataatttattctaaaaaaaaaacccaaatataatttaatttaagaattataataaaaagtatattagtggcaaaattatctaaattttatgattagtgacacttaatcacataaattaacctacttttattagctatttacttatttcgttcaaaaaactttgttaagtgttacggtaagtatgccatagtatacacatgtgtaaacgtgacaaatttttagtaaaggatattgaaataaaaattacctgaattctacataaatcgattttttggtagtaaaactctataaacctcacttctgttagctatttacaccttccgtctaaaagactctattaagtgcaatgatggacatgtcacagtgtgcacataacaaatttttagtagtccacataattttaattgattaaatatttttaaaaaaatgatttaaaaactattaaaataatttaaaatatatttttttttctcttttcctcttcttctctctcttttatattttttttccctgtaatcctaatttccactcgcactccctatctttttcgttcaccttctcgcacaactccgacaagtcatctccaaccaccttcaacataaacgaaccccaaaactgacttcctgacctcacaaacccaaccttctctaagcctcgagacccaacccttcgttggagtttctctttctcgcctcgacctcaccggatctaattctccctctcccacaaatcttcaccgatattaccacagttggaggggtttgatgattcgcccttaggttcgtcatggtctagtgcgttcgtcgcaaaagaagaagaatgaacatgggaagaggaaatctgatagttccagtcgcagagcacttaacatatttttttgaatggaatgggtaaatagctatcagaagtgaagtttgatgggttttaccactaaaaaaccaatctatgtggttaagtgtcactaatcatagagttcaagtagtttgtcgtcaatatccaccactaaaattttgtcacgtgtacacttgtgtacattgtaatatgtctaacatggcacttagcagatttttttgaacagaaagggtaaatagctaacagaggtaaagtctgaaaaattttaccaccaaaaaatcagtttatgt

SEQ ID NO: 379831 - DNA, 4550 bp, Cannabis indica
aaacaaaggctaaaagccagctaggggcagctcccctacagagaaaactcaagtggtcacagaagacctagagcacttaggcaattctcattcctaggccaaaataaaaccttacaaaaagaaatgttcttcattaagagcatgatggaagcaaaaaaataagcatatcgacaatgatcaagctaaaatgtcttgagttctagactttgatcagagtagacagatcgagaagataaccaaataaaaccaaccctagacacaattgttttcaaagctaataaaaaggcattcaatttagtcttgagagcatagttggctttgaaagccttaaactccacacatatgatttggtgatgcaagggaaaaatcataccagccccaacgtcatcttttttgaaagagccatcaataagagccaccatgacatcagccaaattagggatctccattgcctagattttcttgagcgaagcaccttgatacaaacttgatcagacccatctagaggagggaaagaggcattggagttcttcaggaaagccttacccattttcagtagaagatcatggtggggagagaatcttcgaagagcagagccattcagaaaaatcaagaaggagacagaggacacaccaaacgtcaccaactctataaataatcctaaaaaccattggctgaatcaacaactcttaggatgctctattcgatacgatcatacgccttgctcaaatcaattttgatagccatcacacaacccctccctatctttttcttcattacaataacaacctcctgactaagcatccatcattccacaatctacttgcctggaacaaaggtagttggaatagactgattaatctttacatgatactataaagtcgagtaacattgatcttagccaacaccttgtataaaaaatttgcagaggctaatcggcctaaagtggtcaaaacaagaagcactagatcttttgggaattaggaaaatgaaagtggtttaaagagcgaaaaaaatttctcacaggaaaggtctcctagacaaaactaaccacactttgcccaacaatctgtcaattctttcggtaaaagaggccattcataccatccagacctagaaagctcaaaggatttaaagcctaagcagtacgtctaatctcttctccaaaatggatttgcatcgagcattaataactcttaggatgctgtattcaatacgataacacgccttgctcaaattagttttgatagccataacactaccctccctttctttctcttcattacaataacaacctccagaccaagtatcgagcattccacaatccacttgcctggaacaaaggtagattggaatagaataataaatctttccataatactatgaagtcgagtagcattgatcttagccaacaccttgtataaaaaatttcaaaggctaatcggcctgaagtggttaaaacaagaagcactagatcttttgggaattaggaaaatgaaagtgtggtttaaagagaaaaaaaaaatttctccaaagaaaggtctcctggacaaaactaaccacactttgcccaacaatctactaattctttcggtaaaagaggcgattcataccatccagacctggaaagctcaaaggatttaaagcataaacagtacgtctaatctctgcccccaaatggatttgcataaaagacatgttctcctcattagaatatttttcctggaaaaggtcatgaaattaactagggagagccagattcaaagaggagaaaagctcaaagaagttagaaataaagtaatccctaaattcctttctacaccgaagcgacacatcgcttgaaatggataatactccaaatatgttttcttttcttacgaacaattgtagaatcaagaaaaaaaattagtgtacgatatctcaaattcatccaattatctctagaattttagcaccagacattctaatttttgatctcttcgtgctcctttctaaagatacaagaagagcctcctcctttcgaaaaacctttctagtccataagataagagcctcgtgagtatactgtagagaatttgaaagagtgaaactctagaaaccttcagcatgcctattcaaagctttagaaattacatgaatatagtatggatgattagcccacacattgaaaatttaaaaggggtgccccttcacaaagagtcaagatgagtgtccagaacaattgggccatgaatagagcccaaatagggagattgagaacccctaacataggaaactcaataagctaagaggtagagcacacgacacaattaattttctccatgacaagatgatcagagccacgcttattttgccaagtgaaagaaccccctatgctttgaacatctactccaccagttagcataaggaacattttaaaatgtttacataggtcgttactagtgctgccatacttgtcttcctcccttaaaacattattcaaatccttggtaatgacccaaggattggtacatttattaattcaggattgaagagagttctaaaaagatttcttaagggaggcatagggagtacatattgactctaaaatctgaactagacttataagcgacacccattcactagattggcaagaatgaaaaagtagttaagtaattataagagagacacaacaaatttataataattcactccctatattgcaatagtgttgactaagaatttggtcaactgatatcagagatttattaattgttgataatcaccatgtataaataataataatgaataataaaagtgcaaagggatttatagaagttaaaatcccttgatgaatgggtaatgatctgctctctttttagttgtattaactcttgagataataccatgcatagtataggctaagactttgtaatttctagctatggctcttttaaatattataattgtgagaatgtatgttatagatggaagatatgagaaaaacttatcaagaacttagaagaaaagagagacttagaggcttaagctcttaggtgcgtgtgaggggacttgtggagaccctttagtgtgtgtagaatgacttagcccttagagagtgatctaattccctttatatagtgtaggacttaaaaaatatcctaattcaaataggtaaagatatcccttgaaaataggaatattaacatcatttttatcttatatttaagttacaaaaaggataattaaatccctagaatataggactaatatcttaagggaatatccctatcttcatggataattggacctgtcccataacttgttcagccagttaagagctgtttgcatgttttggccagccaaacttactgaaggttgtctagtgtatggaagctggcactcctgggcgactagctatacgtttggccagggctttgttggtaggtatatggatctgtatgcgcttgtgtccactatgtaaccatgggatcttccaggttgaaggctgcaggcactaacctggcaggttgaaggctgtaggcactaacctagcagcctgaaggatgtaggcactaacctagaaggttggcaggttgtaggcattatcctggtaggtagttgtcaggctacaagcactaatctggcaggttagtgacgatctattctctacgtgtcttctacttttgactatgtggacattccatgccaggtggacaaaatttgggaaaaaatttgcccctaagaccctatttggacgtctatacggatagggacttttcaactcttgtcttgactatcagagcctttactaagcagccttgtttggccaagtattggacttttcagatgacacacttttaaactttttatcttctgtctcccatgtatgtttttaactttcctcatcttctcttctttgacatttttctctttctttgaatctgtcattgatgagtttcatgctttttaaagcttttagaaacttttttattcttagtttagagtagtctttttacattataatccacttgataactttaggatgcataatgtatgactttttgataagcaagatcaagtcttggactggtaccttgagtctgttagagaccctgtccaactcttagatcttgtttaggaactctatccagtacttagatcatgtatgggaattctttttggtacttagatcttgtataggaaccctgtgtaggacttagatccttcttaggaactctgtctaggacttagatcctatttaagaactttgtccaagacttagatcctgcctaggaactttgtctaggacttagatcctgcctaggaacactgtccacgacttagatcctgcttgagaactctgtccaggacttagatctttcctaggaactctatcaaggatgtagatcctgcctaggaacactgtccaggccttagatcctaccatggaactctttacaggacttagatccattgtatacccatgtttgtgttggaaattattttaccaggatcttagatttactcacaagtatgttgattaacaccctaaatatgaactttcaaaa

SEQ ID NO: 379832 - DNA, 1519 bp, Cannabis indica
aataaggctttttgtagtagtgccaatattatttttcttcttacagtgagtagcacattggtgaaagtaggatgaatttttatcacccaacttgagccaaaaattctttgcacgagacgactaatacttttcatctttatacaaaagaacatccaactccttttttgtcttgtcataagcaggcctgaaatcaagattagaataaaaaacctctacctggttcatcttaatctaaattgcttcacatgttcatttaaacatcttcccattccactcattcaacgcacccgtaacaccacgaatttttctttgaacacctgaaatatagatggaaaccaaagcctcccaataaataacaacaatgccacgacactaagatacatctgcccaagccatcttaaaatgaaaatgacttttctgtcttggccttcttcgattatcacaagcacaaaggatataagtcatatgatctatggtctgaatcccaaagcttcaaatgagagacataagaattaggaaacatagaatgctaactactgttacaatgcatacaatcatgtcgttcttgtaagaatgaaccatcattgtgcttattacaccaagtgaaacgtgcaccctcaaatcccatatcatcaagatcacatttagaaaatagcattacgaaacccatccataagactttgagcacacaaagaaccccaacacttctcatgagaaaagagagtctcattaaaattaccaccacctaaccaagggcccgaatagccatcgaccaaacattcaaaaagtcaccaaaactgttgtcgtaagcttgcatctggttgcccataaaggccagtataccgccaccaaaaatcaaaatgagaacaaaccagaacatcaatatggctacgagaataccccttaagaatcacatccacattactactccaaaaaagacacaacccaccactcatccccactttctctaccaccaacttgccaacaaaacccagtcgaacatgacttcaagtattgagtgagtcacaaaagtctcagacaagaaaatattatatggcaagaactccttgataagggaatggagtatttgaacgttcggttatcccaagaccttggacgttctaagccaagcaattcataatgctcgctggctctaatccacagggtccaccaaatcagaagtaaccacaacatcttttccagccacaacatgtaaaagagaatacattaccacacttattggaatgtcacacctaccatcaaaatcaacaacatctacccaaacctcatgtaaattagtaggagccaaaataagcgataaacaatcatctttcaagtcacgcttaataacctttttaggactcttagactaaactttgagcactccatatttatcttgaaaagaaacttctttgtaattatttttgattgcctatgaagaaatggatgtaaccctatgcatgacatgcatgagagtcacgtgagaagaacccacaccatccatcaccacgtcagacct

SEQ ID NO: 379833 - DNA, 4739 bp, Cannabis indica
cataaatgcctaaaaatgaatgaaaaattatatttttacatatctattattaattttttttttatattttttacgacttcttatttttattttatttttttacaaaaattacagagagtatttttcgacattgatttttttcaaatattaggaccagaccctctcataatttaagaaaagagaagccacatctaaaagccataaaaagctcacaaaactaattgaattgtgatcataaaaatgaattttgattctttttatattgaaatatgtgtgatagcctgaatataataactaagccttatagtgatcttgcattcatattaagctataatatcaaataagttagcttagtttaattttggttttgcaaatttggaagataacaaagaagacattgttagcaagaagatataaagacatatacatacatatattcaactttatcatgtaaaagtgtgccttattgaatcactagattaaggatttaagattcatttggtgcaaccaattctgatgtagaggaagggccaatctcagtagtagaagaagaataaaaacaatttcgaggttctcccgaaattggttctctcaagtggtccatgtattctgataaggcctggaatcttgagcgatcgccatgaacacttggatggaagctcaaagcacgaacaagagtccggccttcaagcatgcttaccacagaagatatggtaggccgaagcgctggtgaagggttagtacatagaagagctacttcaatgattcttatggcctcttttttgttaaactcagatcctagctttggatccaccaaccctataagatttcccttttgttgtgaaacaagagcctgtgatattcaccaaacacatttgaagtttttagcttgatgtttgttaagaacaataggatgatcataatggtttaacttacccaatctagaaggcaaacatactcttcatatgagttgaatttcgtgttcataataccagccacaagttccaatgctacaattccaaagctataaacatctgctttaggagttaaataaccccataagacatactctggtgccatgtatcctctgcaaaataatatgagacttgtggtttaatctatcaagtctagtaaaagaatcgtctcatttaactatcgggtaaatagtggcataagtactcaatgttcgtaaaattgtaattttcctctagtttcttcggtacagactctgttattgttttaaactgggcatatataagatctagattctaaatcattgagtctggagggaaacatgtagtatctgttacttccaaattttcttttaataaattcaaaacgaagcatgtattgacgaaattacagttttacaaacattaagtatttatgccgctatttaccctttaagctattatgattgcattcgttaagctatcttatatgatgagagtccaacaagaataaggggagagcataagagttcctcacatggttccagcaactctagtgcttatatgggtgttctcttcttcattcagtttagcaagaccgaaatctgaaatcttcgggttaagatctttatcaagaagaatatttgttgctttgatgtctctatgaacaattttcagtggtgattcctcttgcaggaaagctagaccccttgcaatgccaagacaaatattgtgtcttgttgaccagtctaatttcagtttactttctcctaaccatatttttcaaggaaagacaatgaaaattttagcaaaatataacttgagaaatgctagtgaagtattaattaatgagttaagctcaccaaataatgaatgtgcaaggctgttgttctccatgtattcgtataccaacaacaaatgctttccttcggcacaacagccgtgtaatttaacaagattcgggtgttgtaaagccgaaatcatgcctatttcattcacaaattcttgatttccttgcttagattttgatgataattgtttaactgcaataatagtaccatctaataacacaccctgcaataaaaacaacatttgtgtcatattaagcatcttgagtatgtttttacctttgaagactagaggcctattatatcaagtttaatgtcttgacaaaattaaagcttggttggagtggagaaaccgtgaagcgaatgttcatagattgcttaggtggttacgccgaggccatggtctttttcatttttgcaagagtattttcgagggcccgaaatgtggccctatgggatctcaaagtcccccgagttgagtgtataatgatccaagttaagaaaataggtccataccttgtatactgatccaaatcctccttccccaatcttgttagcagcatcaaagttattagtggctgctttaatttgatcaaatgtaaggataccagttttcaagtccaatcctttgagaactgtcaaacaccaatggagattgcttattcaccaacaactcttgtgcattgaaaacaaaaaggtattaacagtacacaacacctaccttgctctcttgatggcttgcctcttaagtaacctttccaccaaagaattcctaaggccatcatcaacacaaggaagaatgaagaaacaatgccgacgacaatgagtttcttggttttgctttcatcaggaggtttgaaatctgcaaatatcaaccaaacatgtataaaaatagtaatggtgattatcaaaggatagaggtgagtttctcagttgattaactatataacatggcaataaaaagtactaaccagacttcattgaaatagccgaaacaagagaaccgtaaattcctctctttggaacatttgttgtccctttcccaccccattggaaacggatttctaaaattttgttcacaaccaatgctttaaagatcttaataacttctttgttaactcctttcgcttccttttcgatattgaaatccttcaacacccttgttccctgcaatgaaatttttatataaacaaaaatgtaggaacaaaaacactagactattatgcttagcatgtaaagcaacaatgaaaaagtatgtaaaatgtcaaactttcttctaattaggagtgacaattcgtgttcgtattgtttagaggcttaggtattacaagcaaatgccaaatccaaacccgaccaatttataaattgtgtcaaaaactaaaatccaaactcaacttgtttataaacgggttgacttgacccgattagcttaattcaattatataaagaatcatgcttaattgtagttaacttatcaactcataaacaagttttaacatgtttacaatcttgttatcatacatttattgacaatttgacatgtttatgtcctatttaactgaaagatataatttacatgtaataaatataataaattcaagagtgcatactcttacttacataggtcactattgtgtcttttcaggttaagcatgtcaacccgaaaatgatccctttaaaaaacaggttagccgtgtcaacccaaaaatcccccaaactcatttaaggcaaacccaaatccatttattttgtacgggtttcgagacgtgttatcgtgtctgacccagattaccacccttacttctgatggtaagaaataaatactgaaatttgcttggtaaggcaaagaagttgatctaaatggtgtactaaatcaacataatgcactgaaaactatgtctgagtagctacctggatataaacatcgaaaaatcgctttccagtactggaataagatttgtagtctctgaatactatctctgcaaagtgaagtttcactgtgtagtttccatttgctaagcaacgagcataatatgttaacgaaagaggagacagccttgcagttgtatacaactcagaagtgttcattctaagaattgatacattatttgctatgtaatcctttgttgtactagaaacatcccaaaaatcaccagtgctgctaaatccccaatcgccagacgcgctgtgtacgaattttgcagcactcctggatcttcatcttgttcatacttgatgttaccaatggccatttgtttcccaccacagtttatatgcaacgagtattggtctgcactaaaacacaagtctccatttggagatgggaataatattgtatgaaaatgtaaagagagatttgattaccttttgaacatggactcaagcatttgcttagtaatctataaagaagcattattattagactatgtgaaacttttgttggtgaaagaattactcatgtcattgtagttttttttgaagcttactggtttttcttgtctgaaaagctttgaaacagatttctgatgaaattaacaacaaatttttagaaactaaataatcaaatctcatcaaatagaaaatgttaaaagagagaggctcttacaaggtttctcgacaagttggcgggatagaagtctcggaaaaattgttgtatgaaagatctatgatgctgcaaatgaaatggaaattcttcagttggtaaattttaagtcgaaaatacttattttgtttagcttctaactcgaatgcctcgcaaccataaccagaatctatgcctttgaatcaaaacaatctcaagctctcaatgaatggttttttaactctttacaaatgagtcaatagtcttatgtttcaagttgaatcaggcacttcatacagacacttaggtggcgtttggttggaaagaaccaaacatgagaataggaatgagaatgggaat

SEQ ID NO: 379834 - DNA, 559 bp, Cannabis indica
acaatatttgagtggttcaaaaatcagtaagaaaaatacaactttttcataacgtattaataaaaaaatatggaatttgttttcaaattcatggttatatcctcacatttatatcttcctatatatgtataaatatattattttttaaaaatagaaatgctaaaatatatcttaatattttaatgtcggaagcattaccaaataaaaatgacatttttttcgagtgaccaaaaataacatctctattaatataattaatctcatattttcatcaaataaataatataaaactgttacttgcgaatcggtatagtattatacctaataacaattatttgttttttttaaaaaaaaacagtaaaatctttcatgtttaatgataatagacagagggttgaggtgttcatcaaatttaatccgcattaatttgtttatagtacattcgatctgtactaagttcggatccaatctaatccccacaaaaactcaaatctaatccaatcgcatttgcaaaagttcgaattgaatagttattttagattagttattttttaatatt

SEQ ID NO: 379835 - DNA, 2080 bp, Cannabis indica
ttttttttttactgaaagaactgcatgttcattaaactaaaagagaaagataggaatcacgagaggatttccctcccttgaaaaataacagcttcttggctagaaagtctagtactccgagctaatccgcaaaagagttaaaactacccttaataaagaaaaaactacaagaataaaaaagtttaactaattaactaaatctaagattgaaagataaacatgaaagaaccccacccaggaaggcatttgttttgagacaaggcttaaaccactactaaataatctgagtagataactacaccatcacaagaaatttgatgtgcccaagggagagctaaaagaatagctcgagcttcagcttccagtgccgaagtagcagcattttgttgtatgttatatgcccaatattcatcttcattgttgatcataagtaaagagggaaaatttggcaactgagctgcggggctgatctgaaggagctgccagagcctcaaaatccttgaacaaagcagagattttggcagagcagagtggcaagtgggcttgaaaccataaattctgacttgatttctctgctgtcagacttccatatcacaaccaaagtacagaagcacacaatgcttttcggtctccttagagtataaggaaaatagagaaaaaaagagaaaagaaagttagaaaactttattacttattcgatattttaaatggtaaagagtgcacaatatatagacaatgaaggagctgacttagttatggaaataactaacttggctaacacacttaactaactcgagtaacagccaaataagaaacttagggcttgtttggtacgccgtattgtaatgtattgtattgtgttggattgtgttttattgtattgtattagtattatttaatacaatacaatgtttggcattaacttgtattaattgattgtgtaaagttataatatatttttaatacactcgatcccaacaccaactacagatctcgggttcgggtccgggtccgagttcgagtccgaggtccggggtctagggtccggggtcgggtccggggtgtgggtcctagtccggggctcgggctcggggccgggtctggggtccgggtcggagaatggtgttgaccctaaatcctttgtaaatattataatacaagctaatacggactatttgttatgtattaaataatataacatacattgtattaaaaaatttggtcgtaataattaatacaatacattgctttatccaaacatagtgttatttactatttaatacaatacgactcttatacggcgtaccaaacgagtccttaatccaacaatccaactaattataccgattaagtctaatagccgtctaatagcccccctcaagatggagtgtatatgttagagacacttatcttgaatacaatatcgttaaaagggtggagtaatgctttagtgaagatatctgctaagttgtgttggaatgagacatgaagcaatttgagagtgccttgttgaactttcttgtgaatgaagtggaaatcgatctcaaagtatttggtgcgttcatgatatacaagattctcactaatgtggattgctatagtgctgtcacaatataggtacggaggtttgttgtgatagatgccaaaatcaataaggagagcaaggagtaatttcagatgttgcatttggcatggcacggtactcggcttcagccgaggaacgagagacaacttgttctttctttgacttccaagagataagggactaattaaggaacacacaataactagatatagagcgcctagtgtcttgacaagccccccaattggcatcagcaaagaaggataattgaacatttgatggagacaagcttctctttgtatatgctaacaattttggtaacgagttggaagagcagaacatgccttatcctggagtccttttaaggtattggagaatacgaaatgctgcttgaagatgcggtacccgatgactaatgaagaattggttgagatgattaacatttaacaacatatagatatcaggtcttgtatgttggatattattttaccaggatct

SEQ ID NO: 379836 - DNA, 1450 bp, Cannabis indica
atgtaatgtttttttcttaaaaaaaaactaagtaaaaactagtaagaataaaacctgtaaaaatataaataaaataaaatctgtaaaaattaaataaaaaattcataaaattgcaaaaaacttcctattttaagtatattatgtatattatgtaaattttcttatataatatttggtaattatccgttactaaaaaaagacttgtacttgcattatctaatacggtttttttttcctttttttttttttaaaagagctagctaaaaatattttgtcgtccttttaatttgtaagcacaaaatcaagtttctaattataacttattttgcactcttttttccaaaatatatataacttattttatcacttatatcattggatcgtcttcgaaatagacaatcaatattcaatctttagtatgattgaacaataaatgagattataataataaaaaaaaacaataaattaatattggagaaaataataatgtttaaatgagctatactaaatgcacattctttccataattatcatcaatatgatgtgtatgtgcataacaactactcaagctaaaaattagcataatatattgatgaccaaaccaactaaccaattttttcatctaatgtagtaattaattgtcaacgaccaatatatttataagttgtgaatttattgatttttgttttaaaaaaaataaataaacaacaaccaaagacaacgatataagtataaatattaatcccaacaacttattatgattggactacgaaagctaaacaaagccaacgaattaatgtagtaattggtttggttttgggtgggaatagattagattacttaattatatcaaattatcaatgactaaaaatacacagtacaaatttatgtatgtaccaacttaattattagaaaatagtacttgtaatttatatgcatgtttgagcaagcagttgaagaaggtcacatgggaggttgagctagctagataaagcaacaatgttaataaaaaatattaatattaataatttttataataataaaaaaactataaaatttaaaataataataaaagaaatgaggggaggatcacattaacttcacagccatgaaatgaaagtagtcttttaaatttaaaaggatatgatatcgaagagaaaataatactacgtttggtaggaagtagaagtggatggaaggagatgagaggaggtaacaattacacttatttggcaagagaaattggaagaagaaaaaaataattgcatagagagcaaatactttcctaattatgaatcctttcaaatacaaggattaatattttccctttacaattatttgaaattacaaatatatcattaaaaatttacatctaaggacatattagaatgtggaagtgtatggttaaggtagtagaataggtgagtgtatgtgtgacagtcagtagtcc

SEQ ID NO: 379837 - DNA, 1932 bp, Cannabis indica
gtggtatcgtacacttttcttatgtatgaatgagacttttcttctagtatgaatgagactaatcacattatagcaaaaaaaaaaaaatgtgtgcacaagtgtgacacaattattgaatggagagagataaactctatatatcctaatgttttatcaataaagaaaacacataaaataatgaaataatcatgtaaaaaaaagatgaagtataatactagaaaagcaaatgtactaataacaaaggattgcttaggcataatgcactatctaaaccataagtcatatatctcataataaatataattaatcttctagttttggtgacaaattggttaccaagaatactaaatgaaaatttattagattcaaatacttaattacactaataatattataatatactttatagtatgtgttaacactactaatatcgttctttaacattcttttaattttaaccatagataatattatatatcataatgagattaatcatatataattatatgtaaaaactgcatagtgtgacacaattattaaataatggagaaagataaacttttatgtttgtccataatatgaaatatacacaaaataattaaacaaacatgtaaggaaagatgaagtatgatacttgagaagcaaatgtactaataataagaaaggtttgcttaggtagaatgtactttctaaacctaagtcatataactcataataaatatataatcttctatttatggtgacaaatgggttaccaagaatattaaatttaaaaatttctttcaaattatattcctcatatgaatttactagaaccaattattgtggtggaattataaataagtcgaagtgacattgatttagtgtatgatgcttataattgataaaatcttaatgtcataataatattttgtatatagagttatgtatgtgtgtactatattatcctcttcttgtttatttaaatgaaaaatagattatcctaaagttaaattatattttagctcgaataataattggatcgttgccatttgaagattaaatgataatatttttttaagctttagattagttttatcaatttttttaataaaagagtaaaatgatcaattatcccatcaactcaattattattataaaatacattttttttaacgaaatatagtttataaaaccctaataacgataatataatgcctcgttacctcaaagatgctcaatcatccgagacagataattattaaaataaatcaaacctaagagcatgaatttttctttttttttttaaatttggtgtgagaaatacaaatggaaagccaaattagaagatatcatatagtactactatataagatattatgcttttgtacactcaacacaagtctttatcaaattacaaacaaataaataataataataataatgataatttttttaaaaaatattatttctcatatccacacaatggtaaataaaaagccaaaccaccgacacttccatgatgtgccacctgtcacaatttgttagtgggccaatatgttagtgggccgacattaattaaggtgaaaaacgtgtggagtttcgttttaatatttattcctaaaaataccaatattacaataaaaacgtgcaatttcaatttcactattttctcttttcaattcataacaaaatatatattttaaaatttggacttatgaattttttgtgttttaaataaaataattagtgtttttgcattttaaatcttttacactgtaacgtccctgctttaagcctccattggacccttacacctacggaacaatggctcttatacacgagtacgccactctaactgctttctggattgatgactgaccctacagagtacagaccaacacgagtgtttaggtcacccatcctgaaattgccccaggtcaagcacgctta

SEQ ID NO: 379838 - DNA, 1401 bp, Cannabis indica
tctcatttggctttccattgtatgtggtgagctcctttttttccctttaacacacatttcaagtgtgttttaggattttctccatttaatctagagatccctaaattaacacttaaaattttttggagtcaacacttgctcctaaatctataaaaattctttttaaatgttattgtagactgagtttagtgagctttgtccccatcgcctgattctatgatttcccctttaggcgcttatgttaggattttatgccctaaataaaactcatcccaatacaatcttattaacttatcaatgaaggatatagaagttaattttatattacctggtttacatgatattttcgtgattatagttttgatatataaattctgttaaatcgtatattatggataatcatgattattgtgttgtctacacatgagcgagaaattttctttctctgagtgaataatgatgtgactaacctttttaagtttattaaattatacgtatatatagatttaagattatactgatatattaatttaaaccaataaaataataatatttaaatattttaagaaatatctgtaagcgattctatatagatatttatttagaatttaactgaataaatatcggagacaaggaataggcttctgtttccatgacaggtgcaaagatctcaaactcaaccatctagcttttgctgatgatgtattactcttctgcaaaggagatttcaagagtgtatactacatgttacaaggtctaaagctcttttctatgacttctggcctccatcctaatgctgccaaatctgcaatttattgcaatacatgtcaaaaacagaggtaactcgaatcctacaagcttctagttttactgaacaggacatgcctttcacatatttaggaattcctatatgtgcaaagaagatttcaggtcaagattgtcctatcttagctgagaaaatgattgcaagaatcaagacataaagttcaaggaatttgtcttttgcaggaagaatagtgttgataaacttggtcttaatagccattcatgcctactggagtcaaattataattttaccaaggaaagtgatcaagaatatagaagctataagcagtgctttcctttggaagggtcaggctatgtttcaaggtcctggatccattgcttgggataccatttgtcaagaaaaggctgctggaggcattgaaattgaaaagctggcagaatggaacaaggcagcaatatataaatacatatgggcagtagcaaataaataagaaagtctatggatgagatgggtgcatagtgtatacataaaagaagagaactggtggatgtacaaagtgttggaaatattttatcaggatctagatttactaccaagtatgtttcattaacatc

SEQ ID NO: 379839 - DNA, 7268 bp, Cannabis indica
tttttaagaaagtgggtgctacctgcctggccctgagcagctggaaccgagagtaatttggtaagttggatactaacatctccatgatggaaacccaactctaaaatatccaaaagatgtgtgcagggtctagaaagtgggcccatgagttggaggtgagacaaaatttaaatgagactttaagatggaaagccttatattggcaacaaagatcccgcgtctcttggattaaggatggtgataagtgctctaggttctttttcatttcggccaccatccgtaacagacgaaatacagtggatagtatcttggataaggatggggtgtggatctctaataaaagagacattgctagagaattcgcaaattttctaaggcacatttttaccaacccagtccaaggccctttagcgaatctggactatctaattttgaatcatctctctcctgtagagcaggttgcattagagataataccggggcgagaaaaaattagacaaacactcttttctatgggaagtttgaggccctaagccctgatagtatgtcaattctcttttttaaacattactggaacttagtgggtacaaatttctgtgaggtggtggtggattttttttcaattatggactatgcataggggtctcaatgctatgaatgtgaccctcattcctaaagttcctagccccaaaaaagtgtcccagttcaaacctatttctctttacaatgttgtctacaaggtaatttaaaaaaatattgctaataaaattagaccgattttttccctggttgatctgtcctactcaagtagcatttgatccgctatagaatattcaagttaataatattttagttcaagagattatccactcgtataaacttaaaaaggaaagaaagtttgtttgctatcaaaattgactcggttaaagcttatgataagttaacctggcaattcattgatcatgtgctccaaagcttcaaggcccctgataagttttgtaattgggtctgtcaatgtgtttcaatgacttcctttagtgtatgcctcaatggttgcaaggttagtaacatcattcctgagtgcgacatcaggcagggagaccctttgtctccttacctcttcatatgggctgctaataatctctcgcgcatccttgaaaatgccctggatattggagctattaggggaatcaagttgagtaggaatggtcctaggctctctcaccttttatttgcagatgattagatccttgtgggtagggcaaatttaactgaagttaagggcttttggtagtgtctaaagaagttttgcgactggtctagacaatggattaataaactaaaaacctccatcttcttcagcagtaatactagcgagggtatgagaagagccatcatgcaggaacttagactcaataatgtgatgggtaacattaactacttggggctcccgttgtttaggtctcgccaaaaagatgcagatttcaactttactttaaataaccttgtttccaaactccatgggtggaaattgaaaactttttctaaagctggacgtactactttgtctaagattgatggtatggccagagatttttggttagactgtgagtaggggaatcatggtctttacttaaaggcttgggatcacatatgtctccccaaatctcgaggtggccttggcttctggaaatctttggatatgaatcaaacgttgttggcaaggtggggtcagtcccttcttaattaggaacaatcgctatgctgtaaagtgttaagtgccaaatacctgaagggtagagagttcttggagggttcctttaagaactcagattcttggttctggaagaattttgtgagaactaaagatattctaaagaaaagtgcttgcaacattatattagatggcaaagaaacgaatatatgggatgctctgtgggttattcatggacagaacttctatccaaagcctattaatcatccccctgagggtttgaagaaggttgcagatttactccttgtggttgaggaaatgatcgatagatgggtttggactaaagaactgagtggattgttttctaccaagttttcctaccttattcaagcctttgaccgcgcccctatgtgcgatgttggcctagcgttgtggaacaagttatggagctctaaagtcttggaacgtcacaaggttctttggtggagcattctttctaatgctcttcctatccgtgccctccttgctaggagaatgcatattgaggaggtgcttgtcctatttgtggggagggtgaggaaacgatggagcatatttttctctgctgcaactttgcttttcacctttagtgatcatcccttatgggagtgatgccagtttttgattttggtgctcgggtttcagattggattaaattcttgtggaatctaaaatcaaagggattgatgttgacaagttgtttttctatgcctcgatgatggtagatatgatttggagggctggcaacaataaggtacataataatttacttagtaacattaaacattgtattgactctatctctatctgttacgcagactatgggccctgcttatttgcttcgtcaaaagttgttaagtctcctggttggtcccctccacctgttgattgggtcaagatcaactgtgatgtgagagttgggtgcagatccatgtgcattgtggttttggctagggaccacacggagtcagttttgtgggtggctacaaacatgcttaacttctctgatcccctcattggagaagctgcagcctgtctgttaaccatggagacagtcgttttattttaacacctttttgtgatggttgagagtgaccttgagacagttatcaagactctaaagggaacctgttccagttggggagttgataactgcgtgcatcattgtaagcatctatctacttttatgttaagttgtaattttttatttattcttagagtttgtaattttgtggcctataatatagctaagtgggtgtctaatgttactggtatggttgatctctcttctataccagactttatcctttgtcatgaccatgaggtctaacttttgatttttctatttataaaacgatgatttaaaaaaaaaagatgcttcaataaaaaaaaatgtctattgatcattgcaatattttgctagttatagtatttttaacgataaaattcattatcaaatttctactaacattctaaaatatgctcacataccatatttaagtcaaaactaaacaattttcaaactctaattttaaaaaacacgatacacttgtgattatatttcaccagatctaaatcttacctatgttgattcatatattagaaaataaaataatttttcacattgaatctagatcttacctatattgactcatatattaaaaaaataaaataatttttaatattgaaatctcaagagaaataaattcaattatcatatgaggaaagagattcataccaatatttttaaagtatagagttaatttttgttgcgaaacaaatatgccaacaacatgcttttgtaggtacaaaatttatgccagaactcctttctcttgaagtgagttaccataccaattgcttaagcaaaccatcactcttgcttttttttttttacatgtatatggatcaatcattttaaatgttattcatgtgagcacaaaattaatacttttgtataaaaatagaggattaaattaagaaattctactacaaaacaaaaacaatattaagatataattgttaccataataaaataataataaaaaatctactaaaaatgctagttgaacaaagtcaattactattggcatatatatagattgaatggaaaattaaaagcctcttgttataagttgtgtacacatgcaaaaaaataaaatcactctattcataaatattgtgacctttatatttttttatggtaagttttattttttatagtacatatagagagatatgtaagagtgatggttatgtaaggttataattgaaataaatttattatatatcagtgtgaataattaattatagaaagatggagaggtaagataaatttaaaggtaaagaattcttaactaacgaaataataaaaatcaaaataaaagtaagatttggagcatctcacctaaaatattcaatttgtaaggtttagtgtaacgaaatgtataattactattagttcccaatatcccttgtatatttgataaacccttctaaaaatatgcagagttttagttaaatttattttcagtatggcccaaaatagctatgttatattaaaaattattaattttgtaaaaattaaaatctaaatttaaaaaataaaataactttagttaattgaattaataataagtttttaaaaaccaatttatttttgtgtgcttcaccaatagaaacgtgatttttctcagattttaaaaattaataaaatataataatcaattgaaaacataaaatacctaaaaaaaaaaataacgcttcaaattaaaaatacctatgattttacacacctaaatcaaacaataccatttctcctccatctggctgaaccttttttcaaaaaattaaaaacattactgaagcacatacagttcagtatccaggttcagttggtttcttatatgaaatataaaccatcccttgtcctaatttgaccataggatggcaaacattcaatacgtatatatttatatacatcaactgaaacttcaaagacaattgacctgtaaagggtttgagtaatgaaggcctgtgtcattagcagccactaccactagcaggttcaattgaactgagaagcccgttgcctcgaagctgcatgcagtgttcttcagcgtcagcctgagcacatatgatcaccactgacatgccattgagatgcgcttcttgcataatgttcacagcattgtcaagagtcatcccagggataaccttcatcagtacttgcacaacatattcccgtttattgaagttgtcgttgtgcagaatcacccggtacggcggggctattttccttgatttcctgtagagtttaaagaagtacaatgtatggattataagtttacaacccatgttgagaaaaatcacatctaaatgattcttcctttgaatgcatgattccttagctgtgtgtcactttggtgccgagctcttagagggtttttctttatccgttcatttggatgaagaaatgatgagaaatacataaaatgatatcttcataagtgaaatactagaatggtaattcattgaatcttatttagccataaatcagtgttaagtcatttcaggaggtgattagcacacaaaacttacagaagatttatattttcatattcaatacatttactagacaaaactattcaagaaatgcagcagttgcaattctaccatattctagtgatatgtctacttgcaattcctacaatttcttcattgcaagatatcattaccctcagttcagttcatgctgcgctcagttaaaagaagattgagcagaatggaactagtgtgaataaaagaaaaggtaattttaagatgtctaataaaaaaattcatgttaaatacacgacggtgttcaagaaaattaagattgtacctcacatcaaactctgattcacgacctggagtagttttctctataacaggcctctctaatacactgccccctttacctggtcctgttgctgatatggccataggaattccaagactggggcatggtcctttacaaagagattgtttgttccctgtttcataatttttaccaatccattaccaccaataaaaataatcagtatatcagctagtcatgcaaaaactaagagtatttattaacaagtaaacaaaacattggtactaagaaaaaaaaaaataataagcaaacaatggcaagaaagaaaccatatcaaattatcttgtcaaaacttataaataagtgaatatttaaggttaattctaatatcaaacttaaaagaaagaacttgaaagtttatacaaatcaacaatagggaatgccctgatataaaccttaaagaatggcaagaaattttatgatacaaatgtctccacccagctcactataaactctagagctgtaatgatccaaaaacgtttaggtcaaaacattatcccttggcaatttgtcaaaagtcttatctaaattgcttaccaaacacagagcagttttacatgagtgtttcaaattagaaaagttacttgttctaggttagctcaaacaggtctagttacaatcatcctaacctcaggaattgctcatagccaaggcaaagataacaaagctctcgattttttctcactctttttcataattattcttattttatgagattatcaactaaattatataggaattacataacccaacctctttcttgttagcagcaatgcaacaatggtcactcatgagagcaagataatttcctaaccctgataatttcctagataattcatttctgaaaattatagtgaaaatctgttcctctaccaagaaagactattgcaaagtaaaacaactagtacccagaaagtaagttccaagatacaaaaaacatttgaagttcaagaaaccaaacccttttgtttgaacaagttataaagtaaataataagaaatacccaacgcaaaatttcggaagaacgaaaaaaagaaaccaagatttaatagaagaaatcccagaactgaaacagcgaaataatactaccacagcttcaaagaagcataatttcaaacaacaattagtaatgttgaattaaatttgaaaagggtaggtaatacgaaattaatacctggcttaggattgaagacatggttgggagagagagccagtctcccacaaatcgctgtgtccatgacttttttggtgtttggttattttttgtgaatgaaaaatgggatgatatgatgatgatgcactcggattttgtttagtttagtgttttttgttgttaatgacaaataccaaactgaagaaactggtggtcgtggacgtcgatgggtggtttggtttcaaccagacaggcctgactggcccatttatcccgaatatgggcctacaattaactgtttgggctacactttggcccatcccaaagtctgagatttgatatttttttagtgaaaattacatgaaatatgggatttcataacaaagttagaaaaatatggcatttttaggtttgccacttttctatggcattttttcacattt

SEQ ID NO: 379840 - DNA, 2512 bp, Cannabis indica
aaaaagtaatttacaaaatgatttaattaatcagaaaaattggatgatggagacgaggtccaaagagaagccgatagcaaacgccgcgatttccatcccaaaacgagtctattcctcgccagttcctcaactctatacccgtcattgaataatcccagtaacagcttcgcttggcatatattggcggaactcaccgttaatgatttaaaccctgccgcacacaaccactccccccacgagctgcgctcctctccacgagccctgtagatccgacccaatgacccggtaattctgggccccaagaaaacccgctccaccaaaccccttgcccggctctgcatcgggaaactcgcctccaacgagtcgtacactgccgagtactgatacaacaaatccataaacctcgccacgaaagcaccttctccaccgggtgccaccgccgccgccggtactggacaagcctcctcttccactaaggcaatcagcctagggttcagccatttggatccggttaaaaacgaagccaccgactccggcgaacggtaactgaagtgagggaggttaagcatgcagttcatcacaagagattctcccttcaccgatttcaacgcctccggccggaaagcctcgtcggaatcaagcctgcattggtggaacgagaatggttgaccaatcgaagccgcgaaagccactaaccgtcgacctgtctcttgtactgtcccaatcgatctccggccaccgccagccctggataaagctgtgatccttagatgtgggcccggtgggccttccttacgggacactagggcttgcataagggaggcccattgaatcccttccatgatatcataatcaactatatggatcctacggtcgtgagccactgcctcaagaatggcctgattagcagtgaagtggccgaacttaacgtaaggagacatgtcttgaagcaactgaaacgctgcaacgatgtcgttctggtggtcgttatctcctccgtgatgattgtttaagaaatgtttattattggcgtgagaactactacttgaggaccccatggccccatccagtatgtgttgaagagcgtcagtaaattgagaggcgagcctctctatgtttgtccctcccgtgggggagaccaattccttgagccgaaccaatatcactcgagccagatcccggctcttgctggcaccgccgagtgcttcagcggccgccatcaataagtggattaatcttaatcccttatcatcattttccaccaatacagtaggactagtaatactgtcatcactggccgaataatactcatcttcattagcaactatcttagttgacggtgaaaacgaattgagttcgccatctgcatcttctccttcgctttccatcatggattctattaagtcgtggaaactgtcatggccacctgtgagggtgctccagtccacgactggggaccatgcgttccaggcgcagccatgatcataatcttctgggctagtcgtattggttgtagaagtagtagtagtagtggttgtggtgctataaccagataaatctagctcaagaccgtcttccatgatcatgtccatgtctacagccatggccatagccgatgagctgacaagatcagttatacggcagcactatttttctgttttctaatactcgggtgtgggctttaataattccttcctttatttgatttgggacagagtggaaatgttataaggaatttaaagatggtttaggagagagaaaaaagagcaaaaagatggaacaagagacaccacagtttattaaatttgtatttgcttcagtaatatttaataagaattataattacgagtttttatcgaaatatggacagcagatcacaaagctgtttcgttttgaacacaccacgtcttaatcgaaccctttacttaatatatatatgtatataactaggaaataaactaaacaattttttttaagatgttgtttagtgataatttagttgtaaatctatataaatttaaaattttgatatatatatatatattttaaaataattatatgagtaattattctacagtacttttatttttgtagtacttagaaaaataaatttatattgtataaaaatttatcatacaatttctaatccaaaaataaaagacaattgatgaatttatagaaattaaattttaaataaaaattctcacacaaaatagtgatctaaaaaaagacaatggataaatttatagaaaactcattatgagaaaactcattatgatatgtgttgcccctgattttgcccaaaatacgtggaccaaccggatgatgacgtgtggatgggaaggatttagcatttgaatgaaacagctaactcttcttaaagcaaaggattactttaggcatgcctcccggagaaggcatgtaattctcatatgctcccggagagcaagatggcgacaaagcatctccggatggtgtcagatgccatccgaacagtcatctcgcatttaat

SEQ ID NO: 379841 - DNA, 2471 bp, Cannabis indica
gacaactacctcatcaaactccacatcacataatacatagcatgtgctttccatttatagcaatgcctgttttcatgtttaatggtcatagttcagatcctcatcctcaacctcagtttcaccgagataggtccaactcagtttgatcatcgtaataactaaagtgaacaataatatgatcaaatatttatatttatatagtgaaaattggaaggagaatactcttgaagaagcaataacatttccatgttaataggccaaaaggggcagtcaagttgagtctctcgttgattaagtaatacaagatatcacctacaacaaacaaaaagcaaaactaagactatgaagctggccattgagacctcaaccagattaaccgccgaggtccttttatagtcatgaaagcaactgcatttttgtcatccttaagaacattaacagcttttgtaaattccatgtcatcaagctcttcaattccttgtaattcctcaaggcacttttggtacagtgtcttctcactaaatgcttttctttgtgcagcttttaagttggccgagcaaaacatttcgtataaggtgttttctatggtctctctgaccttatagcattttcttcttttatgaccacacattgaaggagcctcggatttcagcttcatttgttgcctattattatcatcatcgtcgttgtcattgtcatctattcggatcattgaatccgaatcgggggtgccatcaactacctgggctggaaggttagtaggctctgaagatcgaactgtttcagtattactatttccctcttcagctgtcactagcactccacttgggaattggtgtttcataacggatcttgattctcctgctttagaataggtcagggaaatgaaacctacttgaaaaatgctatagaaccaataagtgaaataaagatcaccttcaaagataatcgccatttggttgtaaagaggaaagctcttgcgtctaaaaggccttgcttcactttttatctgcaacaataagcttgtgagattctttaattgcattaaagagaaagaatgattttttttttttgaacttaaagcctaagtttctaattataatattctgtaaaaaagatcaaactcacagctatgtagttgtcccaaactttatcatcagccacaaccatttttcgtatttcgtcccagctaaagccagtgtgactaagaagagttttaacaacaccatagtctttcttcatcacattgtatcggttttttatctggttctcttctaaattcatgctaaacttcttattaaaatcgcgggttactgacctaataacttcatttttgaattcattataagctgttcttccacaattgtgctgttcaatgaaaagctgaaccaaacatgcatcgcgagatggagtccactctgccttagagcgcccaagaactccttcctgtgcagcagacattttgccttctggttcgccaatggcacaactgtaaaaaaagataatgaggatggattactaactcaacttagctgataagagagacacaaatggagactccatttcaaaagcttctttttagactcaaactcgaagagtagagctccgaacgttggcaaagaactaggaaaaaacttcatagtttggcaacttagatgattttttttttcttgttctttcactaaagggcattgtaccacacttgaaaagggcccagagcaaatggcaaggcactttcaaatttcgtcaaatatcacaaaaacaaccatcttattaaaatttcatttgacaaaagaaatggtacacaacacaacaatctagtccattctagagtattgaatacactaaacttggcagataagggaaaagtaacgaattttcagtaaccccataaaagctgtataagcctatagattgtagccatttatgaataaatacagctttcatggcactaaaacaaaaaaaaaacaaaaaaaaaaacctccaaatgcacagaattttcagtggaaaagaaaaataaaattgagaatgtaaaaacttccatgctcactaagctcataacctgtgcctgcctagtaaaatgttatgatcaggtgagaccgagcagccatgctcggagcgccgatgacaagaaaagactgaagcaatggagaggagagtaatgacagtctgtcagaggtcgcgcgggagtaccactataaaagaagaagatgggctctgcctctgatgtcagacatgtacccgaaagcccataatcccgcaatggccccatttacattgggctttcttgtctaactggaaaactttccactgggctcataatcccaatatttagtgatttttttttgtttttttgaaaacttatagaaatactgtaaaattgaaaaagtttacaaaaatattgggacagaatttttttatatttttttctgtactaactttacaaatatactgtgtttaaagtttcaaaa

SEQ ID NO: 379842 - DNA, 4340 bp, Cannabis indica
aaaaaaaaaaatgcaggaaggaaatttttaatgggtatagagaatcaaaggcgtaaagatgatgatcactgtagattggctagggagagaagttttcgttctcgtgcggcgtggaaactaatagagcttgatgacaagtatggattgtttcacaaaactggggctgttctcgacctctgtgctgctccaggcagttggatgcaggtagccactctacgggtgccacgtggaagccttgttgtgggtgtggatttgaattgggttaatccaattccaggcgccatttttattaagcaggacatcaccaaaccccaatgcaagtcggagatcaaaagggtcatgaggaagtatgagttctctgccttcgatttggttctgcacgatggtgccccaaaaatgggcggtgcttggaatatggaagccactgttcagaatggtttggtgatcgatgcccttaagttggttactcattttcttgctcgtaatggtacatttgttaccaaggtattaatgtattattttctcatcagcaaagcaaaatcctttgcacattcaaataattaataataatttactatgcatttgtcaggtttttcgttctcaagattacaactctgtcaagtattgtctttcaaaggtaaaattttttaaaaattattgttattggttggatttgtaaggatctacttgtcttataatttgaaaacttttatatagttatttgagagagttgtggtgcacaaaccaaaaagtagtcgtttttcatctgccgagatatttattgtagctttcaagtataaggctgcagcgaaaattgatcctcgaatactcgatgtgaggcatctatttaaaggagccatagaaccccaaaagaagaaggtaaagtctcttatgaaatgtaatctgtacaacttacttttattattttatttataattataatcatgctaatacgattgcttgttctaggtggtgcatgatttaggacgagtgaaaaaaaaacgacatcgtgacgggtaattctgtttctctgtttatataattatggcttcgtttggcaaagtttaaaccttactaaaaagccgtaagaataagcaaaaattgtgacaaacggtgcttgtatatatgtgttacaggtatgaagatggagacacaactttaaggaaggtgtcaacagctgcagaatttatttggtctgaaactcctcttgatatccttggttctgttacttccatatcctttgatgatccaacatctttactcatcaaggatcatgttttaacaacacaagaggtagctaattgcctaactatagttagtttgttgttggtttcgatttttctttttattttttttaacaaaataagtttactcttttggggtcttaacacaagacttttaattcaatttatgaaatctttgtaggttaaaattctttgtgatgatctgggtgtcttgggtaaacaagactttaagcaccttttaaagtaagttggttttttttttttggccctctaattgctcattttagttttgtttgatgatttgtatatttcaattcttttggtgatgaaggtggagaatacttataagaaaggccttgatagtttcagagaagactgaagttactactgctactactgttacaaatgttgaaaatgaggatgaagacgatgataaagtagttaaagaaatggaagagttgacacatgtgttggagcgtaagaagaaacgggtgagaaagcttcttgcgaaaagacaagctaaggtttgtttccatgttcatctccttcccgccctcatgcgaaatgcaattgagcacagattttctttgtaaaaattccaattctaatttttgcataaagagtggcctaatctctctagaatataagattgaaagaaatgttgcttttagtttgaggtaatgaaatagaagagaatgaaaagcaattaaattttcatttcattcatttatttagcagcattttaaaatattagaaagtcatctatagaatgacttttccactatttcggtgtaatgactttcattttgaaatagaagaaaatgtcatttcaatgtaatattaattttttttatgcattttaaattttattcttattcccatttctattcttatattttaattcctcgcaatgaaacacaacctaagtatatttgatgtatatcaagttgttagtacacttgttttcagtaatacaaattttgtatgattgaactgtaagttattgatatgtgatttttatgtgttttatatttgattatatatataggagaaggcacgtaaggcaacgagtatgccaatggatggagtggatgatagttatgttgaccacgaattgttttccctctctaccattaaggtttgttttaaattaaatttcattattgaatttattcttgtcattggcatctccttcctttggagcatatttcaacctttcatgttaccatgtacatcaaacaaattctgatgagtcaggtcttataaaccacattttaatcttgttccttttaagcacatatataatatatattcattactattaggcctaaattgaattcatttgcttaatcttttctcttaatttttaagattgtgatacaatttccctattattaatacaatatctactttgaacataacataacatgggtgtcacattatgagttattagcaaaatctatactaccctctgttttgttggccttttaatttcatttcattatgtatctcagggtaaaagcgctcttaaaacagtttattctactgaacttgatgatgattatgatacacatggtgatatgggtgatagtgaaaatgaagaaagtcgtaatggaagtgaacaagatgatttatctagggatttagactttgatgaagagcgaaaaaggtgaagtttctctactatttttcatggatgatcggcattattgaaacaacaaactattgcattatattgtgtgattatttattcttaaatttcagatatgatgaacaaattgaagatcttcttgaacaagcttatgagcagtatgtttcaaaaaaaaagcagcaaaataagccttcaaagcgattgtgctctcatgatgtccaacttcttgagttatgtagttctccccctttaaaaactaaattagttgtctaatattgttgttgatagattttattttttcaatcatgcagagtcttgatggtgatgatggaattattccttctgagtatgattctgatggtgatcaagaaatgaatcctcttttggcagtacttgatctaggcaagagtctaacccaagaagagataacaaagaagtggtttagtcaggatatcttttctgaagctgtggatgatgaaggagaaggaaatgtagggaagtttgatagtgaagatgaaatgcaagagaagattgttgtgcaagtaaagaaggcacaaaaaaagaccaagaacaatgatttcgagatagtacctattgcaccaactacagtttttgattcagatgatgacaacgatgatgttgattcgaaggctgagatcctaagttgtgggaagaatatgttgaagaaaaagcaaagggatgtgatacttgatgatgcctacaaatatatgatgtttggcgatgaggagagtctgcccaagtggttcttggatgaagaaaagaggcattcacagcccataaagcctgtcaccaaagaagaggtgaatgccttgaaagctcagttcaaagaaatcgatgctcggccagcaaagaaagtggcagaggccaaagctcggaagaaacatgttgcaatgaagaagcttgagaaggtgcacaagatggctaatgccatattagagcagacagaaatttccaacatatctaagaataggatgattggtaagctatataagaaggcaattcctaaaaagcctacaaaggaatatgtggtagcaaaaaaaggtgtccaagtaaaagttgggaagggtaaaacccttgtggataggcgcatgaagaaggatataagggctgtcaaggccagaaagagtaagatggctaaaggcacagctcaaaaaaaaggccaaagggtttagattttaataatttatttatatgattttcattatgtatctaattggacatgcaatattacaatattatttgttctctgcttcctattggatgttgttttaagttatgcatagaggatatcatactttctagtttctacccaactcctttgacattgtctagtatgtgaatgttaaaatatacataaaatattgtaaatttttttaaaattataaaaatacattttttaataataataataatattttaaatta

SEQ ID NO: 379843 - DNA, 4981 bp, Cannabis indica
aaaaaaaaaaaaaatcttctttattacagattcaaaaaaacgacacatagattgattaatgtcatagcgaaggaaaaaaaatagatgtgaagaagtaacaaaatgattcttacaaaaaaaaaaaaagtgtatcaatatgactttggattcatctaaactcacatgcactgaataaaacagcttgagtttttctaagcactggaactgagctttgggttcagtactattactattacctacgttgacaactcatattggacaattaaaaataaataaataaaaaaacctgtcgtttatttaaggccttactcaataattgatacctacatggggtcatggatccgagctggggttgtacaacgtgcgccacacaacattatgattggaaaagaacagtaccccaaccaaacaattactattcttagactgattaagcgtttaattaaaagactcagctttcaccagatcccataatctcagaattcagaatcaaagtttgtaccttaattctttttcttaacggtaatattgaaatttattaaaggtagttaaaacaaaaactgtttttttttcctctcggtcctttctaattctctctctttatatataacatttcaattctttggtggatttttttctttttccagctgcgtttccaagaaagacccaggaatatttcctccctagctactcgctccaggtaattattttctcaaggggatctatattaaattttctaaggagtcaaggctcttctgtccttacagaattaaataagctttagatcatgatttgtatgagtgttttgggttaaatggaatgtgaattaatgttagttggttgatttgtgaatggtaatgtaggtgatggagtttattatgagttaaacctggtttttagagtagttgaatgaaaagggttgctcttgtttctgaggttatatatgctttacccaatttatttccatgaaattttggttttgattattttatagtcaggtcaaataaaatacccagttttagatcttgggtgttcagtggattcatcatgaagagtgacatgaagggtccttatattaattatgcatttaatgctaaattaagctttttccttttctcactaggctctaaaggagcaatattgagcttgaataatggaggattatgccagtactgtcaatattgacagttcagattcatctaaagaaacagagatggtggaattagaaaactgcatggaagttttaacaaaactagacttggacttggcatattcttctgagaaattagtaaatcttcatggactactgatgaaccttttggcacaagaaaatgagcttgaaacaatagcagtggagaataactatatctcagaagaatttatggagaaggcactggtatttaatctcttatctagtattttagattctgaggtaagagaattggacagtttcatggttagtctccaagaagaaattgttgatgcacataaaaaaaaatcttcatgcagaaacttgaaagaacaatttaccatgatggaggagaagttgattgacactgaaggatctttgagacagactcaacttcagatatcagatgtcaagattcagtcatctaagttgcagagaactgttcttgcttttacacatgaaaattgtaagcaatgctagtagtgtaaattcttttttgttctcttttgtttgaacttacgtaattaagggtttattttcactttgtgattgcttgataatagggaaaaactgcattgtcgaggtatctgaacatggtctgctgtcaaatataaatgcccaatcgaatctgcagatggctggacaaagacatattctaaagatgctagagaaatcactagcaagggagctagatcttgagaagaggttaacagaatcaagaaaaagtgaggaagaactaaaacacaagctacattacactgagcaggtagcgtttcgcatggaagaaactgctcaagtagtttggggaaggtttctagaggctgagaattcagttgtggtgctcaagggaacttctcacgaattattaggtcgaatccaacttgctcattttaatttaaatagcatggttcaacgagaaaatgagatgaaatgtaagtaccaagattgtgtagaagaccttaaggaaaaagatgcagccttacaaagtttcaagatcaggactgctgaaaatagtgccattgatgctgaactctccaatttgagggagacactgaagcttctggaggaaaaggttaaagaatcagagctccatctgagcaatgaaaaggccacaaacagttcaagtgaagcgaaaataagggaattggaaaatctaattgaatcattcagagaaagtactgatgtagcagacactagagctgaaagtgcagagctcaaagttgcagagttgactggaacaaatgttgaactaacagaagagcttaattttctgaaaggaagtgctagtaaggcagagaaaaaggttggtgttcttgagaagcaactgagagaagctgagatccaattacagaacgcaaaggcagtgtctgaagcaagtcaagagcaacagaatatgctgtattctgcaatatgggatatggagactttaattgaagatttgaaatcaaaggttgcaaaggctgaaaacaagactgatgatgcagaggagcattgtattatcttatccgaaactaattcagaactcactaaagaactgagtattcttagagaaagaatagagtacttggaggaatcgttggagcaagctacaaggtcaaaagttgaaagtgcaaatgatattaatgtcaagactaaattcataatggatttggtagtgcaactagggaaagagagagagcaccttgagaagcaggtatgaaactatcttgtatgaatagttcacttgttttcattattgagattgatttgtttgtctttgtctctaataagcagtagttatagaaagctaaaattggaacttgtcatgaaataagagaaaagaaaatatcaataagaacgtttgcttttgctccatggtacctcctcaaataattaaccagaaacttaagaccagattacagactatgcttgattatgaatctcctcagtcctcacagcatccataatgtccgaattcgcttgataagcttttttgggagattaattaatagtcttcaacaataatgaaacaacttaaagaggaccattcttattacttgttactattttgcagttaaatctcttaacaaaggagaacaaaactatggctgtgaagctgggtatgacagtgaaggatgcctcggtcgggtacaacagcaataatgatgatgacaaagatcttccttccttgacaaataatttaagcaacaatgattcttgtgcaaaatcatccttggaagctgtgaaagattctgttggtcaaagtttccaggcaggtattcttctgtatctttcttactttgatacttacataggaggagtccccaatactcttgttcataagtctattatgtatctgtttttctaatgaaacttcattaacctgttaagtttttttaatgtgatgactaacaagttttactactcaatcgaatcagttggatgaaacacatgaagcttcttccttatcagataatgatgtcaggaactccaattctgtaaatagtggtgttgatatagtttcaaagcttgaggtctcaaatgttgtgtcgtccactagatgcttgaacctaaaatatgtatttgttgtggcaatgtttgtatcactacttttagtctcagctatgtatttgcttaaccaaaccttacctatttcattgattttttttgtgtgaatgaatttctcatggtcttaacaccaatggttttctcagcatagtgcagaggtaccaaaaaaaaaatatctgaaatacccattcaaggaactatgcactaagacctcagtcagacgtcaaggaatttcttgaatttgtgttggttgttgataagaaccacatgagtttgcaatgtttgtcctattcctatgtctatcttctttgtttgttttttttttttttgaaagaaagccaagttcaattactagaaaagataaatgggaatcacagggagaattccctccccttgaaaaggaccaacaacttggctagaaattctagcactttttgctaaaccatccgcaaacgagtttaaactacgattaacaaagaaaaaactgcagctacgaaagcattcaattaaatctaacacagacagcgatacattcaaaaaattctagttagggatgcatctaggcctttccagagcttgaatcaccacttgcgagtcaaaaagaacatgaacctccctccaatcattctgaatagcccacgaaagggcaaacaaaattgcctttgattctgcttccaaagcaaatgttgtagtcgtttgttgcgagttgaaagcccacgaattatcgagagtgttaatcataacaacaacaaccctcgctatcccttcagatcaggaggcatctgtttacagaacgacatttgcctcctctcatctatggataggaactaactctagttccttacaagaaacagaacctgtctcgacatgatcagaaaatttagagaacatggactgcaccttatccagagccaccatcacattaacatctccccctttaatgttaatatttctctgcagatgccaaatctcagagaataaacatcccatataagtaaacaacgatcttcaacaactcataggaaagaagataaaagtgcttatgcagaatggatcggggatacatgttagaaatcatcacctcttctaaacttctagaagtttctagttacatatttgttagttgatttgagacaaaagcccattgtaattgccaaaagttagtagaaaatctacataaatgtaagaagagaaaattacacttagtattagtatgagattttaaaagttcttatgataaatatg

SEQ ID NO: 379844 - DNA, 1775 bp, Cannabis indica
tttttagaattatataaatgtgtattatagttttatttatttattttcataaaatctaaacatttatttgattattaaaattctatcatcaaggctagtattttatatatgactcaagtccgctaaaaatattgttttcatactatgtcaagaaagatgaaatttctacttcaagactaattggtaatagaaaatagcactctatgttcttatatataatttaatacttgtatatttaagtttatgtgagataatacttagtagctactaagatgacgttgggctggagataataaaataaatagaatagaaataaataattttcattctattttttgtgttttgttacattttaaagtatgaaagtgttttttaattatattggtgaaatgattattctattttaaaataaaatattattttacaaaatgaaacaaaaattaataattttttaattaatttttgtatgcactttaaatttaattccactgcactctacttcatttctatttgattgttatgttttcatttgatttctagtaccaaacctgtaataatataaattatttgtatagtttttggtccattaatttagactggggtacgctcggaaagagcgagagaaggacagtgagtctttcagtcttcacgtttcacattgtttggtccataatccatatataatattaattggtttaattcagacaaaactgtcagaatgaagtttgaattaaatctcaattttgtaacttacatgtaatttttccgttgctttggttgaatattgtttctttacacattggtcatttattggattttgttgactcttttcaattctgttgtatagataaatagaatactcattatacactaacccacaaagaaagaagcaacgttagaaaatgcagcgttgtacggccacttatagaaattgagatatgaaaattataaattaatgatgccaaatgttctaaaataacttcttccttttcttttcttgaatgaagttgcaaatagaaattaatataattagacatataaatgtatgaaaattctatggttgagacactattttttagccttgttttattaataggaacacttcatttttagcacataaaagattataattcatatccttttatatgattgtgtaattacagtgtttcacttattttatacaatttagaaaattcgaaaacaaagtttaaatgttcacttgcttatttataagtgcgcaattgattatttcaaactttgtatgtaactatcataaattattaaaaagaaaactaattgtgaaatgtctactaaactataatgtaaaccgtaatacaaaaaataaattgtcataatttctctaaatacagaaaatatagacgtactacttagtaggagcaaaaatgacactcctactatagttgttaaaggtggtggcagaatgctacttttgcaaatagtttaaaatcagaacttttgttttattaaaaaaagattttggtctatttttcaaaaggatgcatgtgaatttagacatgcaagggccccagttctgtccatatataaatgtatctgaagttgacattgggcccaaagtatagttcttgctctagcagagtggctgtacaataagttgggcctagtccatgtactattgctgtacaatagttgaaaaataccacttttattaatcaattaatcaaatttacctttaattttatatttaattgaaacatacctctttttatatgtattgtacccaaaataccctaaca

SEQ ID NO: 379845 - DNA, 4272 bp, Cannabis indica
tttatttatttatttatttgtaataattctctaccaattgaatatttaaccctacattccaatcattggggattggggagataggaaacaaattagtttaaatgaactctatatatcttctagagttaaactttacgcattacggtcgcgtttggttggaatgaaggaaaacataaaaataagaatgagaatagaaataacaaaaaaatgataaaaaaatcattaaattttttgttgtgttactttgaaatggtttttcctttcaatacaaaatggaataatcattctatcaaaataatagaaatgacgttatattggaatgatattctagtactttaaaatacaacccaacagataaaataaaaattattttcttcccatttcattacctccaaccaaataccacttaaagaaaaattattgtggtacggaatttcataatgaccataacaaataaaaagaccaatatggttttccaaatttacttcaatagaaagtttaaggatcacttacacgtttggctaaacttctacttcaacttttatcttcttttctcataaaacctcttccttaaaaagcttttaaaactagtaaaaaaaaatcagggctaagaactgaaattcaccgaaaaccgaaacagcggccaatacacttattgaagctttgtaagcccagaagtaacttctattagcccaaccaaccagccccttggtatagaagacaatccctatgatagtatgatacccatatacagagttcttagatgtatgaagatgaccacaaaatggttgataccaaaaaataaaaacaatagcaataatggacttgtaaacactataaatacatttatacactaagaacatgcacaactaattcaaacatgaattggagtcttcaggggacttggtggtgaaggcacacttaatttcactcccaacatttgatgggctactgtaaagagggaatgatcaacatcaactaatgcctaactctaaggtattaataatacattttcattgaacaaacatgttttttcagcagcaatggtgaacattttagtatgaatgtagtgtaactgtaaattactccctataatactaagagaaggaaaacaaatataaatacaaaatttagaactgtgaaaaccttctatcttacataagggcgcgacggggtcaaaatttctgatcttcacaactttctgagcaatacatcaacatagccaaaaccatgtattgagtggagctttgagtctatgactcttcggtttgaccctccaaggtgatttcctcttccgtttggttttcggtctgaccctctaaggtggtttcctcttccttctggctttcagtctcgccctctaaggtgaccccctcttccttttgggttttagattgatccccttttctttcgctaaactttaagcgaagcggtcggcccaacaattcctgcaacaggaagtatagaaggttgaaatacttgtccacaatctaacattaatgtatgtgatttatccaactgaaaagggttctggcactagactttgaatcaagtacatataaacaagagagatgttttcttggttttcggggctttagtgtgctaatttgcctactgaacctaacaaaatgaacactgatcaactctattacctttccatccaaagatgataatgcagcctcagcttcctctcttgtggcgaaagaaacaaatccatacccggaagatcttcctttaggggcatcaaatacaaccctggctgaaactggattaaaattttcagaaaataaatctctaagatgggttgatcttgctttccattcgagattagacacataaagcttatggtgtgtctccccaggacgagggccaggaggacgagggggagacggttttttgaaacgctttgcaaattcaaccctgataactctgcctgatacttcctgcatcaccaaaccaatgtgttgttgccatttgagaaatgcatacaaattcgtttacaagtaccaaatagtaaactcatcaactgaaaacaaatatgataaagtaataataagaaacttagaatggctgattcaacaagaaattatctccatacagcctagttcttcgaaactaccttctcagaaattgaaactacaactacaaataatcttaattcttaaacattatagccatatctatattgctatctcattgcttggagctgaaacagccaatctcaattcgaaaatgtagctaatctttcgaaactgattttcttttttctgaaactagtatcccgacttaaccctgtaataatttgggactagaaaactatagcaattactgtgtaggaacccacgagggactcgaacctcaaaccttgtgggagcaaaccacatgcctgaccatttgagctacccctcttgggtaatctttctaaactgatttaccattcaataaacttgaaactacctaaattccctatagcttggaaacaattcatccaagtaaaactagatacaaaactaagtcatcaaactgaaacactatacaatttaaacatagaactaaatgcccataaagtaataatgtttatttaggagccaaaaccaaagtttgagtatatcaattaactgccaagtacacatatgaacacacacattacatttatttttcagttcttgataaagaatgatgaaactagaacttaatataacacaaataatcttccaatttctagtatctgagaagaaattcattcatgaaagccataatcacaaaccaaaataagctaattaacctgaagattaaacttttcaatagcagcctgagcttcatccccagaagacattgtcacaaaagcaaaccctctgttctttccatcttcttgctttataatctacaacaaaaaatccaaatacaaaaaatattataagaaagccatagaaatgagctcacaggaaaatgagaatggaggattgaaaacctcaacgtccgaaacagtcccacaggagccaaagagttcttttatgtctactacagaaagagaccatggaagattgaccacgtacagctttctcttctggttctcgacttgggttatttctgggttttcttctacggcgatttcctgaaccgcgcagcatagttggaagctgggttttcttgtgagtggagaaaagaatgctttgtggggaagaacaatggtgggtttgggtgagttgagctttaatgggtaggctaatgttttggggaatgaagcgagtttggtggctgatgaagaagacgaagaagaggagtgaaatgagcagatagagaacgaagcttccaatgtcgccattgttgtgttctgtaagctcaaaagattggagaaacataagataaagggataagctatctattcatgctatgggcaaattagtcatttcacatcttttattgaagattttacaaatgaaaataaatatttttgtggttttctctatatttttatggattttctcaatttttttaagaataagtaaagagcatttttattgagcaccaacaatatatttcataagtagtgcctctacgattgaaagtattaggcaccaataatacttttaagcaattctcatcaggaaattggcaataaacaaatcacctcaaatggacacttaagtataaaaaattatacctcttgcaagtatgtcattgagcacgcatcgaatactataaagtgctacgaaattctattgagtttatcataacaatcttagactcaatgccctgtcgacttcaagatagctattgagctcatatatatatttgcaaatttcaacatttctgttttgtggtattgtttttttaaatgaaaagttctccaaaaaatgttcttgaaaaattaggtgtctcccgaatgttgtttcaggacaactaacttgtccatcccgaaaggagtcttgtggaatgatagttgagtctagaagggagttcccgaatgactatcatgtccactccgaattcagtctttaggatagctagcccttctctggaaaaggagttctggacagctagatactcttcctggaaggctgttctccctgaaagacagttccgaatagtcaactccagctggttttatctaggagtgttcacggattggtttggtctggattttcataagttttgaaccaaaccagtcggttttttcaatattaaaaaccaaaccagaccaaaaaaattctcaaaccaaaccattttggtttggttagaaaacaagggtttatgtggaattgataatta

SEQ ID NO: 379846 - DNA, 2147 bp, Cannabis indica
aatggaaaagtttcaacttagtagtgtattaaatccacaatatttcaaaagtaattatagataaacataattttattgctagttagaggattaatgaacaatatatatatgtcataacagaatctacacaaagtatttcatttcattatctaagtaaatagcaaaacttcagctaaatttgaccagctattttagacaacgaaatctaaactttactagtgccatgaaactaaattaatcaaagaatagcaccaattacaataaagaagataaatatcattacctaaattgatgaaaaatagagcacaacaaactattaaaaactaaactcttcaaaaaccatcattcttttttctatatgacatttaatcgaacggctcaaaatcaaataccacattcaataagcataagcactaaccacaaaacatatataatcttttatttctaattagatatgaccctcattctcaaaacctattatattttaaaccaaaaatagaaaaaataatcatcaatagacaatagcaaaacagaaagaatgtaagattgcaaggtctatgaagcaaaaaaaacttaagaaaatgagccgaaatttcacaattagtgagcgaggacctaaatcattaccaattgtgcaatcactttatcatcaaaagtgagaccaaaagagcttatttatataaaacaatttttcaaaattaattttaatatttactaacaatcacattaaaattatatattcaacaatgaacatcaaaaatttacaagatatatgcaagagagaataaaactattaataaaaagaaaaataaattagcgtactgattttttaggctcattattggcactagccatcaccgcctgttgggtggtccttatgtggttgttgcgcgtgatctgtgagagaaagagagactgagatcccggagagagaaaaagaaaccctaaatataaaaaaaaaattatacttacacacatatatattatgtataataccaataatatatacagtaagggagagacttaccggcagttccaaaaacgacgacaaacgctaaagcgtcatcgctgccgccgctactcaggatagggcaccgtcgagtgaacgagagagagcgtcgagagtgcaagtattgtggaagagaagggaaaacaagtaaaatattttattgattaaatgaattaaattgtaaagagaaataagctatatataagcagaggagctagaacatataaaccagcaactaacaactgtaaaataggaaaagggacaactgtaataactaccaaccgactaatggtgtaacgactataactaacacagtaacagtaaattagtgaatcttgttaccccccttcaagatggaccatatatgtcatgcatggccatcttggacaaatgagaattgagagtagtggagggcagaggttttgtgaaggcgtctgtgagttgaagtgtactgctaatggggatgagtcgaattgttgaattggcaattttttctcgaatgaaatagcaatccaattcgatgtgtttggtccattcgtgaaatgtagggttgttagctatgtggatagcagattggttgtcgcagtagatgaatgtaggtgttggttgctcgatgtgaagatcattgaggaaatattgtatccaagtcaactcacttgtggttgcggctacggcacgatactctgcctcaacaaaacttttggagactattttggctgcttcttagttttccaggagatgaggcagtcaccaataaagatgtagaatcctgttgtggataacgagtgatggggcaagtggcccagttggagtctgagaaactacggagatggagagccacgaatatcatcaacataaacgagaagagccacgaatgtgttgtgagatgctcatatagaaagagtgtaatctgcttgggattttgtgaatccttccttcaaaagtgcatgggtgagcttcttataccattgttgtgaagattgtcgaagaccatagatggatttatgaagtttacatacaaggttgctgcctattgtcacgggctcacctttttcaggcagcggaacacccgtgcggcaccttgacttctcaaagccaaggttaaccttccaaccattcgagtaacaatgggctcatt

SEQ ID NO: 379847 - DNA, 3029 bp, Cannabis indica
ctcaaatttaaaagttaaattgctaaataaacaaagccattaaaatattatttttttcactaatctatcagtaccatcaggttacataacaagcaatataaagtcaaaacaaccatttgcttcagtgaagtttcttttatctcatttgaggtgtgtaagaccacaaagtgaggtgagattttacataacactcctaaaaataaatatatattatttcaactacaacatatataacttaatacaatactggatgaagtttagcgctttggtaataatatcttcattaatcttgagattgaagagggtgacattaaagagagcgtggcataggagggatactttgttcatgcctgaaaaagtttccagggtcaaccttggttttgacccaaacaagcctttgaaaattactcttgaaatatttactcccccaaacacttgcttccatcacatttgtactgctttttttgttcattcccaaatcaagatccctataattgacataagcttctcttggattatttgtaacataaggagtcatgtagtcataaagattcctaatccaattcacatgcttttgagtgctcttttctccatcaaaccaaagagaaaggtactgaatcatgtaaatgattcctttcctgtgagggaatggggtagcagattccggaatcctgctcatcattcctccataaggtgtcaaaatcgttaaagggttttcttcaaccaaaaaccgttgccaaatcccttcgagtccactttcaggtattggatttttcacaaagtctgatttggccttaaaagaatattttgatgttgtttttggattgagcagaacctcaatgggagctccacttgggtatgttgttgagatgtaaacaacagactcaatccagctcatttcaacacaatcttttcttgtcaaacccaattcagggaaactattagacataacttgaacaagtctatcagttccaccaagaaatagagcttggtaagaagttgaaatcgttctcttttcatttgtagtttttgcactcattggttgtataagtactcttatgaacaaatcttcatccattttgtccacaatattttgccacttatagagtagcttagttgccccctgttccaatgtcctactaacggtaaaaactgtcacagttgcgggaaccggtacgagtcttatcttccaccataggatgacaccaaaactcgctcctccaccacctttgatagcccaaaaaaggtcttctcccatggctgcacggtcaagtaacctcccattaacatcgacgattttagcatcaagaacattgtcagctgctaaaccgtattttctcatcattgagccataggctccaccggttatatggccaccaatgcctaaagttgtacaaagcccagctgggaatccatggactttactcttctgtgatattctgtagtaaacttctcccacagttgccccggcttgtatccacgccgtgttgtgttggatttcaacttccactgatctaagcttggcgaggtctacaatggcgaaaggcgtttcgatttgggaaacgtaagagaggccctcatagtcgtggcctccgctgcggaatctgaggtggattccaagatgttttgagcaaagaaccgcggcttggacgtgggaatcagacaacggagtgaagatgaattcgggtttgggagatgaaggagacaagtaacgaaggttttgagctgaagattgtagagttgaagtgaataatgaggagttgtttggtgtgaagatgattgtgttagagagtgggagtgtggaaaggtctgagttatatgagacgcaattgatgaagttttgtggagttgattgataagcaaaggctgaaactgtcattgaagctaaaaattgatgaaatagaagaagaatacatatttggactaaagtggatattttggaatgctccataatgattgaatctagcaatgaatatttttagatgttttatgatctatatgactatatacatatttataggacttacgatgcagattggtccctttatcacttataaagtaattttattatttattattgatataactttctaaatatagtgtgaacctccaaagtactgcgttgaaaaccacctatacactttagtttgctggttgaataagtacgtgtgcaacttaggtaatgcaaacgtctttagttttttcaacattgcaacatctgaagcctttgtgagtactgtttgatttttcatattatttattaaattgctgggatctaatattaaattgtatccgtataaacctacttatagtgttagacacattaacatttctatgttttcaagttggaaatgaccgaaatcactaataatagttagtgtaaacatttatgcaagtttttgtggtgtatacatgtatctaacatctccataatgtttctctatatgtaaaaccaactcgagttattccaagtccacgtgaatgtaagatattttgtttctctccttccattaatgaatttggtgtcataatttgtcaactcctttttcaccacgagagcttccttaaaaccaatagtgattcccattctttctattaatgcattttgtggatcacattggtagacccccacccaaagaaagccatcaaattttttaaatcatattgattttggaagttggagtacactcaatattgaacagttcaggatagagagagtaacaacattataatgaaatttcataaaaaaaacaacgttgtatgaaaatatccttggctccaattccaaactctatctttgatatactgtaatatacgagcctttcctttttagtttttatgccagtaaaagaaggtaagtctagaattcttggccatctctggatagtcgtccaaccccattaaacattggatattttactaaacatcatttggaacacttggactcaagagtaatacatcaaggacatgcaagcgaaattggcactcagcaataaaagaagggaaatttgattttctatatttaaaaa

SEQ ID NO: 379848 - DNA, 6098 bp, Cannabis indica
catacaacgattcaaaaagctttacaaaattattattaatcttaacatcctaaagccctctcccatcagctgcaagaagaagaagaagaaagatgtttgaattgaaaggggaatagctatttttaagattaatccccggttgttttctttttgacatgtgattctcgaatattgaatatcagttcaaatattaataagatttattttattattattttataatatataaataatattttattattttattaaataaaaattaaaaatcacccatatatttttcattaaccaagaatttcagttatacaagcacactttatataaaataaatataaatgatcatatattttaaccagaaagtagtagccagaacaattacttacctaagcttcaatattagaatatacatattgtaatgttttcacgtgataatttctcatcacatttagttgccatatgagagtaacattaatttttatgggctaatattcaacttttaactatctagaaacaaatggtagttaataatttgtgttgtaaggaaacttaattgggtaatattaattcaactaaaagctactgttaaaattatattatgtactgatgagttacatattttcaaaaatatataaaatttttaaaagagcataggttactaacagtcgtgtattgagttacctaatagttgccatataacttaataatttgactcattattgttactaatgatttattcactcaaataattattgtaatggttgatggagaaagtgataagacagtttttctttcctcaagttttgtatgggtatatggttgtaactttaacaatggtcttcacccaaaactgtgaaccgaaccgtaacccatttcgaccgtgttcagtcctacctccaacacgctatttttatttatttgtttattttttgaattaaagcataactttcactaaagagaaaattttgtcattagtgtagtaagacaataaacaaataagtaattttttttgcatatcgttcaacaaaatataaaaaaaaacattattaaaattattcaaaagactcgtacaatcatactaacaaatcaaattttcaaggcaagtgcaaattatgcccattagcttagacacaaactaagttatccatttccagtgaaacagatcctattggtgtctatgtattcaactcaacgtctttttaatactaatgatttcacatgttgcctaacgtgactcctctcccccacagtgaaagctttcaagacttggccaccactatcacatcctaagcaatccattccaaatcaaccattcaaatattttaaaattaccctttagtactttttaattaaaagagacttaaagcctattaattgttagggcttcgactaaaatcagcataatctaaacctttaaagcaacaacaattcactatctcttacttatttgttgcgcttgaaacacttatttgttatagtgtttgaatgatctaattaccaaagagagatgatctgaccttatgactatttttctaaacttaagagatgagcatagagctctcctaggtgaaggaggttctataatatgaaaataaaataatccaacaaatataaagaaatatgtttaggttatttttaatcgtagatgatgatctaatggtgaaaattaactttagaggttgattgtcaaatttcggagcttgagtcgcgccgacgagacccgttgcaggtaagttgtagcttaaattcgtaactgctttgtggtgaaatttagagtcgatagcttcagaatggcgattgaagtatgagacatgacttgatagagcattgaaatatagcttccaaatgcaagttgaatcgcgtcaatcgaattaatactgagtgattatggtcattttactgaaggttgttatgcacggtagggacgaagagaagtttagatttagaattgtgttagggttttacgattaaaaataacattattaaaaattaattaagaatattctgtaaaataaaagaatattctcttaaaatttaacaaaacatcaaaattaaaccaagaattgtcgttaaataagcacttttgatatataaaaatattttgtttgtaaaatctcttatgttatattgaaagaaaatatattataggtatataaatttcatccaaaatattgtaaataatttcctaaaagtacccttgtgttgttcgatggcatatatgtgatcgcgagagacacaaagttctatataattgacgaattgtgggcctcctgtttgcttcggggaattctccttactggctggtggcttggcaagctttggacttttacgccttgtaggactgcgtcttctcgggctacaccttggactacatcctcttgaactttttatgtcgtgagctcctggaccgcgttctaggcactagagatctttatttgtcttttctcttttcgagctctattagtgagttctctatcctcttgtggggttccaccatggcaaagaactcgactagtgtttcaagatgtcgcgcctgtaattttttctagaaatttgttcttggtagcacccttgtgataagcatgaagacaagcgaagacttgggggacttctctactttagttactttagcatcaaaatgcttaaagtaattttgtaaagtctcacttacatcttattttatgtttgccaaagttgtatacagtggtttatatgtcatggttgcttggaaatgggtcaggaacaagtctacaaatgtttcccacattgagatggatgctttaggtaactggatgaaacagtcgtgtgcattgtccttcagagtcgcaacaaggatacgatatttagccagttgaagtacctaatcaacttccataatagtgttaaatttatcaagataatgtatggaatttgtggtacctttatatttaagggactctgagagcctggagcctttcaagagcctggcttgtcgcacttcctcagtaaagggagacgttccatgtagcttataaatgggttttctctgctggttgatcatccttaggactcgtagaaggttcttttgatcaatccctcctggcaatgtgggattgtaggcatgtacgacttattttcttgttggtagagcatccactgctgctatgttcgcgggtatcaccatatcgttgagcacagttggtgcaagtggcgcgttaacgtcatttgttgcattatttatattcataagaggctgtcctaccttgatcggccaaaaggggatcacagggttcctcctccacatcgtggttcctcgaagtctgggaacgtgggagaaatgcttcgttgaggcagtcttctaggttgtctgtttgcacatggtaccttcctcctaatctagtgaacaccaatcctgacctagtgtaaacactgtgggaaaggttgttagtcctcgacaaagaggaatgagattctatgttgtttaccttatttcacggttgttcacgactgagcaagttgcgtcattcaggatcctccttttctcgtagtctttccaccctccgactaggttgttggttgtgttgggaacaacaaggcctctatcgcgtataaggtctagattagattgatccaaattgagcctggttgggttattctcacatgaccgttccctgcgattacaagtcatgttagaatgttcattatgacgtttaatcattagttacttgaaatcagtgcgacatcagtttgggactcgtggtggatgtcgggcttgaatccaatcttatcctacaatctctgcttgaaatacccgcatccgttcctgcatagtcgtgtaatgcaaggttattagttggatgttaccctcagaggtgatggcgagcgtgattagtggaaactgtcccatagtagctatcggtgtcgaggtttctctagcatggcctgagaattaaggaaataggtcgaggggagtcacattagtacgccctactccttttataatggcatcaacaagggttgttcctcctccaaaattaggaacatcgatagtgccaacattgaaggcaccattgttgttgtttgtgtttgtctgatttgtagccatttcgattctcttccaaaatcttaaaaatatttacgtttcccacaaacgacgtccaatgttatcggaggaatttggacaacaccaaataatacgagtattcaaagaaagtaagagcacccactagtagttatgcgagtactcacttagaatagcgagtactcaaagtataaactaccaaatagataaaaaagaaagcaaaaatatagaaaacacaagagaatatagtagttcagtcagagcttgatctgcttagtccaatttaggtaatagtttccagcttagtttatttgatttagatcacccctttatatagaaaataagtatcctttaggattacataactagttagtttagaccgtttttacaataaatgatagaattaacatcaaaataaatgtttaaagaataaatgaagaataattttgttcgttcttgacttaattgcagcaacgtatatgcgacttgataagtcacagcttgtctgttcatattctgcacacgagctcgcaggctctatggtgttatactcgcatgatggacctttacgcctattgttgaatgcatgcattctcctttgatcacattagtcattcagaccaaacctacataaagaaacgatctttacttatcgtaggagagatatacttggtcatcacatataatcggtatatgcacgaccagtattagcttctctcggtcctgcttatcttttgactgtgctgggcacaatatgcaactagaccatctcccggttgcatcttctctctagttcacatcatgtaaaatgaatcgatcattctctctgattgcattggttgttgtgttcgcacttcttctttctgcagttaacaacactttctgcagttaacaacacacgagttgagacaagcgcccactttcatcaaattatcttttcctgcaaagacagattccacgtggcaacttttcacgagattatgctcgtatttctaaacaaaaaattaacactacaacactagaatactaaattatccaaaccaattgaacaattattttacgaaaaagtcctaacaataatcaatatataatgaaaaaaaaactttatttaataataaaaaacatttttacttataaccagtagaaatatcttaaatgtttttcataaataccatttaaaatatcttcttttaaatatacaataatttagggctatcttcttagaaaagaagaaaaaagtcacaataaacttcatttgtttttcaactcaaaccatttcagtcgccactctctattttcttgccgtcgtcgtcgccgtcgccaccgtcagtgtcaacgtcgctttttttctcatcagaaagtttcgagtggtggaaggaaggagtgttctggtaatgataatctcaaaaccatattaattttttcttttctctgtatcgataccacaaatgcccaatcaccgatttcaattcaaggttttgtttcttatatttctagattcttaaatttgagaagtaatttatgagaaagatgtagaattgagagaatttgttttatttttagatcaatttagtgatgaattaggggctggtgtatatgaaattgtcaatggaattagtaatatgtagagattaaattgatttgctaatcacgttattttgattagtaatatttctttagacttatcaaattgagcttcgtaatgtgggacgaagctatttgaagatagaactccattgttgaaacagagggataatctataccacaaaattttgactgcttaatgcttcaatttattttttagtgtactctgagttttgtgctctgttcaatatgaatcataagtttgaccttagagggtagctcaaatgagacatgtagtttgctgccataaggtccgaaattcgagtccagtggtaatgtagttagtatttaacggtaatatctagttgactcttcaattttgcaaaatgtaaataaatacaaaggagttttgccacaaagaaaataaaagagttaagtgtataaaatcaaaatataa

SEQ ID NO: 379849 - DNA, 2473 bp, Cannabis indica
ttttttttcatgaattcgaaatatcccctattttgatttattctggtcgtcttctcaggtgaagttgtcagaatcaatggtggttctctttttggttgaattttcgttttggttgcgctgggttgctgtgtggttgtgcgatggttgctcaggaagtatagatcctgagttgaaggtgtgtgtaagtggtattggtgtaattttttttttatttgagctttatatttgtttatttcgccagctaaaagtatttttgtaatattgttactttctttttgttaaaactgaaaaaagcccaattttttttctataatagacaacttaaggtaccaatttatatttttaccttacaaagaaaaaataaacaaaaatagaaatcaaaactttttattttcaaaaatacaaactcaacaaccaaaatgtggactgctccaccttcttcgttacccagctgaaattaattggatcggatcggatggtaaaatttaacattcaatatataattagatcgtatttggataggcctaaaaatattggatgtggtacaatgaacaccatgtgccatctccatctccacgattttcattctcaacccaaaaaatttagctccaacgaaatgtagatctcaaccaaaaaataatctaatcccgacaaatctaaattcaaaaggtaaaacaaaaaaaaaaaaaagaaaaaaagaaaacggagatttctacctccattgataagaaaaaatacaaaaaacaacctaaaattaaaaattcgaatcgtattggtcagagaatttgaatacaagaagatcatataaactttgaagcttacccagaaacgaatcagagaacaaatacaatgtactaaaatttttaatggtttatttcctaattaagttgttttaaaaagttttcatcatggatataaataatttttaatttttggaaatcagataaattattaatcatataaaaattggttgatctgaataaataaataaaattatattacaactgaaaaatacggatgcatacatataatcaactgttttttttatctaaaaatagttgtatatatgttgttgatttataaatgaacaactactattgaattaaatctcatttactgttgattgtcagaaaatagttattttgatatataaaaatagttatttaaaactataaacacaattttagaaaacataagtagtagtttacaaaaaaaaaaagcaaatacagttgcatattagatgttatttaatatttattgatagaaaatagttgtttataagttattttattagattaaaatagttatttgtaactattgatactaaaagctcataatgaagaatttttgtttgttttatatggttttaaaaaaaacacattgtttaataatatgaaaaaagaaaaaaagagttctatatgaaaaaagagtgagtcctgtcatgtgacatggtgtgattgtgtctttgtcttttgtccgttggttggtttgtttgtggttctttttttagtttctgtgtttggtttttgaagacgtgatggcttctggaagttcatctcatgtagtagatgatatggaggatgatattacgttggatattgaagagtttggtgggctgtcattggaggtagaagaagaggaagaggaggatgttcggtggtgtctagttggccggtttttggacgccggaattatcgatgttcaagccatgcaacatatgatggcgtttctttggaagcctggcaagggtttacatgtgaaggaattggaacaaaacaaatttttgtttcaattttatcatgaaatcgatatcaagagggtcattagcggaagtccatggacccttgaacataaacagctgatctttgaaagacttaaagctgggtataatccaagagctctcgcgttgaatcggcttgatttttgggttcaagtccatgatcttcaacatggattccgaacggagcgaacgctacagaagataggtgattatatcagaaagtttgtggagtctgatgagaataatttctctggtgtgtggcgggaatatttcaaggttcgggttatggtcgatcttgaacaacctctgaaacgacgaatgaaaatccgacgaataaatagttccaaatggttttgggttaatttcaaatataagcatgctccaactttttgcttcatatgtggattgaacggacatgccgataagctgtgcccaaagattttcgagatgcaagaagagatgatcgtcaagccatatggagtgttcatgagagccacaactcagcgccaaaacaagatgattggctcacaatggcttcgtacgggaaggaaggataaacacgggggttccccgtcgtcgttttccaccagaacacatggtggcgaggaggctgaggaggacccgattgatgtccaggttcatagaacctgttggaaatattttagcaggatcgatttactaccatgtatgttt

SEQ ID NO: 379850 - DNA, 2026 bp, Cannabis indica
tgcaaatctattgcataatattagtttttttttatgactgatacgaagaataaaagaaataaccaaaattatcagatgacaatatatagatcatataatatgatccagtagatcaatatatagatatatataatcaattaacgaaccttgtgaagaagaaaacattttccacgaacttttatcaccacttctgtttttcttttaactgcatgtgacctataaatggtaacattataaagaaatacagctgaattagaacaccaaaatttgagtataaatatatgtgtgtgtatagtgttcatatacatatatctatttatatataacccaactgaaaagggatcataattaccatttcctgactctagattgtagaggtgtaggaggagaagaatgagtaggagaaagagaagaagaagaagaagaggaaaactcatattcttcttcataaattgtagcaacagatcctaaatttttccagcctttcatatttttctctcttttctatgattttattttaattttaggtacttgtgctctctctctttttataataataataatttaaaaattttgcttattgatctctcattagggtttttgtggattggagagaattttcatggttataggggttttgaatttagtagcaaagaggtatatttatggctagcatgtgatggctcataaatgctggccttaactccctatcaaaagggttttgcgtctctatatagaaactaaggtaaggatttattttagattaagaaatatatttatttatttcttttttttgtatggctaagaaaataataatttaatcatacaaggatttgggaaatcttatatttcagaaatttttgcattttatttggggtatggaaaatattgatcctccgagtaatatatttgaatgaaaatatatatgaatataattaggaagatgattgttttgtatttaccaaaattataaaatattctaatagatgttttcttgatatatatggaagtaataaacggttatcacgttgtaacatttcttttcatggaatgaatttaataacattaataccaggaataacatatttacctaataaactataaagcattaatcctttaccaaaaaaaaaacctataaaacattaataataatttaaaatttcaaagagaggaaagggaaaagtgtttggataaaagatggctatctttcataagatttttttagcttgtaggattaaaacatgtaaaggtgtattagagggtattagttgtctgttacacagttgattatgttagttactaggttgttaggtcagatattttctctgtttttggttgtgagtaactccgtttgaattagatgtatatatacctattcttctctcataacaaatcaataataaagtttttcatattgttcactttgtaatatagtattagacgtttaaaccttcttctattccttctctctcgaccaagtttcgcactgttgattcaccatggtcagaacacgggctactggttcaagacactcccaccgaactcctccgcctcacccttcctcttcggttctagatgctctgtcgattgaaatgcccatcgttcctccagctacaaatcatcctagagaacctcttctacagaatcctccccctgttcatcgccctgcgcacgaagacaactccaacctctattatctcagctcaggtgatcaccctgggttgatcttggtcactccgcctctgtccgatcacaacttccaaccatggcgtcgtgattttgaattatctgtgggtgccagaaacaagactgcctttcttaaaggcactcttccttctccacctgaaatagatcccctccacaaccattggactcgctgcaatcagatggccatgtcgtggatcctccacaacctatgcagatcaccctgcagacaacaagtctggaaccacaccagatatatctgcagcatctcatctacacctgcaacagtctgttgggttttatgccctaaataaaactcttt

SEQ ID NO: 379851 - DNA, 1586 bp, Cannabis indica
tttgattttaatttttttttaggaggagattgaggttgaagccaagactttgaggatgggaaaagcaattggtgttgtgagtgttgagtttagaaagaagaaaagtggtaaaattgttgctcaaggtcgtcatactaagtactttggtatttcaagtagattatgaagaaaaaattgagttcattttcttatgttaatgtatggatttagtttacaataaaggaatgatcctttttcttgttattatacaacatcaaaaggaaatagagtctagactagtataatataccaaatgaaacatcaatattttacctaaataaatgaactcattaaaattgtgtgttaatttaaaaattaaatttagtgataaagattgaatatttctacttaaaagttacaaaaaaaataattaattttctcaactatgtttaaaagaaacaattcataattaactcatgaagtataaaagaaaataatattaaaaaaattgccaattttaaagtattaatagttgatatagaggatcaatttaaataagttttttttctccatgtgttttttgggttcttcaaatgacagtgttaagtgttttttttccgttgttttatttgagatgaatgtaggtagggatagtgaaattgggcaatttcgtgggtcgagtcggggcctatcgtgaaacatccagttcgctatttgggtctttgccccacctcgctactttttttattggtttggggctgacccgacccaccccaattcaattttttctcaacacattatgggcgattaactgtatgacaatactgaccttacgacatattaaagcttattctatgaagctatcattctacctcgaataatttgatatctatgcttcaacaaacatcttaatattttaatgcacaatggtcttggcttcgtccttatgaaatttcatgaattttggaggtgtgtagggtgagattttaacagaaccctaacgagtgtaagagtaagaaaaaagacttgttaaatttaccctgaaaagaagaatattttcaatttttgaattagggggtcattttaaccaaatttaacgtgaaaccaatatccatattcacgtcttagttgcaccaattcaatgtgactagtgacaaaaaatatttcaagatagctccgggccacatttcacatagggtagcactatcagaaatgtgagatttttactatttcaattaaaatgattattagtgcatgaaaactactttttctatcaacatgtccaatagaaaagtgatacacaacggccttggctacgtccccgtgaaatttcacaatttttggagatatgtagggtgagattttaacaaaacactaatgactgtaagagtaaggaaaaaactttttaaaattaaccctgaaaaagaagaatatttttaattttttaaattaggggaccattttaactaaatttaacgcaaaaccaatcttcatattcacgacttagtagtacaaattcattgcgactactggcaaaaaatattttgagatggtccagaccacatttcacaaagggataccactatcagaaatgtgagattttcact

SEQ ID NO: 379852 - DNA, 5272 bp, Cannabis indica
agcaatttgtaccatctgcataacacaccccaattttcggagaggtttgccagaaaaggcttttcacttttttgaatacataatgcacattcatttccccagagcagcagcaattaaaaacaaatctaaatgtgggtcggattgagatttttcaagaaaatcagcccaattcacctgctgaatggagtcgtggactcatcagttcttaacaatcaaaagctgatttgcttgaaaagatttttaactgatctccccttccatatttgcaatcttcaagcatttcagtattttcacaggtcccccaaatctgtccaaaagctgaattatatctggtagttccctgttattaatattcttgaaaaactttcaggttccaagtctctgaagaacctaatatcattccgaactacaaatatcctctgagccaagccaaatattctccaaaaatctaatccaatttccattccccaccttgaaacagctcatgtgcactaactcatcatataagaggcaagaatacctttccaaggacactcataagtccatctagaacttgttttggtatcccatcatgatgcaatccatacttgctttgaattactctatggcacaatgagtgtagttctagcgaaaatctccacaagcatttcataaataaagcatttcttgatcttacattcccaattcttgagtcacctttaccatttgttctagaaaccacttctcaagagttaagtggtcactccctactaaatctccttcctcacaaaagaaacttctcatcaacctttccaagggctcaaatcattatcattggagctttaaaaagagactagtgaattggaagggaagataccactgaattgattagcgttagtttacctctagataagtagcaattcttccatccttgtctctttctaaccttcttgataaccagatcctagacaacaactttctaggattgttacctaatgtcaatctgagatatttcattggccactttcctacaacacaatcaatcttgtttgctttatgttgaagccaagctatatccatgtgcaagcgcagaaaactaccattttcatattgatgtttaagccctaaaaagcacaaaagaccttcaaaatcttaatcgacctctcaaagaacaaagtttcatcaatgtgcgcctcatgcacctcaatatgcattgcctcagaggcgtgcctcaaccccttgaatgttcaaagttccctctaggcctcctgttgatgaaacttgaataagatacagattgcagacagcccataattcatttcatctacttcctcccgaagttttgttatgtaatctcttgtttgaattatctctttcagacctcttttaatacatcataattaacacaagttttgtttcttttctagaaaaaagaaaaataaattgtccaactttaggtggaattttagattgcacttctacaatcacacctagtctttttcatgtttcttctctagttctatgtatactagaccatggaattcatctttctagacaaagcaaactaactggtgtttctttaccatttttaatttctactattatttaaagcaaatatgttgatagtgagaatctggaactaatatgcagatgaaatgaaaagctaactgtatagctatatagtgttttggtgtttattataatatcaaatcacatggcaagcccttatgtttattggaaattggaatcactactcaatgatgttttgtattcatatgctatactactttccctttgggattattaaaatatatatttatttatttttaatctgtcattttattttgttaccctctgagtacactaattggttaaattttctccatccatttttcatcatagcattaagaacatttcatatgaataactgaactgacatttagctattgatggcagactatgggtgttcagctgactgagaacaatgtcgaaaatgggttgcatcagggtcttcctaattcatcaaattatttccttagtggcatcaaacaacgattgctttcatttatatttcgaggaatatggagtgaagaaacaaatcatgctttggttggtcatttgtcctttcaatttaaatatgctttatggttcttagaaatacttcaatctttattgccttgtgtgtgcacatttgagaaatgagttttagttctactcaatcggaagttgctggttcctagatagctttagtgtggaagattctttgtcaaagataatcataataaaataccatgaatatcccagttctcgaatgaaatacccactttattttgttaaaatgacagagatatctcatttatttattcaattggatcaaaagtatcccttagcaattttactgatgaatatcattgaactatcgaaaaatgcctttttactaaactatactggaaaaagagtagattgtatccaaaaagataatcaccgaaagtacccttaattatacctcttctttttgttctttaattatatcttttctcaaagtattattcactcaattagcaaaattttcacgttttgttttcttaattttcagggaattattgcttctgattagttatttatattgctttcagaattattttcttctttcttgatattatgattatttgtgtatctgctgatttctttgaaatggagttctgtgatgaataatatagtgtcccttaaaatcatttgcttagtggacactgaagtgatatttcccgggtgttagaagttttatgcaattgtatatggataaaatggaaagtaatgggctctggtttatgccattttgataaggaagagcatactttgagattggtcagttgcttaagtagcattttacattttgtttttcttttctttatataaagtgcatttacatttgttaatttgaaatgtctctatttttagcacctagagaaattataactaatttttttatatgactgtaaattgttattatagtagacattctacctgtttctgaaaaaattaaaataatttttagtgtcaaaaataaggttcaatctttcagctgcatgcgtgtaaaaagaaataagtatgtgtgcaactaaatcgttgaactctattttcgatattgtaaattattcagaattacctactataactataatgttgactggcagataaacaagataaattataatatcttgaaatgccaaaaactaaaatgtccctaccaggacaaaaatggtgtcccttctaagttttgtcctataaatatatatatatatatatatatgttagtttatttatttattcatgtgtgtttgtttgtatttatttattagctaggacctgagaatttcgttttggttttaataattgatttactttgctttttactgcttcagagggcccaaaacctaaagaggatgttttatttccacttccaagactatgttgacttgattatatggaaggtatggtctcaagaagttgtacttcagttgtagtcttgtgatattgcctctccatgtttgagagcattgcttgcaaattcttcttattgacatatcaattttgtagtgcgtgcgtgtgcatttttcactctaaatgaccaattgacaagtttttttgtgttcaatacttcaataggtacaattcttggaccgccatcacctgctaatcaagttcggaagtgttgatggagcagtgagatattctttctagcatttttattgtattgtagtagattgagtatagataaactgcagggacccactctttttatcacaacccacccttcctcctctattgggcataaaacttgaggattgaatactgttgaccacacaacacgatgctttctggaatgaatctccccattcaatgcagttggacttttactgattagatgtgagctccattatatctaggcttgacgacgagtagacattaaatatggatatgattctagtagaacgcttattacgtaaattccttgagcattttgaagctgtgggtagctcattatgctctgaggagtctgaactagtcagctgtgagaaacaaagtcctttatcaaagtacagggtgattgtggttacttgatgagtgacaaataatttttgaaaatctggctgtctattttgcatcatctctgtaaattaacttccataaataggaagttctaaattataatctgctcttgtgctttctcagaatcttcaatatttatttccattctcattatataaatttttgaaacttcaggtatcacgaactccagatcagcacccacctttttttgctgtatataacatggagacaactgagtttgtagctttttatcaggtaaaaaaccttaaaacgtaatttctgaaagaattatttcttaaacctgactctgacacatttattgcctgcagcaaaattctgcagatgagctatatcttttgtttgagcagtttagtgaccacttccatgcaacatctaaaaattcgttatatttgaatttcatatcttctcactcaaataatgttcatgccagagaacaattgagatcacttaaaaataaagcaagtagttcttcacaggtgagtttttgcaaatgctattttttcatgttcgttttatatcttctactctatgacttagaaatgatttacttattttggatttagaagcaaggttttgtatgtggtttataggtctgctttttcctttattaacaaccacatgtttaattggctgatgatttccagtttgtgaagaagatgctgagctccttgcctattaattgtcagtcgctgagcccttctccctattttgatcaatctctctatcgcttcgatgaaaaggtttgaccaagaaacttatgattttcttaaccttattatgaggctgtaagttgagtaagcattcaatttgcgaaggtctcttcatgacacactagtgagaattgggccccccttgtaatctttgaaatgcatggactggttaggaaattatggtagacactatgtacttacattttgtttcctatgaagaaataataggattactatgtacatgtgcatttgtggtttagcaaaaatggcagaattgagtcagttcaggaacttataaaatgattttcatggttctctattgttttccaataaataaatggagaagtggtaagcttcatcttatgatttgattaatgtatgtatgatgttttagataaaatcgagttattattcaaaaaaaaaaaaaagaaaaaaaaaagaatgtaaagaat

SEQ ID NO: 379853 - DNA, 4743 bp, Cannabis indica
ttttttatctttttctttttaacaaatatgtcaaatgtctatttgatttacttgaagaccttgcaacttcgccgttacaagtcttgaatcacatgtagctgctttaagtttctgaagagcatattgattaaaactaaaattgtgtattaagaaaccccagaggttcttcaatctcacatggtatttcctttatggtttctagatgtggagcatgtgggaacatcaatattgaaacttttatctctaaatttagtaagctctttttggtatattctacaatgtgtgaatcttaacaaaagttatattactcaggctcctactattggtgatgttgatggagatggccatactgatgtcgtggttcctacaatatccgggaatatatatgttcttagcggaagggatggatccattgttcgcccttacccatacagaactcatggaagagtgatgagccaagttcttcttgttgatttgagcaaacgtggagagaaagccaagggactttctatggttactacatcatttgatggttatttgtatctaatagacggagcaacatcatgtgcagatgtggttgatattggtgaaacatcgtaagatattattacagccattgtttctggattattattaaaattctttcaaatttcaaaagttagtctattcaaatatttttacaaacagatatagcatggtcttggcggacaatgttgatggtggagatgatctagatctaattgttacaaccatgaacggcaatgtcttttgcttctcaactccagttcctcatcacccacttaaggtaaataggtttgaagttgattcttagatacctgcttctgtatatttcttgtttatgtcctaactttgacatttcacatctttatcaggaatggaggtcatctaatcaaggtagaaataatgttgcctataggaacaaccgtgaaggtatctttatttcaccgtcgtctagagctttccgcgacgaggaaggcaggaacttctgggtggaggttgagatagtggacaaatatagatatccatctgggacacaaggaccgtacaatgtcacagtaagttgcttcttccttttgccaaattatatgaaccttatattgcaaagtaactaaactaccatttattttttctgtcattgaatcaattttcatgttagactaccttgttagtacctggtaattaccaaggagagagaagtataaggcaaagtcagattattaatagtcctggaaaacatcgtataaaacttccgacagtagcagtaagaacaacaggaactgttttggtggagatggttgacaggaatggactctacttcacagacgagttctccctcacattccatatgtactactatagattgttgaagtggctccttgtccttccgatgcttgggatgttcgctgtgcttgtcatccttcgaccacaagaggcaatgcctttgccatcgttttcgcgaaacactgacttgtaattgtaacattcaaaccctgatagaaagcttcatctcaaccaatgccgagactcggcgataaagtatttagcgctcatgagagcatcgatggctcggccacacttcagtagataatttcctaggctaaaattgtgaatggcccgagtcgaagctgcaatttggatgataggtaatcgggagttgtaacatagataattttgagttatgaactaaaggattttttggattttgagtccccatatgttttgtcagttctcatttagggattttcaatataaatcataatcatttggagggaacggatatttatactgtgaaatgttgtgttagtctatcttaatgcgcatgcacagcacacctgcactttgtttaaactaatatatttatattgtgaaatatgagaatttaccaccataatgtaacataatttgtataatttaatatcgggtaatgtatcctatcaacacttccaattaagcagttttagatttttagttcaaaaaacaaaatgggtagtttatcctttttattttcttgggacttgttaagtatgacttcgatacaacattgagtccatcataacaattatgtgatttgatatgtcatttcgaagcacaaattatgtgattgaatcacaattttcgaaaaaaaaaaagcaacttgtcatgtttacatctcttgaatacaacggtattttagcccattgaccaatgcagcaataaatagaaaagccacaactatagccataataataccctcagaatcagatgatgagaaacattattaacagattgtaagaacatttacacaataataacgatgagtgttgataataacgtttcccacttgtaccattttccaattatagcagtttttcaattcaaggagtatgcatgagccatgaacagtgcatttccagcagagcctgcaaccaattaagctttaccaaacctcttttaatagtttcaaattcaatacatcttctgttcccactaacttttaataactacattttaaatattatatcaaccatttcaaggcaaggtataaataatgctaaaattttaagcactggcaaaagtatggtaaagagagttacttattctgaggaaacaaatcattcagtataaacatcaaaaacaatatgaggatatgtatatagaatctacaacagttacagtaatggttggttcctaatcccaatcaagttattgtaatagagagaatgttgtttcaattcaagaaaacatgtttctgaacttgggatcataagaaagatcagacaagacagacttgaactatattaaagaaaaaaacttattataaggataaacaaaaatagagggaagagaagaagatgatgatgaagaaactagaaaacctgtaagactggcctctttccaagcctcttgatctctttgtccattttcccagtaagcattaaaccaaacatcttgtaatcacagagaagagaccaaattggatgcccaaaagtggctggaatatttccttcaatgaagaaatggctgtaccaagcgcatccatagccagataatggcacaaagagcagaaaccaccaactaaaaaacaaagaacataacaagaagaagatactagaagctgtaccaataaaatgccaacgccttgttaaaggtttcgagtgttgattcacataaaaagcccaaaactcatccatgttcctgaaattcatatctgataaaaagaaataaagggagaaacttttatatactgaaaaccttaattctttcgctaccttgttcagaacccaaatccaacaaatcttcaacaaataccaatcaagttcgccactttattcaaaacccaattcagaaacgtaaaattattgggttctgaagttgacccaaatcagaaatcttatcccttatcttgatggaagagcttctgttctggataaccccaaaattgaatctgggtatttgtcaatgattaatgaaatgatgattaggaggtaaatcaaattctgagtttcaccgaaatcatcgttaggagaagatttccaaaaacataatcttttggagttgaccaaaagccaaagagaatgaagcaagagaatcttctcttctttcttcttcttcttcaaaaacaaaggtgtgaatagttttggaatttagtgatatgttgtttagtttagattgctgacatattttgtttgtggaaattttggactatggaaaaggtgaagtgtaattctctttagaattgcgtgcttggaaatgaatagccaaattaggtttagggtctaagaccagtccacaattttatttcaactcatcattgtcttcaccaattacccaaattagaaccaaccaagaaattttgcttcttgtggagatttcattattaacacattatagtaagtttctcttaactcttattattattgttgttttgtgacaacattcatgtagtgaatattagtcatttctattatttttttcactttaataaaaatgaaaattcttttacatttttttgtaattattgaaagtgatacaaataatatataatattttacacctaaaacttaaggtatgtttttcaaaatctaagttcttatactaagagatctattgatagtgcttgagcacttgtatataccataggagcattgctatttggccagtaagttggaggtgataaccaattacaataaatgacacttgaaaaatatttttaccatttctcttgaatattttgtcccgaaataaaagctgcttgagtaggacagatcaatcgaaaaagtatcggtctaattctattagcaatgattttgaaattgccttgtacttgtagactatattgcaaagagaaataggtctgaactgggatacttttttcgggttaggcaccttaagaatgagggtcacatttgtagcattgagacccctatacatagtccccgattgaaaaaaaattcaccactgcctcacaaaaatccgtacccactgagcaataatgtttgaagaagagaaccgacataccatccggacttggggccttcaaaatttcataaagaagagtgtttgtctaatttcttcatgccccggtataatttctaacgcagcctgctctagaagagagagttgatccgaaattaaatagtccagattctctaaaggaccttggactaggttggtaaaaatgtcctttagaaaatttgagaattcactagtgttgaccgaggttttcggcaactattaaaatat

SEQ ID NO: 379854 - DNA, 2027 bp, Cannabis indica
aaaaaaaaaatagtatgagtatgaatatttatacgtaacatgtgtatgactaaatataaaagcatgtgtgttgaaaatatttaggcattagaaaaatcttaatttgctttgttttccaattgacatatacaccttttatgttgctttgttgatgcaaaatgtgatagtttttgtgttaattttcaacagtcgattctaaaaacttgcattggtgcaaaattaacacatacaatgtaaaagaaaaatccaaatctaaatacaaattgaccatccaaatatttaaatttgaaaaccgcaatatacctacaaatcaaacaaacccaaatatatagaaatatttttacaaaagagaaaaaaaaacaaccaaaaggttcttcaatcttaggcatttatcgagttgaacctgaaaaaaaaaaaaaaaaaaaaaaaaaaaaaaaaaccttcttagagttgacaaagagtgagagagaacgagaagaggacgagagatcgcgaaccgccgtcaaaagtgagatatcaggtctatagatctaagaggagagatcttagatttggggtggttgtcggaattgcaaccactaccgcctaggaaaaaaaaaatattagagtgagagagagaaattttactaacgtggtgattgtccatgtaacaaatcgtctaaattgttatgtatcaaatttcgtctccgaactttgacatataccaaatcataccggccttttgaactttcatcaacatcaggttgctattagtaaattaaattggacagaaatttttgaatttaataatcttaataattcaagtgaaatttttaacaacttaaaaatttcaaaaaatgcaatttagtacatgttaaagtgctgaagagaaacatccttattaacttataatttttactaaaaataaacaagtagtgaagtaattggttgtttcaactttttgttgtggtcaagtactagtttcaaactttcatgtagactgtagtagtggcagtagtagtagtcatcgtcttaaataactattttattttaaacaagttggagacatgtgattctagaagtttatatgcttacagtgaactagattagagttgggtgttgtatcttaagacttaagagtcaggagcctaatttataggtttcagaagcatgttgcccagctaggatatagtactactattaatattactcttatttattatataaagcacaccatagaaattaaatataaaattaatcacacatcttttaattatgactttgagaattttaaaaagaggtggaaaaaaaaaaaaaccaacaacaaccattgagatgaaaactaattatcaacttaggcggcagtgtagttattaagttaaaaaaagaaataataataacaatggaactaattatcaaaatggcatatattttggcaaagtatatgaacagagcttaagtttattccagctcatttcttattttggtgttttgaaaatttaagaaccatgcactttcaccaacgatgtgacagattcataaacaagtttttgaccatcttaatgaaaaacaataatggttttttcctggttagtattgtatttattaattaaaagaagctatagcctataggtagatatatcctggtaaaaaaaaaaaagtgtggttgaaactgaagttcctcaatattaaatgtcaaaaggacatactgtttggcatatgtaatggttaatagatgattaatagcgcccgaaacttcttcaataactaaattataaataataaaattcattataattttggattctaaagtgttaattaggacacttaagccttattcagagggcaaaattaaaataatctattgtctcatgtttggattgaatcaattaaaaaaaaacttatagctaagagtgtttataaaatagttcaattcaattcgtacgattcgattcaatcaaattcaatctgtaaagtgtaaatatctgtacttttacagattagattgaaaaatctaaaatttgtacttatgcaaattggatattgat

SEQ ID NO: 379855 - DNA, 1817 bp, Cannabis indica
atcttttggttttagtcaactgggcccctctgcactattcacccagcccacttcatgtcagcccaatgttctcaaccctacattacatccaacatcatcatcttcatttcctttccaatactcacccgtcgaccaccagagtatttacccaaccacaacccaagctccatttgcccaacccaagcaccatctcgagccatcccacctaaacaaacagcaacccagaactcacattcactatcccagccaccttcatcactcacggctcacctcgcaccagccattttcatcatccatccccttaattgcacaccagagcacacagccagcaacccaaaccaactccgaagcccccagctcctaaacttgacccagccgagccacctccaagttcaaaccaacgacctacactagcacccaatcgagcagagctattcccagtcgcccccacaaacctaacctccgctctccaatcacccaaatcgaaccccacaccacttcgaacacacctccgtagccatcaaatcgcacctagcaacctgtcactctactagcaagacccaccataaccacataacactcaacccagctgtttcctccagtcgaagctctcattcgccagttcgacctcaaagctcaaagcaacgacccatacaacaacccagctcactctcgaagctcgaaccaacaatcacatctcccagctgctaattcgaacccagcgagttagaacacacttcagaacatcgactccaccaccactagtccgattcatctctgcacaacccgaatcaccatcttagcccgagctaagttctggtttcgtgaggtaacttaaaaattattttggttgaattgcatacttggtggttgtaattggacctgctagtattctgttacattaaaatggtgctaaagattatcattatcaatcaaatttgttagtcgagtgtgataaatggttggtttggatgatttgatttggaattggtgagagtttttaagaatagagggctgcgacaacttggtgattttaagaaaagcagtagttgtaaacaggttgttgtgtgaaaaaaattgtttatttgggggaattgaattaaggtagctgagttgctattttgacaactctgttgtgactgtaaaatttcttgtgtggtgatagaaaaattgattgattgtggtggtgatagtgagtataagtgctgtgaatgctaggttggtgtgggtgggcagattggtgatttttgaacaagtgtggaaggttgtgcacattgaagtgcattgtaagaattatttttgtgttgaggggcagcgattaaaaagaaaagcagaaaaaaaaacttgttgtgttagggtagtgtgcaagtgaaaagaagagaaaatgccgaaagttaagaggactgccaacaagaaaaaaaagaaatcactgcatgaaattcctaagtttcattgcaaggcagacgaaacaaagtatcacgataaggtggacaatcgagagttttatatggagaggggattagtagccgatatagaggacattgatgagttgcccgaatgggtcagtgaaacggttcataagcgagattggagactttttgtctagcacagagagcaggcaatcatggaagttgttaaggaattctacgccaatttcttatcccaagaatggcccactgaagtggttgtgcgtgaagtatcagtctcattctccgctaaagaaatcaacaacttttttgggtaaaaatcaatcgaatgccaatactccgctcaaaaagggcaagtgagcgacaagactgtgagtgacatgatgccgg

SEQ ID NO: 379856 - DNA, 2284 bp, Cannabis indica
gcacaaaattcgctgggaaattctacacaaactcgtgagtcaatttgagaggtctaaaacattaaaatagtggcaagggtgtgagacacacttagctctatcttgaaatgcactttcatatgacactttaatgtatcatctggataaaaagtgagagagttatggttattttagtaagcggtgtgcactgctgaaagtgactacgaggttaagtcgacctttgggcgctcagattgacataaaatgtcaacatgagggcccataacttggtttcttctactttagacatattttgagatacttgaatgatgtgatagctatctttagttcattttttgaatctagttaagttttcttggcaattttacttgatatgcacgggtgatgctcatgtaatcactagtgatggctaggtgacaactgaatgatccctagtgcacacatgtacatgagatagtgacttacagaagcatccaaatcttattttagcagaaaaataagatagatgctcggaacagacctattgtttaatggacgaaacactgagcctcaggccaaatatcaacttgggcgcctagtgtggtgctaggtggtgtttaggagctaaacaaccacttggatgatattttctcctaagtccaagtctcatatcttgttttgggagcaaaaaatgaataaagtttgagacaaattcgaaatcggatcagtggaactacatgttcgtgtataacacgtcaacttgggtgcctaacatctcatctgagctccaaatggctttaattttcccaaaagcatttttatcttttattgtggatgaaaataaggaaaatgcctgaaagacttctccataaagatgtgttagagtgccccagattaaaatacgtcaacctgtgcgcccatagtggcctaggggcatgcgctgggcgcccaggtgaaacatctttgaaatttgtgttctgatcaatcttctatttggtgaaaagtactccacgaaattcattttcatcaaatttgcacacacattactcgatgaaaaaaaattggtgcctaggttgaaatgtaaactttagtgcccatagttgggaatgggctctttcaggatgtctttgataaatatcacattctaggattgttccttgataaatttaaggaattggggtccaagaatgtccccaaaaacctaaaccctggccgttgtatgcccaaatagaataggtgcaacctgggcgcccattagggcttcatagtgcccgggtgccgtacacctacctctaaagttttgaaacttagttagggccatatgtctcatgtatcctagggcaatggttatgcaaatcacccataggaagttgccaggaaccaaaacttatgcaagatgacactcatgatgtcaacctgggcgcccaacgctagtactagacccagtttgagccctaggatgtccacatgacattctcagcttcatggttcatcgttttagggtcactaggacctatccacttaaactttatcgaaggataacacctaagaacgactttgttggatcttggtgcccctcagggcatcccttgatgtcaactagggcaccaacacagttcccaatacccaagttgaacaccctatttttgagaggtagggcctaaggttattttcttcttgccacgtgtcaaaaatagtgttcatgtcattgggtcaaatttctgagtaaacgcataagtattaaaatgaggggtaataaaagacttaaataaaaattttaattattttaagagtactaaagtgggtaatttttataaataaatagtatcaattaatcattatccaaaataaaagatatcaaatttgtattttagcaaaataaataataaataagtatttacttttgtcttatataataaaataattgacaataaattaataataagttattattttttatataatttaatgaaaacatcaaattgtacaattgtatgcacattgataaaatttgatacaattatatcacgaacttatttatttatttgccaaatattacataatttttacatttttcattatttactacaaaaatttaggtggcgtttggtaacacttttttaataagttttttgtttttaaaattagaaaagtgaaaatattttttaaaaaacatgttctataaaactgtttttgcttttcaattttttaattaagaatcaaaattttaaaaacaaaataaaatcactttcaatattttttaaacagttttttttcttaatcaatattttggactccgataaga

SEQ ID NO: 379857 - DNA, 2580 bp, Cannabis indica
  modified_base (74)..(74): a, c, t, g, unknown or other
tcattctcgtttgcgttttgtgtaacgtttttcttttttcgtttgtcctttttgtgatggtatgtgctattatnttttttacagctatttatgtcaaatgcaaatgtaatttaaaaggttgcctctaataatattgcatttcttttgaatgccttggatgtgacatgtgcccactcatgcttggcaatgaagtatagcctaaaattttctgctctgcttcatgcaatagatctgtttcatcatttatcatggtatatgctgttgttgactttattcacttcttttttcagattccaaacatgtcaggtacaatgtcatcatcgtccattttgccacggatgcaggtcagtagtgaaactgtgtgcttattgcatatcatgtatatggaagaagttgaggattgagtaagcagagtgttaagtaacgctcttagagtacgaactgagacatgctaaagtctttccagattttaagtatcactgtctaacctggtgtggtgcacatagtgattttaagatagtgaaaattgcagcttaaaaatgacttgagaaattatgataattttaagaataatgtatcattctttaaaattacatagagatgacccatgttggatgtgcatcgatgtatcatagccccatgttgatataattttgctataggtttttacacatctttcttctcattttaattttgccacttactcttaatccttttactgcagcaattcggactaactgctagcaatccacaaagaaaccacacttcccagattttgagtgatcaaagtatgtcttatttctcctttttcctttcatcttcaatatctgatgcactatatgttgctcaattggctaaaagtgcattttggacgttctccttgcagtgtttaacatgggagcgggaaatccaggatctttgttgcagcagcagcaacaacataatacacaaggagcatttggaaatatgacccaaaatgctcagaatcttcaatctagcatggcaacattgcagagcaatccacagagtcatcccaatttcgggcaacaaagacagcaaaaccagcagtaaaaactgtagtgagttggttgtttgttttgtaattttacaaacaatttattgtgatcatcagagttttatctgaaatcttgaaatgttgttacttgtgtactctttttacaaaggaatatagtatagctcatgttattctttgctgcatcaatttttcttgttttttgttttggttttaataagactttattttagtcttcttgttcttgaacgtttctcttaagtagaatatttcattttatggatcatgagaactttttagtttaattgtttttcataattatgtacgttgtagttatttattacgattagtgaatttttaagtaactatttgatttttaatttttaaaattataagttattttaatttttttgaaaatttacatctgacatccattttaatccaaaatagataatgagtgtaccataacatccactttaaagagtgtgccaaatttactatataccaacttgtttaaggaattcccaaaagaatattcaaatatgagaaatatatatgtaaaaagttatttattagttttgatactttttaaatctgatatcattattatgttagtggattaaaactaaaataatattaatttgattttaatcattttggttttgaaacctctcaaatctgtctttgcctatagacaacaataaagataccctttttactcatatttaattatgttcataggaaagacaaataattatgttaacttagttgagtggaggtggaatctttgtaagcaagagagacaagtacttatgctaaagaacactgttgaggcaaagctttggtttatatcatctttaacataaattaatctcccacctcagaatactttttcttaatacataataatttataatcaacatatggtactatactcatatttctaaacctagcttctagaaacttatacatgtattatattttaggtataaaaaaataatgtggtatcctctatttttttttgtcgaagcatattatatgtacatttttgagttacacaaattgggattcgattccagaacccctcacacacgcacccctaataattctctattgtcaggattcgactttaaaatttagtggaccatagaaaaaaatatttttaaattcttatttagaaaaaatataatatttttcaaaatcagtataaaatgagataatttttttaacctctaggcacggtttaatccacttatgtccagagtcagacttgcctattaccatttgagctaaccaatttgattttgtaatttgtaagtataacttaaatacaaaaaataattttattgcccatactcattaccatataagtccatatatgattatcttactatacacttctcacattgagaaagttccgattcatctcttctccaatgtgttgttaggttaattgggtaagtgtttcatacaataaataaaaagcccttaacaaacgtttataaagtataaaatttagatacatatatatatatgcatgtcacaat

SEQ ID NO: 379858 - DNA, 5025 bp, Cannabis indica
atatatataaatatttagcaaaaccctcaataaatctaatgcaccaaacattttcttcctcccttctcggattccattcttgttcctaatcggtacgtttttccatttattctcagcatcggtttaagatcgatctttttcttttcttcaaatctttgccttggaataatgcctaaattagggatagggtttatagtaacagtaggtatgacaccgatctttttcggattggcgtttcagagctttgctactcgtgatgttagaataggatcgttgttttttgcttttctagttttggtgacgatgacgatgatgaaattttgtggcgttttcagtagcttaaggaactttatgcttccaaagaagagagcttggcaagtaacgattgttgaagacgatagtgattccgccaccaccgattcgaccgccgaaggctcgtcaagcgttaagaagcgtcgaattgcctccaccgccgcaggaacaaccgaatctactgtgagagacatcagtaatagtattataaagcatagtagcagtaccggagctaaggggaaagaacacgctcacgacatggctcggcataatggtaacgctccggacatcgacgaggatctccacagtcggcagcttgcagtctatggacgcgacacgatgcggagactgttcgcatcgaatgtcctcgtctctgggatgcagggtctgggagctgagattggtaactatcttagaaatatttttcttgatttgattatattatataatttagctagaacttggatttatcggtttcaagattgctagtgtctgacatagattagccgcctgattgcttaagatcggtttgtttttgtattttttaattaaccggattggatggtcaaaatttgttaattattaatgactggagatgatgttgaaggtaatttggatgtatctgattgtaatttggtctaacttctttgatttgcagcaaagaacctcattctagctggtgtcaaatctgtgactttgcacgatgaaggaaaggttgagctatgggatttgtctggtaattttctcttctctgaggatgatgttggcaagaacagagcacttgcctctgttcaaaagttgcaagaactcaacaatgccgtaattgtgcaaactttgactacaaaattgactaaagaacaactttctgattttcaggtacctcattaattatcttttttcttagtagcattgctattgtgttggttgtgttttctttaggttaagttttcttagtacgacagtgttctaatctggaattataatggtacatggtatataacatgttctactttccatgtttgggatgtgagaaaatcgatgcctaattttgcttttgaggtaatggtttatggatttacctacttattttctcgtttacaggctgttgttttcactgatatcagttctgaaaaggccattgaatttgacgattactgtcataatcatcagcctcccatagcattcatcaaatctgaagtaagaggcctttttggctcaatattttgtgattttggacctgatttcactgtttgtgatgttaatggagaggagcctcacacgggtattattgcatccataagcaatgacaaccctgctctagtatcatgtgtagatgatgaaagacttgaatttcaagatggggaccttgtagtgttttctgaagttcagggaatggcacaactaaatgatggaaaacctcgtaagataaaaaatgcaagggcttattcattcactcttgaggaggataccacaaattttggtgcctatgaaagaggtggtattgttactcaggtgaaacaaccaaaagtgttgaaatttaagccatttagagaagcactaaaggatcctggtgattttcttctgagtgatttctccaagtttgatcgtcctcctgtcctccacttagcattccaagctctggataagttcatatctgatttgggtcgtttcccaattgctggctctgaagaagatgtacagaagcttatatctattgttagtagcatcaatgacagttcactggatgggagagtagaaaacattgacccaaaacttctgagacactttgcctttggtgccaaggcagtcctgaaccccatggcagccatgctcggtggtattgttggacaggaggtactaaaggcttgctctggaaagttccatccactcttccaggtcagtagctttatactgttttaccctttttatttgtatatgagttctcctttatgaattttgatgctagaaggctgagctgttaatggttgtgtggatattcttctacttattctgtacctgacattttaagttctcttataagcctatttgaacacaaccattcatgcataattgtactatacggttaaacttatgtacttcatatagatataaggtctatatattcaaccttttattcattctttacaagtatgtaatttcttgcttcaagaagattttcatttgtctcaaatcatttgatttgtctttatattggactgcagttcttctactttgactcggtggagtcgcttccaacagagccaatagattccagttcatttagaccattaaatagtcgttatgatgcccagatatccgtttttgggtctgcactccaaaagaggctggaggatgctaaggtttttattgttggatctggggcacttggctgcgagttgttaaaaaatgttgccttgatgggtgtttcatgtggcaaccaaggaaaactaacagttacggatgatgacgttattgagaagagtaaccttagcaggcaattcttattccgtgattggaatattgggcagcccaagtctacagttgctgcgtctgctgctgcatcaataaatcctcatttaaacattgaggccttgcagaatcgtgttggctctgaaactgaaagcgttttcaatgatgttttttgggaaaatttaaatgttgtaattaatgcccttgacaatgtcaatgcccggctttatgttgatcaaaggtgcttatattttcagaagccgcttcttgaatcaggaactcttggtgccaaatgcaatactcagatggttattccacacttgacggaaaactatggtgcctcaagagacccacctgagaaacaagcgcccatgtgcactgtgcactcctttcctcataacattgaccactgcttgacttgggcccggtccgaatttgagggtttgtttgagaagactcctgctgaagtgaatgcgtacttatccagcacaagtgaatatactgcctcaatgagaaatgcaggtgatgcgcaggccagggataacttggaacgtgtccttgaatgtcttgacagagaaaaatgcgattctttccaagattgtgttgcctgggcacgcataaagtaattccttgcaaaatatgctgctctcattagatgctagcttataacttccttctgtcagtttctaatattcattgtctgttttttccctttctttttcatctcagatttgaagactatttcaccaaccgtgtgaagcaattaatctatacatttcccgaagatgccacaactagtactggtgctccattctggtctgcccctaagcgattcccccgtcctctgcagttctcagcagctgatcctgaccacctgcactttgttatggcggcatcaatactaagagcagagacatttggaattccaattccagattgggttagaaagcataacaagttcactgaagctgtagacaaggtgatggttccagaatttcagccaaaggaaggtgtaaaaattgagactgatgagaaagccaccaacattagtactgctgcatctgttgatgattctatgataatcaacgacttaattacaaaattagagcattgtcatgcaaacttgccacctggattcaggatgaaaccaattcagtttgaaaaggtctgttccatgtagattttgattttgaattctttttacagatcttcatgatttactaaacctacttctaacacacaggatgacgataccaattaccatatggacatgatagctggtcttgccaatatgagggctagaaattacagcattcctgaggttgacaagcttaaggctaagtttatagctggaaggattatccctgcaattgccacttccacggctatggcaacaggtctagtatgcttggagctgtacaaggttttggatggaggacacaaggtagaggactaccggaacacatttgcaaatctagcactaccattgttctccatggccgagccggttccgccaaaggtcattgaacatgggggcatgaagtggactgtttgggataggtggattgtgaaagacaaccctacgctaagggaacttattgaatggctgaggaacaaaggacttaatgcttacagcatctcatgcggaagttgcttgctttataatagtatgtttccacgtcataaggagcgaatggacaagaagatggtggatctggcaagggatgtggcaaaggtcgagttgccttcttatcgccgacattttgatgttgttgtggcttgtgaagacgacgatgacaatgatgttgacgtccctctcatatcaatttactatcgataagcaatggagttgtgattttaggattgatagatctgaaataagtgttcaagaatcaagattgcatgtttgtaaatgaacgttggagacagattgtttgatatttatctcaccaagtcattagtcattattcacacatttacatgtctcatataaataaaagtatgtattaaaaatatataaaatatactgagaaccttttatttggttttgatatttgttggtttttctttcttcaaatgcttctgtctttttcttttcctgcagcaaccaaaacttatacgagtattgtagcaaaaaatcctaaacacaagtatatgtattgtatttaagggttatttcacaaaaacataaaaaacaaaaaaaaaaaattacaaaaatacgattttacaaaattttaaatattt

SEQ ID NO: 379859 - DNA, 2079 bp, Cannabis indica
ctttgggataagataggagatgatatctcaagagaagtgttgggattcttccaaaatgggatactcccaaaataattatatgagacaactatctccctcatccccaaaaatgataatcctcaaagtgctaatgattatagacctattgcatgttgtaccacagtatataaatgcatatctaagttgatctgtactagactctcaaaagttcttcccagtctaatacatgataatcaaggtgggtttgttaagaacaagcagcttgctcacaatatactgatcttgcaggatttgctcaaaaggttacacttagaagaatgtgtcttctagatgcataatgaaaatcaatttgagcaaggcgtatgacacggtgcattggtactttgttgctgagttgttaaaagggctctgcttcccctccaagttcattacttggatattaatttgtcttcatggagccttttatgctcttttgatgaatgggaggctacaagggtcttcgtcaaggagacctgatgtctcccctcatgtttgtgcttattatgtagtatctaactagattgcttattcagaaatctaaaataaagggtttcgggtttcattcgctttgtaataccttagggcttgtgaacttttattttgagatgatcttatcatcttctgtagaggcaatgaaaattatgttcagcttattcaggaggcttttcaagtctttagtgattctacaggtcttgtagccaacaaatccaagtctacggtatactttggaggggttcatgatgattgcaggcgaaagcttttgaatgtgctgaaaatggatgagggtaccttcccctttaagtaccttggtgttcaacttagaccaacaaaatggagagtagctgattatgggattatcattgacaaaattcataagaacttacataactgggcaagcaagaatttgtctttcgcatgaaaggctcaattggttcactctgttctttagggggttagaaattattggatgagtttgtttgttctccctcaaaatattacagcggctattgacaagtgttgtggggactttctttggagtactaatggtaatcgaagcaaacttcacatcccatcatgggaaaagtttgtctttcgaagaaatttggtggccttgggtttagagagggtaagaaacaaaatattgctctaataattaaatttatttgggcaatatcaagaaagcaggacaatctctgggtgcgttggatagatgccatctatctaaaggatcaaaacttttgggaggttgaatttaaacaagattcaagctggtacttcaagaaaattctaagactccgatcaatggtgggggaaggagatatcattattgaagctgttaaaagagataaattcaaagccaaattgttctacttttcgttcatccaagctcaaaaaataggctatccggctaaaatttgggacaagttgttaatcccaaaatacatatataatgagtttaaatttaaatttactatacatatttttcttatcttttataattaaaatattataattcaaaaagttaaactcgttatatatatttattttttatcttatattaaatatgattatatatttatttatatatttttaatattgcaattcaaatttaaactcattatatatctaaacaaaatcttctgaatatcatttttttactcaatctacatattgtaaaaaatttatatatttttattattgtttttttaaacaataaaatagaaaaataaaatatttatatatgtttctaaaataaatactattgtgatactgttacattactaaaaaaacatatttttattattatttgataaaaaggtggatgatatttctaaaaaaataaaagtattataaattaaaagtagagcggttaaactaaaattacaattaacaacaacttttaaatattattatattttcttttaggaaataacacttaaattaatttttttttaataaaattaatatttttattgaataatcttatgcggttccttcattctacaggtgaagcactgtaatttcttgagcttttttatc

SEQ ID NO: 379860 - DNA, 3156 bp, Cannabis indica
ctcctcctactcaatggccaacaacccctcagacactcccggcgacgatttcctcgaccaaattctgggctacccatctttcgcttcagccgataacaacttaacgccgaccgacgcaccgccacctccgatgatgctccacctcagttccgccgacggcccctccacatgccttcagttggtggtggtggtggtgctgctgccttcctgggtcgtgtccctttggggctgagcttggagcaaagcaaagcagggtttttgaaggccgaggaggcatctgggagtggcaagcgatttcgtgatgacctcgttgatgctactgccagtgccagaggaccttcacatcttaaaaatgtaacatttcattgcttttcctcttccttactccttatacttactatttctttttgggtttgtatttcaattacatcacatataacttcaatctttgtatgttttgtttctttcaaacttattcacttgcatgtcatcaaatttgagtattgaacttacttgcttttctcaccttacctcttgtttgtttgtttgtttgttcataaatcaaacttatatggtttatacaaggctttcttggtttagataagaattgatgtctgagattccattggggttttggatttataattgcagaaatgaatgagtttcagatttataggaaaatcaattatgatgaatggttcttccattgcttttgtttctgtactcaattaaatattcctaatttgctgttatcaactttcttcttgaacatttagcaaatgggtcattaacataatttaaagaaacaaacatgacatagtgtaatagttgctcttgttttgcaggtctttcatggccagccgatgccttctactgtagcaccacatccaccagcaatgcgaccaagggtacgggctagacgaggccaagctactgatccacacagcattgctgagcgggtaagagtgatagtggataacagcttatggataagttaaaggaaggaactgtgttgttgaggttcagtgatatgattttgtaagcgttttctttgtttcttgattttcactttttttcatccagttgcgacgcgaaagaatagcagaacgaatcagggcattgcaggaactggttcctagtgttaacaaggcaggtttcctttttcacttcctcatatggttttattgttgcagtatgcatttgttttcacattaagaattatcataaaactttatctcttctctatgcgggaactttgtttggtgttttgtgcaaaaacattacatacagtatggtcaaaatttaaattcacaagacttggaactagatcattttcatgtgtgttcttatgtccttgttgagttccttctggaagaataaaaaacatggttcagagatgatttggataagtcgctgcagcaatgttttattgagcatcatttctgcaccttacgttgcttaaaatcttccttttcatgcagacggatagagctgccatgctagatgaaatagtagattacgtcaagttcctaaggcttcaagtgaaggtgaataaattttctgatttctctgtaggttaatatatagctgagctcgtaaagtaacatcacgaattaacctttagaaaagcatcttggcctgtcaattacaattcagaactttgtttatccactcccttatttctgttcaagcatttacttagtgtaatcatgttggtctgaagtcttagctgcctaatcaagtgccctcgtttcctcatatccctttgctactttgttaaacatcaacttcattagcaacaaagtacaatatatcaaaagaataatgatcataatcgaaattgttaatagcgtctcacttcaattaggtttgaaggacaccatagttactagtgggtagattattacttttttaatgtatcaaaactcaaaagggctttgaagagtgttcagtcaaacaagtgggagatgggctgttctgatttgtgaggtatgtagggcaggatagcaaagtgggggcttagtttcaatattaacaatcatttcagaaaaggaaatgtgttttttttcaatttctgaatatcttactcgtttactcgacaggttttgagcatgagtagattaggcggagctggtgcagttgcaccacttgtaacggatattccactatcctcagctgaggtattaagtataaattttatgttgttgttgttgactgtaattgctttaattcaatcagttttcttctacaggaagaaggtggtggtggtgaaggtggaagaaatcaaccggcatgggataaatggtctagcgatggcaccgaaagacaagtggctaaactaatggaagaaaacgttggggctgcaatgcagttccttcaatcaaaggccctttgcatcatgcccatatcactagcatcagcaatataccattctcaaccaccagactcatctagtgttaagcctgaaacgaacccccttcgtagacctttgaaaagggtcatcatcatgcattcattcccttcctcttttaagttccaagggaaaagaaaagtgtgagtagatgctggtgggtcccattgttgtttgtcctattccaacccctcaaaatgcaatcaatgtcagatgccatagttgttgctttttggggtttctttattaaaaagagggttctacttgtatgtcaatgctgttaaaaatgcaagcaaaggcattgttacctttgctgccaaagtccaagtaagtaaaggagagaagaattgtcaaagctcacttgatatgctctatatttattattgtattcaaaattcaatggtatagttagtgggaaatgatgaaagcactttctaagtggcctctttcttctctcatttttggtatagtgggttgtgggacctcttaaaagatatatatatatgtgtgtgtaattttatatttacatattaattagttagtaaagtaaagtaatttagaggaatgtaattccaaagtagtatggattatgtttatggttggttgtttgaaataataatgttagcaaattgaaaaatatcattttttattatcaattaattaaatttatttttaatttttatttaattgaaaatactttttttttatatatattgtacctgaagtaaaattggtacaatgtttaa

SEQ ID NO: 379861 - DNA, 4625 bp, Cannabis indica
aaataaaaaattcagtagctttgtgggatcatcatcaccctttacttttctttcttcttagattcaatggagcctggtgtaaagctaagtactagtgctccaaatgttacaaaggattcgaaaatcaacataatagttgagtttacaaagcctgttttcggttttaaagcttctatggtagaagtgactggtggtaagataacgaggtaggcgattatgtttgatagtagtcacttcataacaacctgataaaccttaactaatgctaagatggtttatttttcttcatgtaaggttgaaggaactttcgaaagctctgtactcgatggatgtcctcatggaaacacataatatcgtgtcaattatcgttcctgctgggaaagtaaatgacatttcaggaaatctaaatttggagtctaacaaacttgaagtgatgcactgtatgaaatcataaaatatagtttctttcttacttttctcgatcttttttcttccattttgtgtactataatgtaactttctttcttaaagcagatttagccccttcactatcagtagcattacactcatttgtaactgctggaatattgacaacatcatttgcaactgctgttctttcaatttctcttgcaaatcttggagcattagacactcttgcttctggtagtacaaatcttattggtactgacactgcaaggaatcttcatgtaagttttcaaagtactctgcagtatcgaaaacattaagtatttattataataaaagtatctgattaatcttcatgcagggtatggttggacatcttcaagtgtttgtcctttcagattggctttcagttaatcaaccagttgtattttctgagactgctaaaggtctaaggtggcttatacctcatcaaaagcttccatggaaaaaggatagtgcttcagtttggcccagtcatgtctacttatcaggaggggagcttggaatgaagcttagcaccatttccggggcaatagattcttgcttgaccaatatatcttgtgcgcggttaaatgacataaaaccaaatcctggttggatttatggacattacaacataagcatgaaaaaagaaccttatggactagctcttgattccaaagaatatttcatttatttcttggtgagtatctaatttgtcacttgtgttttcgaataagaacttttcttacagttgaagaacttgccttgtagagaggagagccactttcagctagagatgttgtcaagagaatggagaattacaaagggtagctataattttccttttcttgaaattttagccaaaactatatgacactctctcctttgcaaagaactaaactatgtttaatattttataggtggcaggacttggagatgaacttgttctggcttggagttgggggaggaagtctagtcatagcacatgttctcttattacttttcttaaaatggagaacaggaacaccagttcatggcattctttcagtaccccgattcgagctttttcttctcattcttatgctaccttgcatatcccaatcatcagcttttgtaataagaggtaaataatttgatatactctttccaaattctagtttcattttgtcatgatttttttataattttagttcaaatggcaggtggtacaacaggtggaataatcactggagctctactactagcaatcccagcagcctttattttatcaataatcatttttctcataattgcagtattctcaggaactttggttcaatacaaggaaatcaagtatgctgcaaatacagaaccatggtatgcaaagctatggttctttttcacaactaggaatgtgaaaggaaagtggttttatagagaaggcattccttcatctttcctttcacgtttcgggattctctttgagagtctcaaaggtcctccaatgtttgtctttgtcgatcagaacgactcaaacatgactcgaaaatggggtgaaagtggccataatgggattgggagaatatgtactgtgagctcagatgacagcaatgaagaaactgatattcccttacaaagaagactattaggctgcactagatcatcatatatagttattgatcttatgagaagggtcagtttaggaattttatctggagcatactcatcaaagaagccaagccaaagtatcttagccttaacaatcacactagtacagtttatgtatctgtttatactaaaaccatttttaaataagggagttcacctggttgaaagtgtttctcttttgtgtgagattggtatgtttggtatatctatcagtatgactaacacaaatccaatggaaacacaagagttgggatttgttatgctggctctcctcttcatcacttttgttactcacattatacacgagtggtacgcgcttataagttctttgttaagactatcacatcctcagaaaaattctctcaagcttggattgaagtttgctgctaaaggtctagttcttcctttcctctcaagaaagcattggtctggagtgagagcagcttcttcacaacccaaaataggcctagtttctggccttcctctaagtccagaaaccgagttgagaagaagagacaggagagcaccatttgctgacccaattggcgccatgacagcaacggtagtaccaatgcttagtcctggttcaccatgctcgattgcagagagaaatgtcggcttgcagagaacgggagagggaaaacagccgaagggatatgaacaagagtcgaaaaatgagatgaagaagttaagggcattggcaagggctagctttgctggagactcaagtggtaaggaagctagcactagctacacatataggtagtgaaatagtgatctcttagtttgtttaaaactttaaaatttgagtactaatatgtatagaattcttaagattcacaaagtttctgcagagttataacataatgttagtctcttctgaaactttctagcttaatatataatccatctgatttgcacaaagcacctttagcaaggtttttattcctctgtgaaatgagttttttagtacaaaaatctcttagttacatgaatgacaaagtacaaataactaacttaacggtcaatcatgaccaaaactaataacctttactgaatcaaatgtcatctgataatcatgaatcttacaatgaaaaacaaaacaaaagaacaacctagtggatattattatccatgagaatcatcaccaacaaatccattagagaaagaatcttgattccattcttgatcagtgaaaggcttgagaaacccattaaggccatgaacaatcaaccgttgacttcgatatatatctcgaaacacaactggtgcatcgttaagcataggaataccatcacttgaaaccctcacctcgatcataaaaccccttgaaaaagtcggaagctttgtcccaacaacttggcttccaatcaaatcctgccacgtcatcattctcggcacaacatgtcgccggaaaatcaaagcgtaatcgcttatattcgatgcatagtaatcgaaagttcggtccaccggagcaaagatggtcagtttggtcccgtcaccgagcccggtcaattgggcatcaagaagcgtggccattatatagtaacctctcgacctgagaaactcagcaaccgaagcaaaagaatctgtcttgccgtggaacggggcaggcgccggagccggagctggggacggcggctgatcagcccggaagaaagatgagtcaatgaacttgtctataccgtacagagctacgaacccatcaccaaaaacggctttctcgttgatcctgacgtcgtttatggagatgtagccgtcgccggagagagaagcggtgacgattagaggatggtcggggaccatggtgggtattactgagccacgaggaagagtcttgagtgtttcgagggagagttttacgggggacacgtggcggcgaaggagaaacagggaaggttggcctgacttgacgaaagcttggtctgccggagcaaagacggtggcggtcggtgaatcgtgtttaatggtttgagaggcgattttaagggtcaaggacattgagaggtagccggagtttgagagaatctcggcggcgtttaaaagggtcaagcaagagccgagagcagaggaggagaagatagaaagaatgaagaagaagaagaagagagatttggccatggtagtgggagagagagaatggttcttggctttctttgccttagtcgaagaagatgtcttttacagagtttaaacttaaagctttgattgttgggcgccaaacaattcagttggtaaagttcgttgataatctacgacgtgtcgttttattttttctagtaaatataattaattaaaatttgagatagactataaaagtgtttttacaatacactcctttaaaagagatgtactgatgcactttctacttatttcggcatcaaaaaaattttttagtctaattttttttcatattcatgtagtttatatctatttaacatatcttacaaaattttaagaaatttggaataatttacaatataaaaaacaatgtttaaacagtctattttacacgactataaaataaaata

SEQ ID NO: 379862 - DNA, 4689 bp, Cannabis indica
ttttttttttttttgctggaattttaagcttaagcaaataaaataaaataaaataaattctttatttttatttaaatggtacaacctcacacttttttttttaagaaaatagtaaaatctcttcatcctagttttatttataacgaaatttattttaattttttggcaccaaacagagaattatttttggcgcgtgttttgtccttaatcattacatatatatccacgtgtcattatttgattcgctaaagtaaataactgtttttttaactattcaggttatcattccggtgaccggcttttcattctcgggttcatactggttttggtgaccggaaaagctttcgccggaaaaaccttcgtctacgaatcttgtttaagcgttaatggaaattattccaacaacagtacttaccagaaaaatctcaatcggatcttcactaatctcacctccggcgacggcaatggcgaaggatttcacagtttctcgtacggaaaaagttcagaccgagtttatgggatcggactttgcagagctgatcttgatcccgatttatgccgaagttgtctcaatcaatctactcatcttctttcgctggcttgccctaaccagaaagaggcgattgggggttatgacgattgtattgtgcgatactccgatcgatcgttgtttggaatcgtagaaactcgtccgagattctattcgtggagcgatcgaaacgttttgtctgatttcagtggagggttttctcggcatctgaatattttattagggaatttgaagaatcaagctgcggctgggggtgatttacggaaatttgcagaggggaattatagtggggatcctcagtttgatagatctttgtatggatttacgcagtgttcgccggatttgtctgaagtgcagtgtaagaattgcttagatcaagcttttgaggatattttaggggaaaatggaacctttagggttggaggaagagtgattactcctagctgtaactttaaatatgaatttcatggaaatcaatctaatccattttcggaatctcgaatgcaatccacaccaccatctcctctgtcaatgaatcgaaaaggtacgacaagaactcagaaatctacattttatcaccatagaagtaatttcatgatgttttgtagaaatagtcattatgaatttttttttaattattctaaaaaaattattagcaaaataaccatgtttgatcgcactatgcgatcataaaaagaccattatgatcattttgcaaccatttgtgcgactgttaaattcattttagttaatttcgctaattcaaactgatcttttctttggtgtatatgttggaagatagagtttgatgagaggagactcgtttgtttttgcaggaaagaagagtaacaagtctagaactatcatcattgcagttgttccaagtgttgtttttgtgatcttacttgtctccctcggtgtgtactcaagtgtgaaaaagtcaattcgtagaagggatgaaagtaagcctttttgcaagttttcttaggtggtacacaacaccaataatgcagttaatttagaaaccatgttgctcactgctcaatttgtggaatgaatgtgactcaatgattgttgtttacttgctgaaatcttaatctaaatatgaaaagtttagtttgtagaaactgattcttatgatgttccttcggttggtttcttcttatttttttcggttgtgttaactttgtctataaatatgctggtttattttgctcttctgttaggcgtagccaatagttttggtgttgaaaatatgtacagaatgtggtcttccctctctttggatcggtattttttaaacccttatgcatatatctatgagagacatgattgtccgggctgaagtccctattgaatgcagcaatatttgttcagtgatgacacccgcataggcttactgtgtcacatatgcatgacaaaaatctttgagtttgagctcactcactattcaaccttaacgaaatagacatggccttggaaaactcttgttgttcttacttcttagcctccaacaacctttacaaatggataactcttcctaacagaatttaatcgaattatctcaccctgattacagatggagtgcaggcagaagttacagaagaaattggaaatgtggaatgcttgaagtttgactttagtaccatcagagttgcaacaaataacttttcagaggaaaataaggtcaaacatcaagatcttttatatagggtaaggcataggatatgaataacatatttttgctttctttgaagacagaaaaaattacgttatgttgttcacacaggccacaaataaaatatcaaaattgctgaaataaaccaattttattgtttggacgctttcttcatgtatttcagggtacactcagtgacggacaagacatttttgtgaaatgcttcaatatgacgaattcaaggacaggggattttatgaatcagttacgaatttgtgctaagcttcaacaacggaatgttgttaggctcattggtttctgcttgaaaggaaatgaaaggttccttatctatgagtttcttcctcatagtctccatcgtttaatatttggtaaaattttcatttgattatgtttacagaaccacaaagttccatttacttctaagtttttacaaaatcatacacttgtgtgaatgtgtagatccagtcctggttgaggagttctctttagattgggatattcgatacaaaattataagaggcatttctcgcgggctcctatatcttcatgaagaccaccggctgacaattatccaccgtgatattaaagctagtaacattttattagatgatgatatgaacccgaagatatcaggttttggacttgcaaaattgcttgaagttgatcgtagtgaagatttcagtatgattggggggaccgtgtaagtatattgattactgagatacaagttagcaaattacttttgtggattctaatcattgaacaaataataatatccttacagtgatttgacatttagtaataagatttaagatatcgtaagcagtggataattatagtagattctgtttacaggggatatctggatccagagtacgcgagaagtgggatactttcagtcaagagtgatgtgtacagttttggagtattactcttggaaatagtaagtggacaaagaagtatctcatgcaatgacaacagggagcacctcgtagccactgtaagtatagatacagattttcacattccttaactttcagaaaaccaaagtaggattatgttaggatccacattgactgattacagaattggttagtagtacataactacttggataccctcttctcttgagctagtttgagttctacccaagtggttatatcaacttgagaggaatttattctagtcaattgattaattcagtcgcaaagtgtgtgaacaagtaggttctctcccacttgggattcaaactgagaaatatatatgattgtaggtatggagaaattggaacgcaggaacaagtattgtagacccttatataagattaagatatgattatgaagaatctgaaataatgaggtgcatccagattggacttttgtgtgttcaaacacgttcaaatgctagaccaagtatgagttcagttgttcacatgcttaactgcaactgtctttctcttcctcttccctcggaatttggagattctcaagaacttagttatccgtcagggcggtcgacgtcaactaatttcaattcaggaattattgaatcatcctctgagatcttcccagagtcagctaatgatattgaactgccatagttcttcctaagttcctagtatcataagagattgtagtgtagttttaatagtcattattagttccttttaatttgttattctttatataggtcatttattttgtttattttttaaattatttggattttgtatttgtattggttagcctttttcttatttatactatttaataaattagacaaatcgctctttgcgtgtggttatattttatttagtaatactttagctatgaaaatatatcaaagaaagagaaatgctcactttgaatagtaatatgctaaaagacattaataatacttagcattttcaaatatgtcatattgttattagtagcattaaatattgagtcaaacataacttaatgtaataatttttataaaatatcgttaatcaattgcaagacgtcacctctaaatagcaccaccggaagcaatgctccaaacaagacctattaaattcgctctttgcttactttttatttatttatttataattagcacacaaacatttctcaatttaggggaggattcaatttccaatttgttaagttgttgtagtattacattccatgtttttcactttacaaaagaaaatgggttggatatcatataagtatttcccaaaaacagattgtgttgcatgttacaacaaaccaaaaaaatgtgcaaaagttgggagaactaaattttacaattaaattaggtaggaaattaaagatagaaatctaaataaattttgtaaagtttagggtctgttcggtaatgcttttaaaattgaatttttgttttttaattaaaaaagtgaaaacaaaactgaaaagtgcgttcggtaggaagattt

SEQ ID NO: 379863 - DNA, 1976 bp, Cannabis indica
aaaaaaaaaaaactatattttacaataaattgttatatgaaaagggttaatttctaaaataaaagaaaaaactaaagagagtaactaattatagattgaatctatagagctcaagtaccaatctaaactcaaatctcacaatattgtacaagacttatctcagtacattatatatccaaactttcatacttacaataatctactttatttttcaaaagcctttttctttcttgggatcagatttttctgatgcagaaaactgtgcatagtatatatatatatatatacacatacataacataggtagctagacattgtaagacacagagaaaagtacagcatttatataaaaatgaaaactaaaattaaaagtatatataataattaggaccacaatagttgggaaagaaagaagagcatcagatcaaaaatctcttgttgtggcaggtagtcacaacttttgttttagagaacaacaatacaaaaagatgtgtctttaatataaatctgataatggttattggtacctctgatatctttaccaatatgatcaattttcattgcttttggcaattactgtactcagccttatggtaacccctaaagttagaggaccactcccatgaatatataatatatatttatatatattttctgtttttgaattatagggtggtcctaaacctgcccaataatcattataagattgtgaagaaagtgttggttgtgcactgacagtccttattttttatttttttggtacaatttagtagtatcagacctgccctcttcaatttctttccttcttcttcttttctgtcatttttttctttcttttttagctatatatttgtgggttttggccatcatattagatggtgccaaaaggaaaattcacacaagggttatttatttatttatttatttttaatgggttttgttttagtgtagagtagtagtattagagtaattgggtgattaataatatgaaaatgtggtttgtatttttatgatttgtttctatttcttaaatgtgtcttcttcttcttcttaattgaggtcctacatgagtttatatcaatcaatgagattttgccccttgatttgaaaaatgaattataaaaattgaaagcattaaaccctacattatgctaccaaacaaattgtggcactaactactaattattaagataattattgtacaaatgattatgtgtcttggtttgagcttattggtgcaaaagggatatgcttgtttgtgggggatatagaatacaatgtagaataataataataaagtaaataaacttatgagtaaccaagccaaaggtgttttttttcaagtctttttccttgtatactaagaatttgcaagcatggttttgtttctttcatagatctcttacagtcactttttggcccaaaatgcctctgcaagcccaggacaagtcattgtttggcccaaatgtctctgcaaactcatcataacttgggcctttcttataggacaggttagtatgagaactttttttaaaaatgtacttttttttttctattgctaatatctaaaaatatgtttttttccccttttgtaagcatctaataatatggatttaaatgattggaaaacttattttcttgatcttgatttgatcttgatttgagtagaaattgagaaattatgttccttgttaaaccagagagactcgaattcatactggattataactacttagcttggatatcatataattaggtactatacaaacatacaaaatcctggtataaagaattatttttttgttttttatacttcttattattagtaattaggtacctaaaaatttatagtgaattttgatgggagttaatatatttagggctcgtttggaacgccgtataaggtcgtattgtattgtattgtattatattgaattgcattttatgcaatatttttatgtaaaactatatgtggt

SEQ ID NO: 379864 - DNA, 1432 bp, Cannabis indica
ttgtgtttattcgaaaattgaatttcaaactagagtagagggaattaattagaagagcattctacagtgggaggtgtgaataaggtggtagaaaaagttaaaatatagttcatttaaataaaaaatgtactttaatagtatgaaaaaaaataatgtaaatttaatacataataaaatttatgtcaaatttgacacaacatttactataatgtaaaatttacactataataaatacactatatttttatttacattttattaatatatttaattatcacattaaattataaaatatttatattgtatttttattgtcttacatattaaaataattaattataaaattattaaattttttcaataaaatattaattaaatattaaattttacattaaaattttaaaattttgtaattataccttgaagtacaaaattaaaatttaaaatttaatgtaaatttattatatttttacatctcccattaaaatttagaaatggtctaaaggtacgtcatacgtggaagggggattacttaaaaatgacggaaagatatatctacctagctattgttattattattttattttacgagttaagtatttatttatatatttttctttttctttatttttctcaattattgaatggatcattggattcagggaatcagattatttaatattaatatatatggaatgatttgcggaataaggtaagacaactatatatatatacatcattatagtagttcattattattggatattagtgtgttgaatattttttttataggtggcttttaatattctgtaaaaatgtaagttatatgtagatcgatacttttttcttttaattatatataatactaaaaaaaaatactacacattattaatgttttctaatatttctcttgatactatgctaataataattaatcgaaaagataaattaattatgatatttaaaagtttatactagatgatgacgtgaaccacgtgcacctcactttcatgaaactaatagtgagaagttttcctcttttgacttaggatataaattatttggttaaaagttaatataaatatttattatttaaaatagtatatgttatctttgcactcttatgtggcattacgagaatggtgactcgtggagtccacttagatgatctgttcgagaagataggccgagcaggatgtctcgctggcatgtcatgagtaagatattcagcgatccgtacagagcaatcaacacttagcgaattcagctttcgcatcatgagtcatcagctcaatccctataactcagtgatcaatttacgtggatacagcatacacacgatcccactatcagtgtacttagcctcaatcccacgatccttgcattcagcattgatctcacgatctttctgtttatgcgcattgtaacgaga

SEQ ID NO: 379865 - DNA, 2447 bp, Cannabis indica
atatatatatatttttaagaaaaggtcttatgaagaagtttgatttgaacatataaattttaattttgtgtagttggtgaagaggacaataggttaaaaaggaagcccaccattattccgatgaatcccacaattacggcaaacctaaaggagaatccagggtcgcctttcctgttttttcgccttctagccaaatcctaaatcacacatataaataaaatcaattaaattgagtaaccatgctacaaatttaaaaaaactatgttacaaatccaatttgttattacaatgttttctattattaaattcaagtacccatttcaataaaaaaatcaagttaataagtagaagaataattattgtactaaccagttccacctgaagctgcagtgtttgcctaatcgctaaatctctttcttccttgagctgttgtatagtctggttctacataaaacgaaacactttttttacaacagacttaataatttcaataactttaaaatgtaattgttaactacatcacatatgtattaatgttgttaagcagtgaaagaaaacccgagatcaaaagcaaagaaaactacgcaatttttataacttacacaagtggtatcggggctgcgcatagagctccttgttgtttcatcgtctaagtttccttgagctgtgacatacacaactctaagcttgcactcctctaatgcccttccaccctccttggtaaactgtttaaaatatggaacaaaattccgcaaacattagtgtcttcttcgaaggtacgggtgttcataaaaactgaaaaatcgaaaccgaccagaccgtaactgaattttcagtttcacgtcatcactgaatttagcggtcggtttcaatttttttgacatgacggttttatacggtttttgaaatataaaaatggttaaattaaaaaactgcaaaaatcgccaaagactgcaataaattgctcaaaactacaaaaaatcgtcgaaaactaccgaactgaaaaatcactaaaaactgccaaaaatcgtacggtcggttttatacggttataatttttaaacagtcagttataaaattataaaaaccgaccataattgaccgattttcaccactattggtaggaaagacaaatcgagtattcaaacaaaacattatttttgtcataattaaaagcagaacatcttacagtatcttgtggaaggtcatccacatcagtatttggagaaactattgtactctgcaagagaaatttgtctttgcattgcatatctgggggataatctcgttgcgcttggagggtcactgaaaattcaaaagttagtatccaatctttgtttatgagtactcatagtatgcagtgcaggctacatattggtcaaggacaaaatgttttttttcttaattttggctgcaatcagctaattttttattggtgtttgtgaaaataaagtaggctcattttatgctagttaattcaaattcaagatgttaacaatgtaacaagcaacacctcttataacacatgagtcccaaggcagtataacaccagtgtttggccgtacgaaatacttcttaggggatgtggttttgacctgcacaataaaaaagaaaataaaaagtcatttatatttaccaataaataatgagaattaatggtaagataatcatttctttacatttatttacttagagcatctcttatggagatgcaaataagtgatgtaaatacaaaatatagtttactttattaaaagtatctttcaatagtgtactaaattatgatgcaaaaacctcacatagttaaaattgatccaaatttgcatcacaatatagcatgatgtaaaatttacatcacaataaatgttatatttttatatttaccattatgacatttttaatattttattaataaattttagttaatatattcttttgtattaagtgacttgcattattattattattttattattaaattttatattattattattttatattttttaataattataattttatttaattttgcatcaagatttataattatgcattgaagtacagtagtaaaaattgatgtaaaaatatcacaaaactattttttgtacaaaatatagctcaacttttacatctcacattggagatatcttaaaatatagaataaaataaaaagagatacttctcacatcattttttttagggtaatagtttttatttattttttagtattaaattttatctttcataatatatgttacaaatatattatagtaacttttttttaaaaaaaattaatcaatttaaacattctgattacatttccttatacttataaggaaaacaaaataaattattactactttatttccaaataattttagtaaacaacgtattataaatattaattccgattattttttatttattctattacatttctctat

SEQ ID NO: 379866 - DNA, 1345 bp, Cannabis indica
aacagaagctcaaaaagaagcaagcaaagctgcaacacttgttaagtgccttaggtaaatttagtcttgacaaatgcttctaaagcgattcttccatttacagtacaaatagctgaacataagtcttttcttttggtaaccttttttatcccagtatgtttgctgatctttgctcatctgcctcacccgagaatccgcacctctctttcaacacgttcttcatgcttagcaagatcattgaccagtcaaatgagatcattccattgaaggataaatcatttcctttaaatacaatctcctcaccttcaaacacagagaaaccaactggcaaaaagaatacaagttcagttactcgaaaaagtacattgaaagcaaccaagatcgccgcggaagtaagtggaattgagaaactggaatgggctaaaggagatagtacaaaagagataaaagatctgagagagcttctcttgagtgaaacaagatcttggtttcttaaattcttggatgcagctttagatgatggctttcgcctcaacaatcaagagaagaaaggtaagaacagtgcagggcggcgagttgagccagacaaccatattgctatcacattatcacagcttaagaatgcaaatgagtggttagaaaaactaaaaagcaactcaagctcggagaatgatggattaatggagaccgttgatcggttgaagaaaaagtatattcttgtttgcttagtcacgtagagtctgcagcatccgcacttgagaacaaatctgatcgtggttgatgagcaaaatggaatgttttggacttattcttttatttatgaattatttattataggaaaggtgatgttactcttttagaaagcttcatttgagttggaaaatcttaatgaacatgttgcaaatgtaaattatttgtgcttgttgtgtgtataataacaataacaataaaattatattctttgaaaatttaccttgtttgaattcccgcagaagacaatagcaaaaatgttcaaatagtcaactaccgtccaccataagagctgggtccatgttagctacaatgttcctgcaaatgagaagatccaagctggagaagtagagcacatgccatattctcagtgctaaggctgataagatctgcaagtgccctgcttctccagcatgccttaaccttctccctatagtcccttagggcccatttggttggaggtaatgaaaataatggaataggaataggaataggaataagaatatgaatggtaatggaatggaataagaataggaataggattaggttgtttggttagatttatggaattaataattgaatacatattcttatg

SEQ ID NO: 379867 - DNA, 3175 bp, Cannabis indica
ccagcagagtgttttcagtccctatcgcaagaaaataatgtttatatttctgtactaatataatatatataaaaatcatacttaagaagaagctgcatgtcgggtccaggatatcgaatttcgattgtacttgaatgcccaggaacagaaaaagtgttcaagcaatcgacaaacaaccccaaactcactccaaatcgaggtcggccttgggcgccatactcgtaacgaatgaaaagctatgagaaaattttcaaaacagttttgattcactgattggtttttaagaaaacaattgctcgaataatctgaaacgaaaccacaatttgaactttaggaattcagaaagagccaaaagccgaaatccatacctcgcgctgtagataaaccttggcctgaagacaatttgtttcctctacgatcaaaacaatgccgtgctcagataattcgatcaccgcatccttatttatggtttacatttgggtaaattggttagccacgaacatcaatcacacaaatagaaatcgatataagtaagaacgatgatatgattcttaatttttctgagaaacaaatagaaaattgggagggaaagagacctgttggcgtttccatctgacggcggtgagggcgtcaaccataccttgaacgttgtcgagctggcagaccagatcgggggcatccgaatccattgccattccctctgactcctccattcttctctttcttcttcccgccaaactatgtcctcactctccccttcatttccctcctttttattattctactgctgcatcgtaattagaaaattttatatttcttagtatgtgacaggccaaatttaaagaatgagattaaccttataatttctctaaataaaatctcccgctataatcttatcagggaaaagcctcgtagaagtgggaacaagtcgacttgatcctgccttagcttcccagtgtgttgcctctcccggacccgtaggggtccaaaaatggaagcttgcccagctaatattgattgcctaggagtgtcgcggacgtctacctttgatacaagtcgggtcaccaaatgacgtttatgcttttctaacgcatgattagatcttgtcccttacgtccaaacatggtagtgcgcacacttccactacttttttatcagacaaatattagagaccttttcttttaaaggtgaaagctttgggtgacacgtagtctctacttttaaaggttaaacctttggataacatgtgtccacttcgtacaaatgatccccaattgtccaactgaagcacgcacggacacaataatttttaagggactcgatagtcagctctcactttgcatgtaatttaccccgttagtgggcttttagcataaatcctaggcgagtcatggacatgtccatatccgctacttagcctataaatacccttctatttccacccttctatttccatacgaagaggagatcacaaccgacataattgaaactctgccaatattactcttcgtcttcatcttcttcaagagaaacttagagtatagagtttgggtttcctgtaataatattgtaagcatatcaaaaaggtcgtaagaggctaatagactaactcgtggaataaggttaattaacacccaaactacgtaaaaaaatctccatctcattatttctacattttattatttctttagttctcaaatatttagatttcgaaaatctcgataaatattttggtactttcattgagagcttaagaaagaggtaaagcctacggtgttattgctgccatggttttcacacaaaagacggttcttaagaagactcttcaaggtggcctcaagattgtcatggaggaagtaaaccccctctcgccaaagcacgcccaaccgagtgatgcgagaggcggggatacatccaacgtgaacaatcgagaggacgacctaaacaaccagtatgaccacatcgatgatgacagagatgctgagaatgatgaagaggaggaagacgatggagagtacgtcaaagatagtactacaaagacgactatcattatgagcaagacccggaagtatttgagtgtataacgagttgctcgagaccaaataaaagctagctcatcaaaagaagttttctcgaaggatggagaaagtgatggctcaccttcaagccaagtcggagatctagatgaaggggattctgacgataatccctcattagaatgcgtcggaggaaaaaccagggaaaaccctactgttatcacgatttttgtcctactgacatggcatgcttacatggacaaaatcagcaccacgtggcagtacaacttactaataagaaggccaagtcagcatctaagcaaacggagaccccaacactcaaacaggcgtcaagtgactgaccagctccctcacaggagctggctaggcacccctggtcggtcctatggttgggcagccttgggactgcaccatggccgactagcttgtcctccacaagggcttagccggccaagaggtgttctgcagtgtttcctgtgcacttctacacgtggacaacatcctttggggtgggaattaggcccttaaagaccaatagaataactaaataacatctaagtttaagggaatttcggtattttgtaattaactaataaaatatacaaatatataaggttttaagttgtaatatagggtttaggcctcctatataaaggcattaactctaaccaagaaaacctaagctcagttaagcctaatacttgccgccaaactctaagtctaagtctgataactaatacttgccgccaaactctaagtctaagtctgataacttcccgcttcttcacttcctttctcacacgcccatacaagcactatcacttgagattttccgttcttgattcacaaattgtgtaacaccctaatctatagggatgccacatgtgtgattttataaaatagtttaatacaaatagaataattaattattaaaaccgtgataatattaaaaatgactaaaaaataaaacattaaaacatacattataacgaaataaaaagcgtgttctggggattcctgttgttgaccttacttctagccaacaacagtgagtcaaataataaagcggttgaataatataattaaaagagaaaaaaaaacaataaaggtaaagtgaa

SEQ ID NO: 379868 - DNA, 2355 bp, Cannabis indica
cgagctgtactgccatctggcactggtcctgtccacgtgagtatgccacgtcatgaggataaaaattaggataacaagaagagagagaaaatatgatttttgattttttgagggtttgttactcttccttgagttcttcgaagtataaagaacccacattaccatatatgagtcatttccctatgttttcattttaaatttcctctcttctaattatttctacaaataattagattacttctcttggtaaataattaaatgatctttcttgtaagcaatttgtgtttcttccttgtaatttattttttcttgtaaagagaaaattataattggtgtgatgttgtaaaaatgtaatatatatatatatatatgtgtattgagtttggaatgtaattctagtataagcagggtattcctggcaccataccaccaagtcatcaacaacaaaatcaaagcgtgggctacacaagtaatttttaccgtatagtcatactgctaaaaacgtttgggggggggggggcaaaatatttacctaaattttgacgatggtgatgtgaaaaaatgatgacatgtggcacgaggataccaagactgaattgatgaagaatgtgtaaaatcatgaccgttagtctcgaccgttagaagagaagtgttgtggtcacgttttcccctagcttaagcaaggtgactactcccagggggaaggtggataagcaccctcacaaatggaataagcgatcaccacacacctaagggagtcgaatatgtctacgggtatataatactatcccctaccttaaatataaagatctactcaaaaggtgatggaattagtctaggggtatacccttagacccccacactctcatggtccaagtaacacattccacctggttgatacagtgcatcttcataacatcaacaatgtcaaagttcaagtggaaggggtcacgagggtaccaccacaaggtggcaactatcattccctttagagtgggtctcgggggtgtcattccaaagtatggctactacccccagagaaagttaaatgatcatactgcgtctgggcgggagaccctcgtcgtcattaactaattcaaatatttaaatctcgcaagaagctcaacgatagttacaaacgcataaaaatagcgagatattgccacatgaatcagacttcaaccacctccaaaagttaaggagacggttaatatatttatgcaatggtcgcatctcctgaaaggagaaccatcgaccttccgttatataaggggtcacccattacctgggaaaggaatccaaaaattcacaactaggacagcagaaactctgctatttttattgcttgcattcaaaagcttgttcttgactttgaaactccaattaataaaatacaagggaagtaggatattactgacatctggggccgaaactctttaaattctgttgttctttattgtaatttattgtaattttggtttaatttctcatttattacgactccatatcgattggctgaaaatctactcaatataagctaatagagccaaacccaaaatctaaaataaaaacatagaacaatatcataggacagtcaccctctgcgaaatgatgaaaatcatgacctaatcaattttgagttaaaataggtctaaaatgatcaaagttttgatgataaacttccctattatgatccacatataaaaaatcctacacaaaagaaaaaatcctagtagaaatatccaatttgatagaattgaaaataaatcaaaagtatgcaaaatagcttgagcaaatcaaaattctttaaagaatgtgttagacctcctcgtctacgacgatcactctcttcaccattggtatagatgaagcagagagaatcaatttggtttggctcgtttcgttgttcccttccgtgtagatgaagttgagagaaatgatagaaatgggaagagactgtgcgagtgaagtagatgaagatgcccagtcacttcaactgtgcgaactataataaaggctgacaaaataaaatttaaagtacaataaaatttgataataaccgatttcaattacttttaaccgtaattttataaattaatagtataaggtattatttttaacggtaattttataaattaataatataaagtattattaatttaatggaacatgaaatcaaccattagatcttatagtatgtcaatcccaagatcggttcatgcgcatgaccataactaggccctatacataatgcatatatagatactcttaatgggtattacccatgaatgggtaaaattagaaaattttgaatttttatgcttaatttttttatctaattaaaaaaatctctca

SEQ ID NO: 379869 - DNA, 2127 bp, Cannabis indica
atttctcttgacaaactctcccaatttggaagccatacctccaaagatacaaaatactagtcaataacttaaaaagacaacattcaagtataagttggagggatttttactctcagccgactcggaaatatcaacccgggggaagttgtacggaacatcatcatcatctgaagaagactcctcgctttcctcactagcaagacctttaccctttcccacaatagcagttggacgggtagtcctagcagactctgacccttaaggccttatgagaacaggggcctttccaaaagactcaccccggtcaaccctcttccaagtagctctctctctctctctctctcttagtctcttttttcttctcaaaaaggttgttagagggagcttcggtcttgggttcttttctcttggttcctttcttcttcaaagaatctcatcaaatgaacttggaaatttgcccgcagaaggataaaggccatatttgatgaagttttttcttgttgtcaacttacagataatccatcttgaagctgacaaggagaggatatggttgtctttatccctaagtctcagggtaggaattagccagtcaaaggtggggattctttggaatgcatgatgcacaccctctgcaccaaaaaccatgaagtagtcgggcatagccaccgatcttggacatgggaggatcattcatgccacccaaccagatgaatgcccagtcggctgaagcagaagtaccatgaccggccctaaccaaagttagattttaggttaaaataccaaataatctcaaagggaaaaggttgcggttagcccatctgtgcatataaaacgaagagggaaaataggtacttgatccccttcggagtcaactgtgttgggcagatcccgtaatagttggctatagctcggaccatgccatccaattcttgagaggggcgtgggcaaggtaatcctcacctgacaggtcagcatcgaggcccccgactgaatttttagccaagaggttcttaaacctcacaggagtgaatgtatatgaaggagacacccaagaagcctcatgctcccctctttggggcaaaggctccagagctgccagctcctcctccatcaatttagtaatgtgggggtcagttgaaggggctgcagagtaagtttggtttaacctggccaagtttggatcttgatcggtataccgtgcaacgttgacagtaaccttagcctcaaaagttttcttcactaaggacaatccgcaatcctctagcaaggtgtccgggatacatggccggataatatatgtccaagaaattggaagaaatttcctccaacctcggttcagttcctaaatgaaccgactgtagttctctcctcgaattcgttcaaacgaatggtggtgttgtatttttggttcaagagagccactgctgacttccaagtcaaaataatagctcaaagacctggccggagaatcactagatgatgaactacttgcccggtgtcaatttgatcctcaaagagaagggtgaggagatctgcgtctatctggtgttcacccccagtagtcatgtggattcatctgtgaaaaagggaaagggctgtgaacattcggacaacataaaaaccatacggacaacatttaaatagccatccaagataaaaacacctcgcataggccgatagggttcctaacagatctaaaataacctattctacagaaagaaactatggaaccctggttcttcgtgttcttcaagacccataatctaaaaatgtggaaattagagccaagattcaacttttttaagacaaaatccctacatatatctaacctaacacacctgtgcaacccattgaggatggattttcctaagttcacggcatagaggtttttcacctcataaaatggcataaaagtaaaaacaaaagaactttcaaagaaagagaaagattctgagaagcttactcactggacagagcctaagtaaaacctggatgctgaagatgattgtttaacgcccaaatatgacttccactagcggtggttgtagtatagatcgggcggtcgattccacaggaaggtgattatggacaaaagcgttagtagaaaaataaaaacaaaaggttaat

SEQ ID NO: 379870 - DNA, 1932 bp, Cannabis indica
attttttaaaatatttttttgaatttccttaagactcatttcaactatttattctaaatcatatctataccacatattatataggtgtaatttaagatggagacctctttattataatttaatctaataaatgacacacacctatttttttagggaataatttaatataattagtaacataaaccactctagtttaattaatacctttataagttccataataagagtccactaaagagctagtacaaagttgtattacataataataataacaatggtactaaccgccaccgccaccgccaccgccaccgccaccgccggcaaccttacaacggaagcaaattccgacacatacgaccgaaaaatcgagctcaaagctttagacgatgccaaaaccggcgtcaaaggactcgtcgacgccggcatagaaaacatcccacgaatattccttcaccaaaacaccaaagatcctacctttattcaccatcatcaacccatctccggcgacggcgaaagcatcccgataattgacctcgaggaatcttccggcagtaaaaggggcgacgtggttgaccaagttcgccgtggttgtgaggagtggggattctttcaggtggtcaaccatgggataccggtcaacgttttggagaggatgatagaaggggtgcgtgagtttcacgagcttgatggtgaggtgaagaaggaatggtactcgcgtgattacacgcgcaaggtgttgtataataccaattttgacctttattccggtccggttactaactggagagatactttgacttttgctcctcatgttgatgatgatgatgattctaatgatgagtttcctcaggtttgcaggtatttaattttttttaattaattgaaggtttttttaattaattacatattaatttaagtgaagtaactaatatatttgatcatatcatttcttataattatatattattaatttaattgagtatataatatagatggtagtatgtatatagaacttagttttagagttgaacttaagctacatattaattattattaagttgatattgaaattagaatattaaaatatttcatttcatttaaccatcgatatttttatgaagtaaaattttatataacacaaagatgtatccttaattaattttattatttttatttttttgaaatttagaaagtgtattccatacaaccaaactttataagctaacacagcctaaattctatacataattgacataagattttcaaatcaattattgaaattacttcacaaaaatacatttttgcattgatattgttatatagggacataattattgaatattcgaagaaagtaaggagattagggtttattctatttgaactaatatcggaagcacttggactaagcacaaaccaccttatagagatgagttgtggggatggactcatatcatttgggcattactacccaccatgtccacaaccagagttggtgttaggcactactgaacacactgatagtagcttctttactatcctcctacaagaccaacttggtggtctccaagttcttcatcaagatcattggtacaatgtcactcctattcctggtgccctagtcatcaatctcggagacttaatgcaggtaatactagcaaacaataatcgatttatttaaaatataacaatgcactacttttatagtattttattgatgagatgttgtttgttcatttttggatagactaagaaaaaaaaaacataacaacttgtgaacttttggtaactatatcatactagtgtgaaagaaaaaaaaatataagtagacattaatttttttattagagagaacttatttatcaaagtaatattatggctaattagtaatttttccttccgaattttgacatgtactaaatcgtgccctttgaa

SEQ ID NO: 379871 - DNA, 3429 bp, Cannabis indica
tttccttttaaacaatgaaatagaaaaaaaaatatttaaattttttaaagaatcactattgtaacgccgttaacttttacagttataaaaaatatctttttattactttttttaagaaaaaatagaaaaaatgtatgatatttattgtgcgaaacgaaaacacaatcaatgacttacgattcagtatatcggacaactaaacacacaacacaattaagaacaatatatcaagagataacaagaaccaagtaatgaataaaggcagtgaaacataaaaataacaccaggtttaacgagttcgagttttgtgcaatgctctacatctcggtcgaaacaacagcagtcatatctttattgatataagtgttatcaatattagaagaatcctcacaaactcgcatagattacgaaaaaaaaaaggtttctctctctctcaacattacactatcataattttcactcaagcaattatgatctgattcacctacaaattacaaagattgatagctatttatagatttatattgttgcctaaaaattatatctgaaattaacgtggcacatttacactgtcttaaatgatccaactcatcaccagcaacaataatccacgtcagttttgataacgcactttcagtacagaaaatttggaagctttaatacggacaagctatccggatatgtataggccctcctttcagataaacatctttgacttacaataggctatctggggggtacgtctctggtttgacaacaagctatccgaaagatattacaattacagaagataagcttcacggaagatccatccagactggccacaactttactaacaaagcttcccgatgactaccaagctttccgtaacttctttccgaagtaacacatcttctcggatgacaaaacttgtaactatcatcaataatatttctataaagtcaaaagtaactaaaattataatttacaaaaaattttgaatattattatattttttttaataaatatcacttcaattaaacattgctctcttatattaaatgtgactatctaacaaaaattgttggtttaacgattattttgtatttttctgttaaagttaaaggttaaaactaacactgttaaatcaatcaattaattatctttttttttaaaaaaaattatatatctaaatttaatttatttattaaaatatgacttagataattattttaaagtatcaacaaaattaaatattttttataacaaattatctaaatttatatttatttgaattacgttgattcaattgactaatcatactttataataaattaattagttatatagtttaaaacatctaaacttattattacttattttattattttactaaaattagttagatatatttttttgagaaataaatttaaaattaaattaaattttctatattaaaaaatatattaaattctagtaaatttatttttttattattattatttaaattaataattaagtaataaaaattctagtacaattctaagtaaatatgcaaatacatattactaatacttagtatttatataaatatatatatatatttataaatggataacacaagtaaataagtcgttaaaatgttaagacttgtcattgaaatataattttggttgaagatcaatatgtgttttgaactatagaattttacatttaaaaagaagaaaaagattttctaatctctttcaggagaggaaagtagattcccaatggttgaatctatatttgttttaacttgaaacttataaacaatagaaataaactctatatttaaaagaggatagtcaaacatgaacactctatttattccaagtcctaaccctaatcttaatcttgattaaggcaataacatctcatgtatccattcataagagatttgcaaatctctcatctgaagtacaaagtaggcttttgaagaagaatccctttatatcttattcattattaacacataaaggaaataaaatgtgagtgtggtcccaaataaaccccaaattgaatttgctaattaatatgatgagtatagtataagcaagtagtcaagactactacaatagattaatagggcttatcaaaaaccttaactttttaactaaggttaaagggcttatatcttgatgtgagatataatatcgatattagtgtaatttaatattgagttttatttattttactttaaaaaaattataaaaaaattgctaattaattataaaaaaattgctaattaattataggacgcgcacctcataatggtgttagacactttagtgtcccataacaatattcaatgcttaaaaacacaagtggtatctaacatcttttagttttagcatgtaatattactattattacaattaagcattgagagtctcctaattgaaagtattaatttttatgaaatatggggttagcactaaaactttttatatatgcaatatttttcatcaatgctattttttccttcttttttgtagtttttggggaggaggtgagaattaataaatacatttatgatttctataacaatcattcttcatatcactttcatatattgagaggtttaggaccatccagttgtatccatctaagaccattaagagaagaaaaggaaacattcttctatgaagactatttttggacaattatatcatgatgggtgtgaaagggacttaaaatcaagccatccattgcatttactttgacctaatttcataaccccaaaagcaaagtagttttgggagaatacttcaagatcatttttagaaggaataatagtagtagtagtagtagtagtagtagtagtagtagtagtgcactactagagctagagctataaatataatatatattatatatgctttgccagctatatttaccccttttggataatattcctgataataaaagttaaagaaaaatgtcacatttgttaccattaataaccataacaattcacccacttgtccaattcttataccataacataactagcatgacaaacttgaaaaattattttaagtggttttgttatttgcaaagggaaagggcaacggttggaaagttggttactttacaatttaagctcgaggagacattttcatgttataccaagaacttgcatttagtagtttgtctcttcatatttaattaattgtactagttatatatatatatatttagtaaaaaaattaatgcgttaatatttttaagaggtaaataaaaaaggaaacaaaaaaaacatttatttatatttttttgcacggcaacatttattttttctacttaaagttgaatgcattgaattttaatacttgccgactaattttatattttatagttccttctatattgaatatgatgtatatgtgtatatatatatataaaagaaaa

SEQ ID NO: 379872 - DNA, 1401 bp, Cannabis indica
taatatgatgacatgatttgtgtagtactattagtacataatcatttcacatatatatatagtctgttacataaaaatatattttactataaatctttcctattgctcaactttagtatgctaatagaagcaagcatataattatatataataatatattttcttggtgaatttcaaaaaaaaaaatatttaatttcttggtaccaatatatatttatatgtatatagggccctctatatataaatataatgaataaattgaacaatcatgattgtatattggggaagacatgtaacaaacctatattaggctaaaatgtatgcaataattaagacatatatggttgataatgaccatcggcttaatgcttccaagtaattagtgctgcattttttttcttagagattatttaaaaaattaaagtgtgcattataattaatttattgagaaattttttcttttttatgttttacttataattttacgatctaaaatttttatttataataatatatttttaaagttttaaaataaaaaaaaatatacttttctcaaaaaaaaaacaacgagaaaattataacctcacaaaaactataagttaatataaatcaaataaactataaaataatccaaaacaatctcaagacaactataaaataataataaaaaaaattattatttttactgaaattgtttttttataaataaaaagttcaaagcataaaaaaaaagaatttgtattaatgtacttttgtaattttttttcttcttcaaatttttaatttattatgtataaatttataaaattatatgatgaagacaatgataataaaatgggaaacactctaacaagaatttctatgaacatatgatttattaatattaatatttcaccttattttatgatcatatatatgtacatatttgtaaattaataatttgaattatattcgcctaaattaatttatatatattaaaaaaaatgcagtgataattttttagtcacaatataagttttttgttactaaatgtgatttttagtcacaacaaaaaattacttgtgactaaagcataatatttagatacaagctgtcattaatttagttttagtcataatatgtattgtggctaaaaatacatttagtcacaagaaattgtaacttttgtgactaatacttttagttgtgaaacttttagtcataacataaaaaatgtgatttattattaatcacaatttttattgtcactaaaaataagattttttatagtgattcttaaattaaaataaaaacctgaattaataaattatttgttcaaaatctaaataatatttttcatttggaacaaataattattttttctttaagattttaacttctttcatttttttttaaaaaaaa

SEQ ID NO: 379873 - DNA, 3886 bp, Cannabis indica
acattgcagagactgattggcctgaagtccttcatatgttgagctttctttacctttggtagtagagtaatgatagtagagttaaggggagtaggatctgcaccatcattaagaacactcaaaatagccttggtaaccatgtttcccacgatatcccaattattttgatagaacattgctgacataccatcaattccaagacttttgtctgaatccattaactaaagagccaattcgacatcggttggagtaaaaggtttgaggagaatctcattcatttccaaagtgaccgaggtaggtataggagccagtgtttcagcaagagcatcatgatcagtagaagtggctttaaacaaatcagagaaattcaattaccatgctcatgtctgatttggaagtgacttttgttccatggtcagtaatgagtgaagcaattttgttgttggacttccttgccgatgctttagagtgaaaatattttgtatttttgtctcccaattgcatccaatcaaggcgagagcgttgttgccaatagatatcctcttgttcaagcaagtcatcaagaattgtttcattatgtttaagggcaactgctgtctcagtagtcaggggattagaattgtttaaagtgtcgaccttcttttgagctgctgcaacgttatgcttcaaacgaccatattttttaatatgccaagactgtaaggattgagcacatgaatctaggttgttgagtacactctgaacagggtcgatagagttgtcagactgccaacaatttgatattatcgttttactgtctggatcagataaccacaacttttcgaaacgaaatcggttgtgtcttttatgttgctgggaggccgaatcattggacaaatcaacagatatagcctgatgatcagaatgaaaatattccaggtgacacactttaggttggctataatacgaagtccatgcatcattgacaaaacaccaatcaaggcgctgttttagagtgtttactgctattctacttttagcccaagtgtagaaatctccttgaaaaggtgggtcagtcagatgacaatgatcaagagcactcctgaaggcattcatttgagatttactgcataaagtaccccttgatttgtttcggtttgacaaaatctcattaaagtaaccaattatcaaccaaggctgtaaaggagctacatctgcaagtctacggagtaatgtccatgagtccgatctgttttgtaccacaggtgagccataaaaggttgtgaagtgaaagtgttgtccaattaaagtagtcatgaagcagtcaaaaaaataagagccaaaggtattaagattcacatcaatttcatctttccataagagcatgagtccaccacttaagcctattcgaggagcttccgaaccgtgactgaaattcaaagattgacgaatgcgaagtaaagagttgttgttaagtctagtctctataagaaagagaacatggggagattgctgagagacaagcaatctgaaatgtcttaacgctctcgggttccccaatccccgcgcgttccagcttaagattttcataatccttttcgggattgcaaagcaatctctactgagtcatcagagtcaccatcagaatccttggaggccgaggaaacgttttggtaggagcagtcaccttttgacgaagaagggaaagcaatagcagtaggattttggttgcggcatcttttaagcatttgtctcatggatggagcatctgtatgtctcttgaaaatttgatttgggtggaggtttcgttgctggtttctggtttgtagcaggttgtggcagtgagtaatggtggagtggtgtaaagtgaaggagtaaagggtgtagatacatgtaagttgttggtggtagtgttaatggacatggagtttggtggatatgtggcaatggggacatgggagtgggtagcagaacctatgtcaggggtgtaaatgcgagtaaggtttgttgtttgtgaagggttagtgggaagtgtattggtactgcttgagagagttggtatagttggtgtaacattttctgagaccaccatgttagatgtcgcattggtaatggaggataaaagattgatggtagaagttggggtttgtgataatgatatactgtgaagtgttggggggttctgttgtaaagggaaagaaccgagagtggtgttcaaaggcctggtttgaatagcagaagaagattctccttggaaaaggcttttcggttgaggttgtgatttgaaactcaagtttggaattgtagaaaccagagatttacgagccaatcgagtcaaaagaggccaagcattacccttggaaaaatcatttcggtacttatcatagccattagttggtagttttgctcccttcatccaaggaccatactcaaagtcatcatcattaccattatccattctctccatgaaagccacacatttctcaaaatgggtgtccaatccgtccacactcaaaacagaattctagaaatcgctcatacctgaaatcgatccaaaagttgtctttgatccttggcaaactaatcatacggcctctaaggagcggtttgtctatagggagtcttactctaactcttaagaaaggtccccatccctcatcaagggattcctcatggacatcaatgaattcactaatgatgttccccaaagcagtggcaagagttttggacttgctaagaaacggtagacgataaatttgaacccaaaaaggagtacttgacagattgttcactgtgacattttgctgaatagttggagagcaaaagaccactagatgattttgaaagtgccatggctctttgtttaaaacccgaagtttatcacctacatatccgaaagtaactttgaacaagccatctccataatcagatatgatagaaggatatctacccttccaatggcctcccatttgatcaaaaaaagtaggctgatgaacataattttcagtgagaacccgtgcaatgaggatgtggctagaagtgtttgacgaggtaggaacaacatcggctggcagaattgcaactgaactctcctcttcagtaagagataaagtggaatcaagagattgcagtaacgaatccatctcaacacaggaagaaaatgcagaaaaaaccagcacaaaacacatcagttatagaaaaaacgcagaaaaggaaaagataaaactgaaggcagacaaagagggaaagcaagatatttgaaaaaacagttaaaatccaatataggtagttaaaaaacttcaactccagcagacccaaaatagggcacgagtatgagaaacagtacttaaaaataaaaactaaccaatattttagatattgaaaataataaaataattgaaagtataaattatttaaacaaaaaacaattttgttttggaaaaaaaaatcttaaaagctaagcttaaaaaaaaaatttgatatataactaattgaaaaaaaaaaaaaaatactgcatataccttaaataatttatatcttactttgaattgtacacatctaagtgtagcattttttttcttctaaaaaaactatatacacagtctatctttatgtataaaaaattgaatggttttttttttttgagttatacgaagattgagattgataattctaactattttttaatagattaattaaaatttaaatataaatttatgttacataaatattagtaaaataatatactaaatttatattaatattctaccagcgagagggtagcataaaatacatataaaaaatcaatgaaatcactaaaaataaaatattcgatatactaagctgtcgtttggtaacacttttttaatcagttttctatttttaaaattgaaaaagtgaaaatatt

SEQ ID NO: 379874 - DNA, 3362 bp, Cannabis indica
ggttgtctttctttatagaaagcaagttgaatgtgacattgctagattattgtcaaagcaattcctcttgcagccaaattcattggtgattaccacaaattatagaaagtcttttttttttcctttttttccatttttgctttatcactttaacaacttttaatggaataaataacgaaccattttaaatggtaatactaatataccgataaaagtatgttcatcacaattcacataccttcgcattttcgacttattcgttcgtccatgacattgcggtatgggaaagtgtcatccagtacgagacatgtatgggtccataatcccactaatatagtttataatcttttgtgtctagaaagtaaactttgaaaatctaccataagataaagaagacttaaattttactcctcggccaacttatcaatcatcactgtcaacttcttgccacctttaagaaaaactaaaataaaatataaatggatttgtacacactgcacacacccataatataaatatgctggcctagtacttccgaaagtaaagccacagcacatgaactaaacaagtgaagtgataacataaaataaaagaagcaaaagaaaaacaatatcaaaacaccgaccaaaaacatggctacagatcaactgtaaatttcacagaaacaagaataacaggtctttggaaattgaatattttctttcaacgtaattcagttttacagattagatctgtccccatcttcggttttctaattctggtacatcatcattgttatctattgataggtaaataagtgtgttaacttattcgtgatataggtagagcttaaaaagaccaaaacctgagaagataaacacttcttatggacacaggagatgattaaaaatttacctcctcacgaaatcaggctgagtagatacagatctgacccatgcccatttatggtcctttgtgtcgacttcattcttagtctgcgccacctcttccaaatggatataagcaaagttacgattgatgggaccaggcacaaatcctgtatagccagccataactccatgaatggctgaatgtgctagcagtgtgcagtaggagttatctgtggcattggcgggaactgcacgtatcatgtatgtgggatctatgtacttcactgtaaacaattcacccggatggtctcttgtccaccaattttttagctctgacttcaaccagacacccacgtcgagaaagacaaggttgccggactcatccctctcttccttctgggcatcagttcttggtatcagttcttgtcctgccccttcagctactactagtactgcatgtccattttctctgagtctctgctcaaggaactcaaagagacctcctttcccatctaagtagaaatccatttcaggaattaagcagcaatcaacatccccactgcttagtgttgcatgaagagcaatgtgtccggtgcttcgacccattagctttaccagacctattccattgactgcactctctgcttccacattagcagcactaatagcttgctgagccatttctacagctgtctggaaaccgaaagacctgtcaattatgcctacatcattgtccactgttttggggattccagtaacggcaacattcaatttgcggcggcgaatctcattgaatattttcactgcaccacgcaaagtgccatctccacctatgatatacacctgtttatatatgtggattagctaagacattagttgaatgaacaaactccattaggctgcatctcatctgaataaaaaataaataacaataattgatgcattaatctatgcggattatacaggcatgagcatcaatcaatacttaaacagagtacttgagcaacaagctaatctgccttaaactatttttcatactaacacctaccaatttgattgagcattaaaatcatgctatcatttaagctgactggtggaatcacttcaattattctcttggaaggatataatgtctatgatatggtgcaagggataagagatgtccccaaaattaaatgtacatgactgaaataattgttttggtcaccaaatattcatgtgagcatatgagattcataatttggtttaaacgactgaattcatgatcttacggcagaacgcaatcccctatcagttcatcttccccaagtcgcaagtactaaattccacatcatagctacgcataatctacagtagacttgttaaaagcatcactcaatcgggtgaacttaaatcagaacttcaaaataggaatgaatgaatgatgatttagttgagagctcatatattgggctacagtcttaaaaactctgactcgtccatactccataatttaaatgatagtctacatgtttgcaaaaagtattgggagaaaataaaaatcagactttgaattaatatttcctttaatttttcctaattccttctgcaaggataatgacatcgtaaccttacgaccaggacactttgtcactagcctcctaaaaagtagtgatattttcaaaataaaacctaagaacgaatacataattttaagttaaattaaagaatatgtcataataatgtttagttatcatgtatagttatttatgagagataacatatagacttaaaaggtgagaaaaagaaaaacaagacaaatattcattaatgctcttgtatgccttattcaacatattttagtttccacagaatcaagataaaaataataatgagaatcaagataaaaaaaaaaataatgaaaagggaaatgctaaaaggcattagtggaattcatagaaaagcaccataacaatttatggtttacggaattcaccagaaaaattattccacaaacagaatatttaccaaataacaattactagcatatgtactcattttctcgctttaaaattagtagctcaaatttgtgttactttttaattaataatgtcaaaacaggcagcaacattgtccaaaaaatttagtatgatgccaaatcagcccataaatttgtgaaaatataaataaaactaagatcattcgtatctctataaaattattatatagcattaaaaattatcttaaaaacataacttgtagcataaaaaaggaatgcaattacaaataatacaattatttgccaaaatgtatgtacatattataatacggaagaggtttcaatagttacatttttattgtaaccatcatggttactatttttttaagccattggattactattaaatggttgtgattattttggaaattaaataaaaataaataataaataacttgtaacctgaaagtaacctaatcatttatttccttataaaactttaattaagattaatt

SEQ ID NO: 379875 - DNA, 1367 bp, Cannabis indica
gttttttttttatattaaaaatttttgtctagtttttctgagtatttttacatgtccgtaagataaataatgaataaaactctcaattttttgcatgtccttaagatattaaaattttattgtttaattttattgttatttcaacctttattgatttagggtgttgtaacagtacaacaatttatttcttttgtgtcttcgatatttaaatagttttaattttaattttttttatatgacagtgtattataatgtgattatttaagatatcatgaaaaattttgataaatttaaaatatttaacaatatagaagctagaaagtagagttcaaatataaaagttttctgtggatcaatatttttttttattaatttcttaaaaatttataagatattttaataagtacgttgtaaattgtcatataaaacaattaaattaaaataatcaaaaatactaaatagaactatatcaacacatccctttaaaggatccaccataaaattttctaataaaataaataaataaataaaaatgtggtagagttagatttgagtctcaaatccaattttttgtggtgggtggtgtatagacttagcacctattaagaaaaagacaccttttgttcaaatttttcttaaaagattttatcttttacattacaaaactaagtccaaaaaaagaattgtatggaagaaattgaagcaaaagaagattgagtttgaatggatctaattcattttcaattcaatctaaaaaaaacacatgaataaataaaaatgggttctttgttggccaattttctttcacaataggcttatctatccatgtttgtcccaatgaagatgaacacaatttttattaattttttttttttaatttgagaaaattggtaattggacaaccttttcagatctaatcttaaatctaaaatacaattttgtgccacgtaataacattacatgtgttcttggaacaatcaatgtcagatttttcataaaaattacatttttaattgttttttggggtgtatctggtgaagggtatttttggaaattcagaggttggtaagtatagtcatatacgaatctttttagtttctatttaatgtagggacaaccgttagattcgaaaactttactgcgcaatcaacggttcttgatttgactgtctttttctttttttggttaaaaattggaaaaagcactatgtaggtattagtttgtgtatgaactcattttagacaggtaaattagtaataatttcactttttttttaactatcataattattgtagttataataaaatagtcttttcatttttacacttcaaaatattttcttttttatttttacgaaattctacata

SEQ ID NO: 379876 - DNA, 1577 bp, Cannabis indica
ataataaaaaagatctgcgagtatccattgaaatctatatttggagacatgtaaccatcaaaatccattataactcggtactgtgtctaatatacatatatgtagaacttgttttattctgcacagtaattcatttatggctgtgatctagttaataatagtgatatagacattacatggcagttggctctgaagagcagacccctcttatttattgctttgttttttctaaatttcttaagttgcgtattataggcctttgtgaagttattttgaacttgaagatacttgtgcattatagccacactcgtggaacagtattgtacagaaacaagttgggagcgaaataaaaataggttaacgtgttattgagcatcacttttcatactgatgaaattagaatgtttcaatcaattaactcaaaagttgcagtataaagccaatttggattttaccagggataaaaggaagaatgaccagggaatcagggaaaaataagtggccaacaattgtatatgggacgtagagtacagtgacatgaggtcattggcatgatagatatggaatgaaaaataattatcttacatcatgaaaatgatataaaagtagaaataaatgttttgaatccaaatatagcaaaagggtctgtccttttgcgcatgttggtttctcctctttgaaagcaattgtataacacaaaacccttcaatacgttgaggatggcctattctcctagttgcaatggtaactagcgtaaaagattgatcaaagtctaacccaagagttcacatgtctacttttgcaaattatgaattcagatatcaaaaaaaaaaaaaaaaattttaatctataaaagccaccatcccaaacccagtttcgacgtaccaagaaatccaccaaatccaattagtgcctaaagagtaaaacaatggcttctactgtggcaactactgcttttcttttgtccctcaatcttcttttcttcacactggtcagttcaacttactgcccaccaccaaaaccaaagccttctccactaaagccatccccaccgatgcctactccaccaagccctggctctaagagtagttgcccaaaggacacccttaagttgggggtatgtgctgacttgctaaatggattagtaaacattgttgtgggaaccccatcagccaccccatgctgctcccttctccaaggtcttgctgatcttgatgctgccgtttgcctttgcactgctattaaggccaaagttttgggaatcaaccttaatgtccctgtctcattgagcttgctcttgaaccaatgtggcaagaagtcccctaaaggcttcaaatgtgcataagtttatggcactcagtactcactaccattttatattgtattatatatgtgtttccttaatttggtggtataatcggtttcacaagatcatgttccgtgatcatttgtgacgttttcttctttttaattaaacatcaacaacttggaatgtatcaactacggacgcctgagtcatcgtgatcgtcatctatggcttgcctctaaatgttaggttacacccttttgttgatttg

SEQ ID NO: 379877 - DNA, 2396 bp, Cannabis indica
tcagttatgcaataacatactgcacaagatatagtatgtcatgaaatactaaaacgaagttcctgagttaagcataagtatattcaacaaccccatgtttgttttttttttttttcttcatttcataagtaccatattgttataaatattgcgtaaatatattgggcacacattgcagctctaggagtataattaatgtggctcatattataccacaatttttgaattaatcctttaccatctaaatttaaatatatacattagttcttgataaaatgaattcatatagattaatgttgaattgagaaatccattcaagggttggaacattctaatgtggagaggaaagtctcatgcatggttttgaatgagaggaatattccttttgaagacaacgtttatgtcccagtataagaacacaattcagaaatctgttgatagccttgaaaaggaattttcctattaagcataaaccacaaagagtcatagaaaatactcattgtcaagcatacgctgacgaaaattaatacctaacatggtaaggcgatgaagagcagtaattgttgttgttatatgcttctttgcgaagtccaactttttaatgtcacgacatatctcttgaaccattgtctcactttgctcagctttggtttttatttctcggattttatacatgagttcctgcatcacatgaaagcacacacacacacacaccacattatggaagaaacaacacaaagaatccctaaaaaagaccaaaggttgaacctgcagaacaacatgtcttcattaaatacatacttccacagcacatgtagcagcagcaaggtcttccttcgctttagtccctgaattactctggaagtatagtgatcaatttgtcagaagagaaagcttagcataaattttaaaagtgacaacattttctattttcctatgtttttagtttgtttttgttataagagtattatcttatgtttaattattaataatattatattaactctgtttcttattagaaatgatgctagtgtatgtataatataatttggaaatatgatcactcaactaaaatttaacctcctgaaaattgatatgactatacaacttcaaaacaaaatcattctataaacaaaatctcttatgctctcataaaaacacacacacatatttatatatatatgtatatatgggaaatgtattaaactttttaacagttttcaaccaaactgaaaaccagaattttatatcttgtgattaattaggagaccgagcttcaaaggattgtatttttctttttcttttttttctgtctatacataaacctagctatgtcaaagtctgctcggattacttgcgaaaatgaaattatcagataatcaaactctcttctttcctgtctgccattctctatatcaaatccttggcactgcttctactaaaattatgactagacagctgtatacatttctatttcaaccaaaaaagcaagtaaaggcattaagaaaggaaaagatagaacctgctgtcgaacagctgctaaaatttcagtatccactcgtcgaatctcattatgtatcttttgcataagtggttcaacaccagtcaaagatgcctctgaacagaagaaaaaaaagtgatataagttaaccaaaagaagcaagcaactatctcatcatcatcttcatacaaatggaggattactttttccaatgaatgtttactcaaatgcatttttttcatcaacacttccttagccactaaaattttagtataataacatacatcaacgcaaaatgcgtatatatatgagttaatagatgtgtaaatatagccagagagacacctgtggggaacatctggttgatgtactccaaagcactagacttgtccattgctcttttctagctgaaaatcccgtaggctggtcaatctacaaacaaaagccaacacaaaaataatagtttctcgggttcgaattactgaaaattcagtaacatatacatacatacgcacactcaaacttgaagaattatatacaagttaaagatttggattgaattcaaaacaagctaaaaagagaaaaactactgtttacgtacatagaaggaaattttcagatcgcattacaggtggtgaattgaggaaccgatcatatgaacgaacggagatctacaagcaagtgaagtttggttttgcttctccctctctctctctctctgaatctctccaatttcagattcgagaggggtctgtaaacgggtcgaaccgaaaacgggccaaaagacggacggattgtaagcagaaatgggttagccacgggtctaggtgaactaatccgatcccactcttttattttgagcaacttacaaaaatattggaatttaggttaactt

SEQ ID NO: 379878 - DNA, 1855 bp, Cannabis indica
aatgtgaaacaaacaaaagtatgtggacgaatgagattagaaatagggatcattttcttaaaagctagggcagtaatgtgaagaatacattaattaaaaaatacatatcgttaatgttttggtgtttatattatattaattcatgcagccaatgttaattgggtaagcacattgaattaagactttcaaaaccttttactcacgacaacagaaacttttgattcatctgctatatgtttatcaaacgatcaattttggcaactatgtatacataaatatacacatactaaaatatatgttgaaattcttttttagtatattttcatggcactacatttttttttatcatggcactacatatagttaaaatattttttttttaaatttttgaaaaatttaaaattatttccaataatgaaaactgagttgaagtattttgaatacacatgacaaactaaaatatatgaaaatgatattttaactataattatattgaacactattatacaaaaaaaaatatatatagatatttgatatgtattttcgaatgcaaaaatttaaaaagaaaaattgtaattcacactcattaaatttatgcatactgtaagatcgtaaaatatatggggatctaattggcataattatatattactagtttatgtagaaatagggtgttaaaagaataagagttttaattaatatattatataagcttttaaagcgacctttgttatatgtattccattatgtcactgtacactagtactatacagttgttgattattattattattattttagatgtttcagatcaaggtattgtgacaagagtattattattagctatgacttacgaattaagccgccctcaatcatcaataataagttaatattttaagaagttgaattcctccatcaattattagttaattattttacctgcaatatatactatatacatatgatttgacaattttagctaaaaaaaccaaagtcagaggtcaaaaattttcttaacccttttggaaagcatccgatttcgtcttccttacctattttttaaaatagttgtcaagttagagcactttcaacatattcaccattttattttttaaaatactttattaaaattttatttttattattacatagttattacaccatacattaatttttttatatattttttatactatttaaataatatattcataatacacaaaataataacatattatgtattacataatatttatttactttaacacttataaataaataaaaataataaataaaaataataaaaaattatagctagccactaaaattaagaaatttcttatttacatttaattaacctatttagatgtaaatttttgagttattttagttcaaatatgcttttttgatattaatttttggctaattatgaattttgccccctaaactttgacatatgtcaaatcatgccccttgaacttttaaggttgtcaaaaatgctccctgaattattgagattgttagatttaaggacttttatctaatttcatctaattttactatttcagtgattgtttatgtactaaaccatgcttcctagactttgatatatatcaaatcatgctctttgaactttgacatattttaaagcatgctcctagaattttcatccatgttagacttttttactaaaattggacaaaagtccttaaatccaataatcttaataattcaggtggctgttagaatttgaggataagatgaatgaggttccatcccaaaaccaattggcaatgggaggagtagcccattcatcttatatatcacaattcatttccacacattagcaatgtgg

SEQ ID NO: 379879 - DNA, 3967 bp, Cannabis indica
attgctatttacgttttttctgttattccacttattattttttaattgttttactgttattgttattgttctgttttatgttctaccgttattttataaaagataatataatttgaaaaaaaaaatttgtggtagcattttttataaaaattaatttaaatttcagttgtttttggtaattttttttttctctttatttttttaaatgtcatggcactcctcatctagatggggcctcatttaaatttatttattttatatgtatattttgtattctatatttttatttgtttttcttttagtatagtagcattttaaaggttatgaaaacacattaggaatactttcaaaatatacatttatatcatatagggacaatgttttatattttgaatgataacattgtgtaatatttttttttcacataatttatttcttttaatattacaattttaaattttaatacaacaaaaataaataaataaataaatgtctctaactctcctccatagaggtgggtgggacaaagtataaattggttagcatatgagagcactccaatcaactttttcactttatcatttataaatatttcacttaaattttttttttaattttttttattttacatgttagtgacaaattgcttcgtcactaccttggtccaaaaataaatatacccgacttgcaagtttagctaaaagaaagaggcaaagtcaggaaagttaaaattaaagatggttagataaaataacaacaagacacaaacttaccttagtacagttcctgagaagattccccatcaggaagtcaggcggaaggatatccgaacaaaccaacaactcctcgacatctgcttggagcctctcctgataatgattgcagacttccttgacacgctttggctcaaccaagggggcaaagcctgccttatccttaggctcctgagtggttggggctggaggaagtagaacctttgagttcttggccgacttagtttttgtcccggccaccaccgagtcagcattaatagcagtgccttctggaacagagactttggaatcggtcttctatactttactcgggttttccctacctgtcgactcgcccgctttcctcttgaaagtagacatcaacctggtcgacgtttctgcacaagagtaaagaaagttagagttggcaatcaaattaataaaaacacaagtataatagctaaaagtaccctaggcgtgaggaggagcatcctctgagacaatgatagaaggtgcatcctcgtcagaagatgactcctcaacatcttcgacaacaactttcccttttccttcaacatgttgcacgagtcgacgaacaagagcatcttcggcgtcattaattcagataagaacctcgactcgggtaggtttgaccctgccaaccttagttttcttctttttcttctgattagtttccttagaaaaaggacttccatgctttggatataacccgtacttgataaagtttttgggcaatgtcaagaggataatatgccgagcgaactccaacaagcacaggatagcttgggccctatctcggagaccaagtgtaaaagttgggtggatgtaaatcttggcccattgaaaggcagtaaagttgattggcatctccgttacaatatagtaattgcgcaagaaaccaccaatcttcttaaccgaactcccatttgtgtcgatcagacatgagcactctagttgtgagaagtagaaataccccgagcggtcacagtgcataaaagactttaactcaaagaaccaaataatgtcgtgcgcagacggctcaccccatccatgttgtgtgtataatatgaacatggtggtcaggtagtgtgaactgtgctgggaaaattttgaaataattgactatcttcacgaagtaaggatgtaacggcaggagagcctcgtgcttggcatgcgggccggaccacgcacataaacaatcccctgagtcatttgcaagttacctcttgagagggaggaatacatcaacgtttccaaggcaactttctttgtccaagtttcgaaggtgcctcttagtaagtttggatggtggggatacccacattgggctatcaggaaactggaattcaaatggctcgacctcatcaaattcttggtcggtataattgatgcctaaaaataaaggacaacaacaaaaatcgtaaggcttcttatccttcaaccaccagccagcctcgtgaaaaggcatgattgcataccttcggctgtcgacttgttcatcgacttcctagacttttggatctttatttaacatgggatcttctccctcggagtctgacccaaacaactcacattgtctagccattagtcgagcaaattctagattgcccgatccaatcttacaaaaagtctactttgtctgagccagattccgtgagcggaatggataactttgctcagggtggtccattacagtaacgacaatctttgcttcgacctttgggaggagtgaaggtttagggccggcttctggcaaggttgtggggacgtctggttagaccacgtaggtctagatggaaggcaagtattcctttcaaccaaaattatactctctaatgtacctgctgtacacgtcacctccaattcggtccagattgcaatgactctggacggtcggagcgacttcctctttgcttggtatgtcccactcctcaaagctggatgaagagttggtgggagatggaggcaaggcttgaagtcatggctgttcttcaaaaagtaattgcagcaagtcgttgtcaattcattttttacctcttgaaaagtcattcagattcatctacaaaagagggaaggggaggtaaataccgaacaaagttatagagacaaatttttacaaaacaatctatatatccccgactagaggaaaatatgaatcaaggaaggggcttcgtcaaaatgaagagaagatcgacttgaattgaaagattcgaggaaccctaaaaaaactaaattttataccatacagataaagattcaactaaattcttcaaagaacacacgattggtgtaataattccacataggactgagcaaaaaatctaaaaaaccaaaaaaattgagtatattgactgtccgaacaccaaaaaaactaacaccgaaaaaaccgaaaaactacctccagtttaaactgcctttgcacggtcagttttagtgtcaatggcaaactgagaaccgaccagacatatatgtcacacactgtacatatataatataattattttttacatatttaatataaaattttattaaattagtcttactttttatctttttcattcaaagtctcacttcttcatatttattatgttatttatttttatataagcttttaaaactttttccttaattagtaatttaattttgatatattttaattataataattcattaattttatattaatttataattaccattcatattttatggcttttataatccatttctaatttataattttctctatacatgcatatatatgttttaatatatattaatatttaattataattatagcatatttaatattggatattttttcttatttatagcataagtacagttagttgtgcatttttaattgcatgattattagtattattttgtatttaatttggtttttatgtgacaaaagttaaattatttaggttaatttgtgaaatatcttcattttttaatttattgtttttaaatgatagttatatttagagattatttatatttacttcaaatatttattttatttttatacctttgttagtacttaattagctttgtttttgtaccattttttatggtttggatgtcttttatgacttttgtgccatctttatggcttgcccctaattgtttagggtagatttgtagtgtgatcaatggataagagaaaggtttcatatttggtattcatg

SEQ ID NO: 379880 - DNA, 999 bp, Cannabis indica
ttatcttttagttaataagctgagtatcataagagttaattgattatttattattcttagacaatagaattatcaagttagaaattaggttttcttttctctctttccttgctcggccacatccaagaacaaagagaaccaaattttttcccacctttttagcagcagtttagaggggttttggctagatatttcattgaatttggaagatttaagctcaaggtaagctaattcttcttttcctctttcaaattcaagttttgagattagttttttcatgcaaaattctggttttggttgctatagaatttggttgagttttattttgttttctggtgttaattttaggatgttttaagctggtttaagcctggttggatgtttatggttgtgtttgaacaaaatttgagctttagagctcaaactttactcttctatggtgatttcagtttcagagggtattgcttagttttaggtttgaaacgatttgggggttgatttgagttatttgtggtgattttgggggtccctgcactaaactggttaatcggttcagttatgcactgtagaatcggttaaccagttccccccagacagaacctttagaattggcttttcagttgggattcagtttactggttgtggcagttttaggtaccctagatttttatattttcacaacatttagggtattgccatattttctatcgatagggaaacttttagttttgatttttaagtccctgaaaagtgatttagcgtatcactcatcagttttgcgtatgttgtgacttgggggcttataaactgtcttgcagcagtttcagttaggttgaccagcacacctgatttcagaatcgaggtaagattagtataatgatatgcatatgtgattacatatttagtatacatgtttatgatcgcctgttagattacattgaaatagcggtatcagtatatatagaattatattggataccgatgagtgtatgtttggct

SEQ ID NO: 379881 - DNA, 4762 bp, Cannabis indica
aaagtaacgacttcatttcaagctaaaataactaataatgcttctcccaatcccaatgatacatgtgaccaacacttaatgcgcttcctccatggtccatacactttttaagacaagtaaaacatgtaactaagtgaacactcgcatactaatacaaatgctcatccgtaggagaaaggttcaacacacatggaagttctgtctgagtctggccgtattaaacatgcttgagatttctccactattttcttcatcacttatagttacaagggaaatataacttaccatcgtgcacatctaagtttaaatatacatctcaaccaatgttaacactgaacatacatccttcatatggcatgttggtcaatcattccaaaggtattgtatataagttgcaaaaattacacgcatttttagtagcagaagcatgaaaggactacacctgagatctatattcttgtctaactctttgctgtgctttctttttttatctttgttttaaccagattattcagtctaaatactattatttatcaaaagcatttcaaacaccaactatacatacatatcaatattaaatatatattttaccatacaagtcaataataagttgcaattatttaattttatacagcgaagagaaattatcttaatggaagagaataagagaagtcgctggatgcgtaccttcactgaacatctgagaattcagagaatttgacattcttgatccatctctttcccaacgccactgcccctctgtttttggcgctaaataagggttatccctttcaggagtgaaggcttctagccgtccttcaaactgagcagaattgttatctatcatctggccagatgcatgatgcatctgaggagcaacatatgaattgacaccagaatcagcatactgaccctgccttctcatcataaactcaacaaggcagctcgaaaggtacacctaaccaccagagataagtcaagcacataaataaatcatttattgagtaactttccacagttcaaagacacaaattattttgtcaagacaatcatcattaagacaaacaatggtcttgacattataagattgcagttgcagtgaatatcgtgcctttgatggggttgggtttgagttccaaattcatgataaggttttgtcattttcacaattttgtgaacttaatttcaatttgttttgaaattgatagatcttgacaagtatttagattcaacatacagaaaatccaattatacaagcaataagcactaagcacagcctccatacttgtagcactggggtacagaaagcaacaactagcaaacaaatttgtcaaatgtttttcgtaagaataaagattttaattgaaagcaagaaaccaaaatataagttatggtctcactacataactacataagcattcttaaaactacattactggtgaaaaattaccctaaactagcgaaaatgaataatttaatagatacgcaaccctgcaatgtttcaatgtaaaaaataacaaaaataaataatgacaatcaaaggaagccgaatagatagcattgcctcaaagttcatccttccattgcttaagtttttaaaatatttttatccataaaaaataaaagaaaaaaaatattgtgaaaagttgtcttcaaattggcttcataaaaaaatattcataatatagctattaaaaaatctgagtgagttataaaattatcacaaatgaaatttgtttaaaactcactatatcaatttattactttcacaccttaatctaattggttgaggaatcaattggagactaatgaaagaaaaatcactattgagttagtttactttaatagaaaagagaacaaatttgctcaccataattatttaaagagcattaaatcaaaggatatgatagtgaaaaatcaggttggtgtattcatgaaggcaacatgctataaaggatgacccttaatagtatgcatcggaatatttcacacgcaatccatatggtcaataaacaggtgcgcttgacatctatataaaagcattagtaagatttcctttgagatatctagctaacaatatggtccagtctattgtctcttgatagaaatttggagtcagtcaaggtggcggatgagatgttgacataaaaaatttataaaatcagcaaaagtggctctatggttgtaggatgtgatcagcgtctcttagtgctggccagaatttttaattggctaagatggtattctaccaagttcaaatgataaaacagttgggtagcacaaatcatagagtaaactgctaaaaaaaacatatttgaaatttgtatagggtccagaaataagatgtacctaaattgtgattcaaacttattccaaataacaactatatcatcgcatgaataaacttcaaattacctgaactagaaaagtattggtagtatctatacacacaactaggtgccaaatcgatatctctcagacataccatacttgcaaacaatagttgattaaaaatgtgcttcattcacttattctcttcaactcttcaacagaagccttacattgatgaatagactaaaaaatattcaaggtaggaaagccacaaagagagtattataaacaacaataacttaaagattataggtcacgatgattttcattcccttcgttctgcagctggcagctcggcccacatgcagtgtgtgctcctggtctttgttgtgagaagaatcgcagtatatttctcactctaaatcagtaagtgaattctaagagtgctatctatattctcagtgagaaaaacacaaaagggtgcatttagattttaagctacacaatttcgttagctacattatccaattactgaaagatgacatcctcctatgtggggtgtaggaaaaaatttccttaaaacattttctcttcttctattttccgtggtagtttaaaccatgtttcattttgttcactatatcacacttgttcctagtattgctaaacaaatttcccttatgcaaaacacacaacttaaatttctaggacaaataccaaaagattgaaaatccaaattcaaataaccgaaaactttcagaattgagctaatacataataaacatatataatctgcgcagagaagcacaaacacaaacatatcccacccattctataaaaaaatccatcagtttcttgtagacattttatcaaacgagtagtatgcataagctaatttcacaaacaaatatgcaattcaattaacaaagaacacatctaagggtctccataaatgataacagaagtccattaaagttaaattcaagtaccctagaggtaccacgttcccaacactgaacaatccacatatgaagaggacaaaagataataatcgaacatcaataaagaagggtttttcttacctaaaattatcaacttttgaagatatattgtgttccaattgagagaaagagctgaaaatcgaagtgggttgagttttcgagaattttgatgcaggattttatctacttcagctgatgatttggaattggaccgacatttggtagtaggtttttctgttaataaggtagaacttgtttactcgataaataaataaattaaacgatttaaatggttaggaaaaaaaaaaaacctaatttagatttttgctccttttgacatatactaaatcatgtccgtgaacttttcaggctgtaaaatattctcctcgaactattaagattgttgaatttgagtacttttgtctaattttattaaagaaagtctgacgtggatgaaaatttaaagggcataattctatacgtattaaaatttagggggcatattttgtaaatatcaaaatttgggggcacgatttagtatatgaacaatctacatattagcaaaattgaatgaaattataatcttaatagttcaggggaaattttgaacgacctcaaaagttcaggggtacgatttagtacatgtgaaagttcaaggggtaaaaatccaaattagaccaaaaaaaatacgtaagacactagttttttttttaaaaaaaaaagaattgtatttatacgtttaaataattttttttatatttttatgattttttatagaaacaacacgaaaacaacaagaaaactatataaaagttaacatgaaaataacatctaaataacatcaaaacaacaataaaaaataacatataaataacaaaaaattaacaagagtacaacataaaatgaccgtattttctgtaaataaaataaaaaaaattataaaaatattcaaaattccgtgaaaccttatttttataagtttttattgtttttgtgtatttgtgaaataaccaaaaaaaaattacacaattttcttttattccatatttattacccaaaaatacctcaatttttaataggaacttacaaaaatactaaaaaaaaataaggaaaagtttacaaaaatattaggatacagagatttttacatttttactgtaccaatttataaaaatactatgttaaagttttaaaattataaaaactactatgtttcagtaaaataaaaaaataactcaaaaataaccataaaataactataaaacaataaaaaaaaataactacaaaacattgacctaattgcaataaaaattataatatcaactattcaatatgtttttgcattacaaattttagtttagttaattttgacaacttgatttatccttttgtattattatattatttttttttcataaaatttgttgtta

SEQ ID NO: 379882 - DNA, 5170 bp, Cannabis indica
tcatattgttcacttgtaagagatgtagttgaaatcattttgttgtagttagaaccttgtgaggatatgctcatccttagatgctaggttgagcatatgaggcttgataaatccttaagagcattctagagtttccctaagtgtccatatgagggaggaaatgacttttaggacaaaggtccttgagccttggttaatcttattgtgcattattcttcttctgctctagctttcttgtaatcttgatgtaatatttttatttatattttgagtattttgattgtaatcttcctattccctcttgtaatgagaatattttccaacactaacttattgtgtaattacatggttaaacaaacatgttgatcgctgatgtcttcatgaattttgttagaaaaatatcaaatataagatgcatcctctcattactaattagttttgatatagagctccattaggaccgatcctgaaatatagtgggtaataggaaaaagaagattgggcccttatttacaaaaaaaatggtatttttaaaaattagtaaaaaaacatgtataattttaaaaggattttttttggacctctgggctaggtgggccctaggcacaggcctagcccgcctatgcccaaggtcaagccttagctccatacatcttacttttcaaaaactcaccttattttattttttcaaccacacttctacattcttaacatggtattagagtcaaataaaagtatttgatccaaaaatctatgaaccaatctaaaaagtatagctaaaagagtcacttgtgatttagatataacaagccaaaaagaactactagtgatcgagttgtccaaagattattgaataagaaaaatagccaccatcttaaagatatagatgcataaagtacttctctcattgagccttatataactcactcctatttctcaaacacacttccacattcttaaacacatgtgaattcttatcacttcactaaaagaattaagtaattacttcaaattaacaattgcatataattacagaataatttttcaaatacaccttactatttagggttgttcatcaaactgctcaaatcacttgtaccgcaaaaaagcacggtttgaaattctttgcggtgcggtcgctgtttgaatttttcctaaatcgcgcaatgcgatgagatttgcagttttaaattgttaatatgcagttcaaatctcactacaccgcaccgcatattatgaaaatactattttttatatttatttaagtccaatatgtgaaggcacagcccaatgcacactaattattgttttgttgaaacttgaaattttttttcaagtctaatggtatttttgacaagtattgctcaaattttgttgtatttatggtagtttaattatttgatgatagtccaaaccgtagaaaccgtatcacaccattttttgcagtgtagtttatgcagttttttagtttcgcgatgtgcgtacagtttgagaaattaaaaaaattgcatgtgcagattggtttgaaaaaatagtcaaaaatcgcaccaccaacaatgtaaacaaccctactattattgtcttaagctggtcgagcatcatgcagaataagagtgatatttattttttaatgaaaaattaaaaagataacacataatattattttaatatataataatacttttaattattttgtaaaagttaatataacaccaaataaggcaaaaaattattataatgggaaatcaagaacttgatagcgtgcactattgagtggaccacaattctatgcactaactataataatattacagttataggtatgattgggtggcgtgaaattcttctggtcagtttattatagctcggacagtaagttgaatggggttgcatggttgattttgtttttgctgaagctatcagaattaagaaggtgttgagttggttgaaagaaacaggaaggcatgatgtgacagtggagtcgaacagtttggtcacgatctaagctatttgaagttcgttaaatatagctttaattttgggttttgcatttctagagtttttaatttgtaatagatatttttttaattttaatcaagcgatttattaatggtgttgctcatcatttaattagaacttcctaattaattaatgctgagtgtacctaatcgaagtctacaattttaaataatttacgtgatgcttttttgaatttaagttaatcaagttacatatctttttaattaaaaaaagctataataatattataatttttaattattattattaaccatcacacaataagttataatatatatactattatagttataaaagaaaaaaaaaatcaaaatagagaggttaatattattattaataataactataaatcataaccaaaaaatgtcttttgtttaggaaaaaaaattaaataaaaaatcatcaaacattaccaatgaaataaattgtaatttgctatagtgcaatactatctttttcttgtaaatgttaatcatgataatattaataaataatttggatgcgacataatatttgacctaggaattccactcaaattagacaacgattgagattggagtaacaagagacaatttttaagaaataataataaataaataaataattaaaaaaacagtgagagaaagacacatcttggaatgtcttttttgaaataaaataaaataaataaataaatatatattcatcaaatattataggaataaattatactatttatattctatgatgatgatcaccatgttttgtcaaattttacaagcccaacacttgacatcaccacattcaaaaataaataaataaataaattataatgatcccattaataattaattaaacataattaaaagctagggtttcaagtaattaatgatcattagtggttagtgatgtgttttagagaaaaaaggtggaggcaagcatggaagtaggtaaaaattccattagacattctagtgtaataatggacattatatatatcacctacaaccacacacaatatctaaaaagagatcattattataaataatgttaatattattttagatatggtgtgttttgtaaaaattattatttaagttttttattctataaaataataaattaaactatctattttgtaaatgatacaaaataagagtttagtttttataatttttttaatataaataatttgagataatgtttaggacgaacagatccagaaaaatacatttagttttatcataacaatttcagatcgggttattattaattttaattttgataaaaaaagttaaggagaattacctcatatcttatttcttaacttttttttaaaaaaaaaattacggtttaggttactccgatgatttctatatgagttgttatacggattttgattgcgatttaagttgctctgttagttgctataggagtttctgtataaaatgttgtaaaaatgtaaaaaaaaaaaaactatttaaaaagtgtaaaataaaaaattctcaaaaattaattcatagttatatagtattttaaaaaaatatatgtagtttaatttattatctaaacaacaaaataaaagttctaatcaaataatttttacaaaataatatttatacatcaattataataattttataaaaggaatttctgacagattgtaatttagacccacacaacatcatatcatggtctcatttcataattatataataaataatagatcttgcataatatatagtctttggcaggtcaactttcaactgtttgactatcatgtattattatgaattatgatcactcactcctattgaagtagtgaaacacatgattatgttctccaatgacacacctcccaactaatctcatatactattcttttctcttaataactaatttaaacttacctatataaatatattaataatcatggtttgtatatacatatgcttcaacttataatttatattgtgtttttaagactattatttctgtatatataatatatatatatatatattctgatcgaccatgagtggaattccagacttttcaggctaaaatttaattagtagtggttgtatttgatcagagatcccatgtcttctgccctaaattatgtatatgtttatataatatatatatatatatatatatgtgtatttatatacgtattatatatataagagcatggtcatgctatcatcatgctaacgcatcatgcaatacttaaaaataatgatttactaattaattggggtaataattcttctaaatctttcttaatcattcatgtttgattatgctttgttaatcactaattaagcaaactattaattattacatatatataaaaatagctaagctaatattcaaatttagggtttgacaagtatagcaccactcaaagtgaaaaggagaaaattattaccacattttgtctaatcaaattgaaaattaaaagctaaaattattaatatattgatacatatatatatatgcattatcattatatttagggatacacataggagaattagtgggaaatgcttcctcgttccatcatcgatcgttaaaaattttaagtcgttttttattcagagaattctttaatatcactacaaaaaacaactatttttagtgacaattttttagtcacaattaacataaattttttgtaactaaatgtgacttttagttataacaaaaaactacttgtgactaaaatataatatttagaaacaagttgtcactaatttacttttagtcacaacaagtattgtaactaaaactacatttagtcactacaaattataatttttgtgactaaaagtaagattctttacagtgaatgtaaaaataaaatttattttaaatatttaaatatataaaaatattaaattatataaaaaaataaaatattatacattatttattattcaatatatataaattattatacaaaacacaacttaaaatattataaaaaataatctaatgtactaaaaaaaataccaacatatattataaaacataaaatataaataaaaagataagtaatatattaagggccagtttggcacagctgtgctgtgggaaaaagtagctgtagctgtgctgtgggaaaaaacagctgtagcagaactgt

SEQ ID NO: 379883 - DNA, 4762 bp, Cannabis indica
tttttataattaaaaattttaaaccataaaattataaataaaatatgaatgaaaaatatttttaaaaatttcttaattaataattacaacaaacaccatggtataaaaaattaatattataatatcaaaaattcaaaaaagatatatcaagcactttatactccgcaacaattgaatatgctccacaaaatagtgtgttttgggtttggcccctcgtgtactgttggtttacatcttgtccctgtgagacttaattagatggacccacgctttttaaatgtcataactacccttctgcagtaccaatattaactaacaaactaagggacaattttgaccttttagcattaaattcaagttaataatacccctgaccctgattagtgtgattaattggtttacaagtggccccagacatcctatcctcctatagcagcaacagaaaatcccttgatcgcattgtgcattgttttgtcctaactcctaaggcctaagtatgggaaaaagtccaaacaagaaatctccaaagtaaaagttccaaactacaaaaaaagaaaataatgttacataatagaacaaagggacttaacaaagttgaatggatcaatcctttgatcagcaatgagtggatccaatttctttttaataataatactctttcatattcattcaagtaataataataataatatctcattataatatcagagtaattctttctctctaagatctgttcttatggagtaaatacagggatattcttatcaagagtgtttgactttctctttctccgctaggatagcatttgagctcagaagccgtgaccctctgtttcttgaatcagtcaggtcagttccccccattttagcattctctatttttggtgggttctctttcatttcactttctagttctgtttaaaagtcaaatttataaattttgacagaaacacttgtcagataagttttattgtgcaaatggggttttaaaaattccacctttgtcaaataatatttggaattgtaattaatgagtggttttacgtcttacaaactggtgtcacattcatgggtttgtccaatgcagatccaaaacattttgagtactaattttatccagtttcttatttgagctaatctactgaaatttggagatgggttgatgtaaagtttggaactttgttttttttttcgtcaatgggataagcaagtgtcaaaaaaagttctttatataaattaaatagtcagattgatcagtgcgtatttattgcctttaatcaatttgcaattgatcacagataaattcaatgaaaagtgtgtttattacagccctagccattttcactttagaatttagaccttatgaggaccaataccgagttttcatccatgtttacctgttaatttgatgtggatttatattacaacattggactagaaatctgagaccaccattcatatgcaagcagaaaaagtatttagtccagaaaaggtgttaaacaataaaagaaaagaaaaagttagtacctttcattgattgtaaactcttctctcttgtgtgatctggattaaatggcagctgagaagataagggcaagagtgcaaaactttgagaacttgtttgttgcatgtttgcacaggcttggaattttttggcattcttgactgttcacagtgacttttaatataatagaagaacaactgcttcaaagattttaatgtcaattgaaatagctaaactttacatatggaaagtggtccagataagtcatttctgatgttctgttctgttcggttggataggacgatttggctgttatttccagacaatttgatcaagttgttactaccacccctgtaaatatgatagtaggcacacatgtactcaatataccacctacaaaattggcttaacatgatgacttgtttgtggagtgaagactttctaggtttggtgaatttcttctgcacaaatgcatacttttatatgcttcttatagtggccctttattagttgagtggctaatttatatcttttgaattattttagccatatgaaatttatgttgagcattttgatttccagattatatggggcaactgttatatctggtgaagatatagataattgagtgatagagatagcagaagcaatagtatagtgtacttaagaatccagattttttcatcatgcaggagtaaccttttaaaaagcatgagctcaagtttaaataaatcttcttcgaatggctgcgataaggttttaccattggaagatcagcaagcgaaggtatctcctccagttatctgttatttcattatatccttaatcaaatcacctcttcttttctttgaaatgtacaagtttgaacaaggtagagttagaatagatttacttagcaatgcttttcaatatttgcaggtaaacgaagtgagaaagtcgataggcacattgccagataagttatccatatactgttccgatgcatctatatgccggtatttgagggcaagaaattggaatgtcaagaaggcaactaaaatgctgaaagataccttaaaatggaggtcagagtacaaaccggaggagattcgatgggtatgctactgaaaccttatgccctggggggatatataaaatgttttgtcaactttgtgctattacttgagatttggtgtcatttcaattttcattggtgatgtaggaagaggtagctgatgaagcagagacaggcaaaatttacagatcaaattacattgacaaacatgggagaacagttcttgtcatgaggcctagttttgaggtttaacagcctccttatccccactgatcaaccattttaaccattgttttttcacttcgattagtattactagtaaaatatggaatttctttttctttccactcaagttgattttacaggtttttctgttttttgttgagttgttaattgcagaactcaaagtcaactaaaggacaaataaggtatttggtttattgcatggagaatgctatcttgaatcttccacaagagcaggaacagatggtttggctgattgattttcagggtttcaatctatctcatatttcagtaaaagtgacacgcgaaactgctcatgttttgcaagaacactatcccgaacgccttggtcttgccatactatataatccaccaaaattctttgaaccattctggatggtatacttgtttactgttattattctttatgctgcattttatgttaatttcctttgttgtttggcttctaacacttgaaaataaagaattaattaataaattgtaccctttcagttggtgaagccatttttagagccaaaaactcgcaacaaagtcaagtttgtgtactcggatgacatcaacacgaagaaaataatggaggctcactttgatatggatcaactggagtctgcatttggtggaaatgatactacaggtttcgatattaataaatatgcagagagaatgaaagaggatgacaaaaagatgcctgctttctggactaaaggaaatcctccagctccagcaacctcagaacctgtcccgaacaatgacactccatctttggactctaccatcaagttagaagatgatgcagctgattccatcgagaagagaaatggatcggaaggggtgctcccagcccccaatcacactatgctcactgttgacagtagcagaaatcctactaaagaggctcagtaattaaggatccataggaaggccaagtaataacaaatttccatgtattaaggatcaaacttgttaagttgttgtcaatggtgttgcaacggtaacgctatggacgttcactaaattcagcttattttcatgccatattaattaatggcttaaaatatgagatttatcaggctcttgtccgaattaacatctccaattacttgaaatgggctacacataacataagacatttatagaaatattgtatctttggtctgaactcacatggatacaattactgaatgacattagaccacactacttatctgagtccacatgagcacttttacaagccacttattagcacaagatgaaggataactagataccataatcactattactaataataattacagcatatatttatgagcaaaattagagtctagagtctaataagttgaattagcatgtccctctcacacgtttaataataagcttacatgatcaacttattcttttcttcattcagtaattagtattctctagaactttgcaaagcattcaattacttctttgaatcaatatattatattgaaatatttgcggagaaactagtcaattattgtaagtgtggtagataaatacttaaattttttttattggcaataataatactatctaaatttctaaaaatgtgacaaataaatattattttttattgacagtagaactacgaacatttaataaaagagcatagctattaggcacggcacaatgagatagcactttgtgaataattaatgatattctataataattattaaattataacatatgagattcgatatttaattatactaataacgatatgattcgcagacactagtagtatcgtttatcattcctcttaataaaatagtgctatatcacttctcgctacacgatttccatggcactaagttcagcgtaagtatttcaataactaggtaacatacccgctcttcgcgcggttattctttaaaatgttcttaaaatataataggaaaaaattattaatac

SEQ ID NO: 379884 - DNA, 3857 bp, Cannabis indica
atgaattctgtcatttttcttacaattcgcggggcctctcccattgttaggggagagttatctttccattacttgctatgtccttgcctgtaaatctatttagatatgtgaggcatggttgcaaatcgcaagtctcgagtccaatcttctgaagggtggacttgtatgataagtttacctagtcccattatcaacaagttattctcctcactcttttgtaggcaatttgggtggttatcagcaaaggatcattatgtggcatctgtacatggtgctgatcttcctcattaaaagtaatgtgatgttctgcatgaggttgttttgtgggatgttgaggtggtggcacttgtgcattattaccactttttaattcattaacatagcacttttgggctccactacttgttccagcaaagtgtggacctccagcaattactaagacatcatttccttctaaaggtggtgccatttctacattttggccctatggcatggcatgcgcattgtttggcgtggcttaggcattgtttttagcttgcccttgtgcttaggtgttttcccctacttgttgcacacataatgagcaagtggcttggctcggatgagatattcaatttctattttcaaggctttgccctcgttggttgtgtagcttacgtctttgtggtatcgacaatactttgaggtatctcaatttttcgtgattcctttcatcggctctaaaattctaaaattcacagtttgctcattggtgaggaaaatagtttcaagcatttcagtcaactctatgaaggtggtgtaaaaaggtcggttggtccttcctttcttagtattgttgttgtcctcaccatggtcatttttcctcttattggaagtgttctcattggaggggttattattagttgaagtgggagtatcttctattgctccagatgaaagaggaacgttattgaccaatcttgcctcctccccattgatgtacttttgagctcttttcataaactcatctatagtgagaggtccctttccttataaactatcccaaaattgggacacattagtaattcctgcccccaatgccataagtcttccactatcattaacgtctctagccttggctacctcgacattaaaacaattgatataagcttttaagcttttgcctggttgttgcttcacattagcaagggaggaacattctaactttttggccttgggggcgcataactccttcttgaagtcacgtgagagttggtcccatgaggtaatggagtgcctcttttatttctagaaccatgtcttggccgctccagtaagtgttacagggaataacacacattttaagtcaccaatcacttggtgggcacgcataagtgtattgaagtcacttgatcgtggtcagtatcttaaatccttgcagatatggtagggccaatattttaggagagtaaggctctgactcctcatttgaatcatacctagtggcattttgattattggccaccatcaattattgaatcatttgttccaaggcattcgtctagggtcattgactcgtctttcctcgccatggccaactagggggatgttgttttgaagtcccccattgattttatggttgttatttgcaactagtggagttggattttgccttctatttaaatgtttcttgaaatcaggttgtctttgattcgaatattctcactaatcaggtcttcttgcttcccttggagggcggttgttgttacgacgttcataattgcgaggcacattcttatgaacactaatggagcagcttctagagttggatcgaccactaccctcaacaaaactcattgtcctttattattgtggatgatcaggagatatttggggatgcttaaagtatggctcagagtatggcatcaaaattgtatctaattttgacacattgctattttcttgagcaggttggtgccttggtggcatcttttgttttggcccacgatgtcctctaacaagcatgatcttcatgaggagcggtgcgttgccctttggcccctaagtggttgagcatgtggcgcattaccatgggaggtggaccgccttagttcttacggagtggtaccaattgacggattaggttaccttataggtgatggtggggctcgaatcaaagtaggttgctctctcatttcttctccactcatatcattattctcacggttaggccttagaggaacaacttgggtctcatgggcttcatgaccacctccatgtattggtacatgggtttcttgtgcatgttttacatgaattccaacatttggtaaaggttggtgatcccccttccttgttagattattcataggggcatgttctctccttggccgcccccttcttctcctagggggataaggatctcttaatacaggaggttggtacccacacccttgggctggctcttgtagctctttgttgtggcgtaggcttttggccaactaaacgcgtagtgtttcattttcttagaacaattcattcacaagtatggacctgactggtgggcagtcccttgattgatatgaggaacattcacaaccttggacttgtccctcatcttttggcataggtggaaagggattcttttctcggtgcctagaggtctcttctccatgaggttcctcctcaaaattggtcctcctcgtactcaactctattgttgtaaaaggaaaattgataagttctctaaagtgaaaacaatcaaattttcaccacatcactctcaatgaaagcaccaaactattgacacattttttcatcaattgatctaagaagatcataaatacaaagaggactgcaatgaatcaatctgactaaaaagaactacaataaataaaatggacatcagggatttataatagttcacccccatgtcgcgatggtaatggagctacgtctactttttattttactaattagatctgacacactagagttaagttcacaagagggtgtggacagtaatacaacaaaatatttctaggtgaaatctcattcgagacttatgaatacaagactcatgtgatactcaatattcacaaatctatcaaagttggtggttgtaagattctagggaacaaataaccaataagaaaagagaatggtccctattcttggtaactgtgtagatgaattatgtttggatcaagtatttattgtgtcgataaagtatggaggacttaagaaaaatgtgaagaaaggaatgtggtgttctaggcaactgttctatgagtcaaaaacgatccccctttctctcaacctcttactctcataatataagctttaggatttgttagtgatccccacatgtcggggtgtcccactaacaatcccatacatcatccttaataatgaataaaaaattacaaataaataaaaatctccttgttttagaccaaaatgccacaaacattggaaaaatagttattttcggctaaagatacaccaattagaaatggagtgacaagggatgtcacctctcagcttggaattcatgacattggtgagaactgctggaaacatgtgttttgggatgccactgttcgcatatgatgccacgtgggatgtggcattattctccaacatcccacaattaattacactactcaatttcagagtaaagtgtaccagtctatcttgtgagccaattttagacccaataacttcagaattgagctatgaccaatagactgttgggattttatgccctaaataaaacccatttcaatctaatttgatttgtttatcaatgaaatattaaaagtcatttatgtttacatgtagttttcatgtttatggtttaatatatagaaaatctg

SEQ ID NO: 379885 - DNA, 2721 bp, Cannabis indica
gttttgttcaatgatgatcatgatcagaaaaccatatctgaaattctttaccaagctgttatggtccggccacctcccccgccgtccacgccggcgccggcgccggcgccggcgagtgatgaattgatgggttttaagagctcattctcctcaagtagtacaacaagcccatttgagtgttttccaagctcatttgatcaaataatcacaacagcaacaacaacaaattatcatcatgaagatcaattcaaagtacttatggctgagtcaacgctgagtcaaccatcaccacaaccaccatggcttgaagcttcaacaagtaataatcataataataataataataatgatgatattattatgccaagttacttgaattgggatgatgacatagatacacttgtctctagtgatcaaatcaatttgtcatgggattatgatgatcatgatcatcatgatgattctcattttcgtcacaacaaaaattcactctaattataattattaattaatggggttgtgtttaattaattaatctcttttattgattttaattagtagggtattattaagtaaatatgtttttgttttgtaatatatgtttgaggctgtattttttttcagcttcaagcttttttttgctactaatttctgtataagatattgtcccattttgtaattatttttttaatttttaaattgagttattaaaatatttatatacatatttatatatatataaatagtgatagagatggatgagatgaaatggggtcatttccagcatggcttgatttgtataatagaagattatttggtatgtatgtgaatttggatatatgaatggtttgtagtacattggattatagttgagcccacttgtactccacaccatatataaatatattaaaagaaattagagattataaatttttaaaaattataaaaatacattaacactgaaaaaatttcaattttattttttttatataaaaatacttctttagtgaaaataataaattatagtataataatattgtatattatggttgtgtgtaatttttgtgtgcacatatcattatttttttcagaagggtcactcggttcatgtattattattattttttttaaaaaaaaacacaaataatatatgatgctgaaatcataatttagaaagtataataatattttatgattgtgatttttctcttggacaacattttttgttgtagggttttttttttttcaaatattgctcttcacacacatatgatatatatagatagatatagataaatttgcaagtatttgtgaccaccatgttgtgtacttgattattattgatgatcataatggtctagctagctactactttcaacattaaaaattctttacatataattatatgaaatgaaaatggtggtgatgattttttctcatcctttcattcattttagtttcagtttgtgaagacaactatattactagtactacctaacatgtgccttatggggccacatttctaagctttgttttttttattcttctttattattctttcacaacaaatcaaatgacactacttaaaaacactacaacatcattcttagctctaacattttggttttggaccctacaaaatattttctttgcttgggaaattatgatactaattagttactaaaaaaattacatttccactattgaaatctctctctcaacttcctttctagattaggattcagctcatcaagtaagattctttataaaataataattataaaagtaatttgcaatataaatacttaaatttaacttccgattataaataaatacttaagttgataaatatataaatttaacttttggttatcaatggctacatggtagttcctgattagtccaaatcattaaattttaagtaagttccagaaatataacttttatttttcttatttcttttgtaagattcaaaaatataacttaaatattattaccgttaaaaatgaaatttgaatatttatctaaaattgaaagttaaacttaactatatgccgttaattcctctaaataaacatgttttcaatggtattttacaaaatttttatttatttatttgtaaaagtgacattctttcacttaacataatagttactttgcagagtgaaaaaagtatatagttagcaattagattttgttctatcttcaataacggattgtgtttcataaaaataatcattataaaaagttttattagcaaaataattatattttatcgctaaaaaattacactgtgcaactataatgatcacaaagtttgacgtagttattttgcaaattttacattttcatattattaaattggcaaattttcctcttcttaaaccaaaaaggctacattttcatattgttagattagcaaattttcctcttcttaaatcgaaatggcttgggagaagaaaaattctcccttttctagagaactcgaggtaacaaatcgaaaaattgcccttaattctagagaactcgaggtaacaaaccgaaaaattccctttttttctagagaactcgaggtaacaaattgaaaaattgcccttaattctagagaactcgaggtaacaaaccgaaaaattcccttttttttctagagaactcgaggtaacaaatcgaaaaattgcccttaattctagagaactcaaggtaacaaaccgaaaaattccc

SEQ ID NO: 379886 - DNA, 4126 bp, Cannabis indica
tacttcagagacatcgttgcttatttcgggctgtgtccaacacaaatcaccccaaaaagtatcaagtaccttttggtgatgcttattttgtacaaggagctaggctagcctcagcccactccttatgagattggatactatttcaatctaaagtcttccctgaagtagaataggactagatacctctactttacccaggttggccactagtggttgggtgataccaatagctcacagatgtctaaagtaggtgggtatgcccgaaactactttgttacttgggacattcaaaatattgggcgctacaacttccaccaggtgccatttttcaagcgctccatccccccactgcagatgagggataggaagaatcacatcctatttcttcctatagagaagagaaacataattagattggctagtgtggccatcttcaagaattatggtttgtaccatcagttggtgcagtggagccccatcaacagggggagtttgtcctagttatggaaaagtccctgacttggatgatgacgcgcctctgtctcggataacccaaaatttgcagaggggagataggaccctccgctggctcttggtccacgggggctcagttgctgacggttcagttcgaatcatgcctggaggccaaagctctgagggacctattcgccccttgcctaaatctagaggcaagggcaaagcagttgctgagggctcagacgatttctcttcaaagggtgatggtatttgatagttgattgcatcatcttttacattattgtcttgcattgaatatttgcggcatggttcagactttgctactttcattttgcatatatgtcttccaggttgagaggtcttgcaaggggaccttctcatgccttcgggttgtctgagggccaaggttcctcggaccacccatggtagagataccactggatcatctcttcctcctcctcctcctccaaggcctgcaccagctgggcagctcatgatcgatgatccttcggctaggagggaacggccttcaggaaggggcaccccaaagcctagttagggagttggctcagcctcgatgtaaagagccatggaggagactcgcaggcgcctagagagagcccttcgttcaatggatgatgatgagcttcaggagctcggtgacagtgatccagacaggctccactctactaacttttgggatttatctgtggtgagctacacacttaactttcctcattttttggtatttttttaggtggggcagacacagtgatgttggatggggttggcaagcaaacagtgtgtctttgagggatttggccgaccataacaaccttgtacaaaggctggtcagtcagtgttgtattttgacactaattttgaccttgttttgctactaagctatgatgatactaagcatttcacgtgacaactctcggggatcctcacgcactcttcgggagcaggtgaagaccttggaggctgccttcctagcaaaggatcagactatatctgagatggaggctcttaggttgaaaaaactggaaaaaccacgaaaaataatagagtatttaattgggcatattttattaaatatgtaattgttttggtaatgaagtaagattatgatcttacttagggtaattggtgtgaatttattaaatgattaaataaagcgtaatttattaattacgtagattttgttagaatatgttggtattgtggataccatttcttttaaaataaaatatttttcaggcctgacgattgtgggaacttggcggtgtggtcagaaatatcatgacaacaaaggatgaattattttggaagtattccggactagtttagagttttagagtgtcggattggcgggattagttagaattaccaaattacccctaggtgtgttttatgtttaagggcttcttaagggtaaattggtcatttgaggatgttagtagttttttgtgctatttgaattagtgctgatttttattaatgatattatttaaaaaaagaagagtaaggaaataaaagtgaaattgggaaaaattggagtcatttatctagcctcattctccttccctctttgagcagccaagaacaagcttagaaccaggggatttctctttaaattcttcttgatttctagcagaatttattccatagctcaacctaaaagccttgaggtaagttctccccatgtgtatttagattttttcaagttttaaagctagatttggggttagggtttggaatttcgaggctgtattggtagaacaagttaggatactattttcaagttttattttaagtttgttagagtttgatttgattgaagtagatggttgtggtgttggaattagaaaattgggtttttaaaacttaatatcttggtttaacttggtgatttgtttaaactttgcctttcaccttaggtagtgagcttatgagttcgattccctaaacagcaaatggccagggtgtttgcatacttttgagttcatttggggaagctcttgtattttggacaagctatggaatttttcacactttctcacgtaatacattgaatattttgtctttgttggccaaaagtaaaattttctcgagatcttttttgggaggctttcccactagcatggttgccacaaaagctctcatgtacctaaaccatgagaagttcagcttcttccttctcgacacacctcaatagtgccaatgagaagtttcttctgtatgttactctatccatgatgatgaagtgagttacttttctcatcagtctcttagctttgttccggttagttggaagaataccttgttttaagtacgatgcaatcagggtcatccatgatggagtgtaatcaataatcaggataggctttgagtcttcattaatgctccatttggcaaggtatttgatgagaactacactaagagtgtcaaaatatgtagtgctagccagtttggctagtaagtctccgttgacgttatgttcacgcaacacttgttggatggagtagagattgagatagactaatagatctttagcattgcttaagtatacaatcatatttgacccttaggcttgttacttgccaagaatcgaattaacaacttgtgaatcactatagatctcaagttatttggctttgattgctagtgccatcttagtcccgctaggagtgcctcatactccgcttccttgttggttgcggtgaacttaaactataaagatttgtgagtttgaaatccctatggtgtaacaaagatgagtccagtaccagaactgtgctcgttgtaggagccatctacatataacttctaggaaagtccaatgtcctcctgagctgcaatctcaggcgtgtcaacctagtctttacatatcatgggattgtcttcatcgaggccagtgcattcaataataaattctgctaatgcatggcatttgattgctgttcaaggcaggtaggtgatctcaaactgacctagttcaaccgcccacttgagtaggcaccctaatgcttctggcttcatcaaaacttgcctaagtggttggtcagttaacaccttcactgcatgagcttagaagtttggccttcattttttggaggcaaagacaaagtagtaggctagcttttcaattgggggatacgttgactcggccctaatgagacgcttgctgatgtagtagataggatgttatactccttcttcctcacacactagaggaacactagatgtatactcggtgattgccaagtaaatgtatatttcttcaccatctaattgcttatataggataggatacttggctagataatgtttgagagcgtggaaggcttgctccactactagaaaaataggtttagtgacccacgttgagtgactctaaaactatttagtgacacttcactgcgcgtcactaatgagggtaactggaaagctagtttttagtgacactttgtgcgtgtcactaaaccctttcacaatcactcattgcgcgtcaccgtaaacatttagagtcagattttttcagactgaaaaaataacagcaacccccaaaaaacgtcactatatcgatttttttattttttattattattttgtagatatagtgaca

SEQ ID NO: 379887 - DNA, 1816 bp, Cannabis indica
caaaaggaaaatttttaataacaattcctcacatgaagagaaataatacacgggaaagaaaaagaaaaactatgtatagataacgacaatatcttaatcattagcctacactaaaaagtgactttgttggtatacatataacaagaatataatgttacaagacatcaaaaatatacttcagagcaatagcagatctatcattcaagttgttcaactttcccctcttaagataaaattgtgagaaaccaaactcagttcaggactcacctcagtgagatctccaatgaattctataggtaattaatatctcatcaactaaatcaaccaaaacacaaaaggacatcaaaattgtattgttatgttttgatgtcaggtcccgctaagtctgacaatccatggcccacgggaatgctaattcccattataaaagattattattattaaaataaaatacaacataagggcaaatgccttctaaagcacccaaaataaaaacagttaaacaggggatggcatgttatgataaggcatccttattatgtcatgtcatagctaaaacaagaagtgtcaagtgtatcagttctcccaaaaacaatggctatcttaatgtaattacatccaacaaatcgactttataaaataataagtttcacatgcacgatattagccagggagaccaaaaacattatgttcataaatcatatcgagcaaacataaccagcaagagattacagagccataaaaagcataatcaaatcaaaattcaataaaccaagagtcaatgcatattaattgaaacaaaaaggcttgattatctacagtggacgaaccaaccttgacctaactaaacgattaccagagtattaaaagtttgatttctgtgggggccaataaaggaattagcaaaaaaccctattgacaataccatcaaacgagacacagaataccaataattggccagcaggaaaaacaagagtcaatgcatattaattgaaacaaaaaaagcttgattacctacacattggacgaaaaaaccttgtcctaatcgaacaattaggagagtaatgaaagtttggtttttttgggggggtccaataaagaaattagaaaaagtaagaaaaacccaattgacaaaaccacgaaacaagacagaatatcaataattggcaacaacaaaaaatcccaaaaaaaaaaaaaaaaacaaggacaagtcaataaaacagagcaaaagttccaaattaatggcaacaacaataaagaacgagtcaatgcaagtaatagaattgaattattgatagaaagagagagacttacagctcgaccatcaattgtgtgtttttcgctaagaacattatcaagtacagaaggatcagagaaaacaacaaaggcgaaacccctaggtcgaccagtagtcttatcacgcattattacagtttgagtaacttcaccatactgaccaaagtaatcggcgagcttctcctccgtcgtgtcccatgctattccaccaatgaataacttcccttcgtctgagtccattgtcttctgttacagactacaacttcctccaaaaatgtactactcactcagtcctccactactaccactccttctgtacctgttttctctctctaggactgtgtagagagagagaaagagagtgatttgagaaaagggaaagagaagagggaaaagggggttagggtttgttaaaacgacatatcgaatgaaattgaaaaacccttactttcgattttcagtagaagtagttaggattaggaacctattaaacggtgtcgtattggggttttgtttgaat

SEQ ID NO: 379888 - DNA, 3367 bp, Cannabis indica
gccacatctcgaaagtaatcatgaagtggcaagctcgccccaacctcaatgtggtattttgtccaggcacatgaattatcttgggagagccgacattttgacatttctttgtcgggactaccttcaccccctcaccaagaggataaagagagaggtaacccagcacatcagacgcctccaaattgctgtttggacattcgattaagacactgggatcccaagtactagggtcataacatgccttcgcctctaaggtagtcaccatgtgttgagcctcttattggttctgcttcctttgtctcttagtcactatgtgttgagtcattacctcttgttaagtccgcttcctatagtaggaggattttgaggagcaatatgagcttcgttttcctctgggccgtcttgggaggatgaattggccatatctgcaatagcgagagggatggagcactctcctttgtgcaggaagtacaaggctcaacgtggaaggattcttttcaatctcctcactctatgaataggacatgtagttttgtgagaccccagtttactttgattaactatttcttgtgttcatcttgctcattttacgatcttctttagatccgttgacgaaaaaccgcgtcaacaaagagaaagcttcactagttgttttcttgatttttgttggttgttcaagaactgctgcttgatcacattcacaaccttcgagcttctcgccggtaacagaaaatgacaaagaaagagaccgaaattgaggaagaaagtgagagagaggcacaattatcgtgtcaaagtgttatcaacttaaagatacaaattttattacacattcttatgtataactctataattatttatttaggcttatgtgtcattatgacacatttactaaattataattaaaatcaaattaatcaattgaagaaatgaattgatttaatataaataattaaagattatattttattaagttgtttactaaactgattagaaaatcaattaaaattattatattttgtttagaaaatgtaatataatatgtgttttactaaaactaaattgcaattgttaaaatgtgtaattatttttgttttataaatttctgtcatctgtgaattttttattttttactaataaaattaaacgttaaaataaaataaataaggaagaaaaatgttatccttgtattttctctgctcacccctggtactaggcatactttctattatttgagtctattattttgatttttgatttttttgtcgtataattaatttttgcttaaaattgaagaagaatgaatatgatgaagaagaagagaatggatctttttttgtttttgtttaaaaataatgaatatgattttgaaaataagaatgtgttttaaaataagaataagaacaaaatgaatgagttgttagaataaagtgaattgaaggtacgtatgaacattaatttatatgaatgcggaataatgagtgtagattgaacataaatataaatgtagctcaagttattgatgcatgtgaattttattaacatacagatcttcatattttagatctacaaaaaaagagagaaatacagttgtggattatggattttacaaactctctctagctctttttgatggtgtttattgtagaatgaatatgagtcaaatttgaatgtgttgaatgtgttgtcagcttgaggaacaataataccttattatatttcagttgaatgtgtttatctttattcctcttagatagataagttattagggatcaatgtttgtatttttttcttcaacgttatcttgtagataaacatggttgctagggagtcaaattgattagctccaatcttacaacaaacaaaaccatgcattaggatttgaaagtgagatggtgtagaatggtaaaatttgattttcttcaatcacttatgaaaaaagattatgaaatatatataaatatttatattatacattgatcgttcaatcgtataaattaatgtcatactatagtataatttggtcaaaaagagatataactattaaaagcacctgaaataatacctccaactactacataaattcaacattataatttattgggcttggcgctatggtgccactgccaacataccaagtgaaaattaaaagaaaatggaaacactatggcgttatattattgtaattggaattacccttaaattctcatctgacaacgaaaagctaaaagtaataacaaaataaaaaaagatagatataaacttggaatatgcatcgtaattgtttactcatatcgctttctcttcattttataaaagtatatattgtggggaatcgtatttgtgacaaatcattttcaagccatagacatgttgaataaatgtacagaaaacaaaatcagcaatgttaagaaattgaatatggatattcgtaagtgttttcagcatatgctacgtaccctactctctcatccctttttttttttctcttcgagctagtacgtacaaaatgtatggaggcctataaaacgagtgggtgataagtcatggcaaaaaccaagcacaggttagctcactaagcaaatccaaccatagggcatcccctctgtggcaagcattattatgatttctttcatatgggatcgttaaatcaatgataatgtatgccttgccaagaggagttgccctatcattgtttttgcttattatacccatctaattaattgaaatgtcattacaagtttcagcaagtgatgatggtgcttaagtaagaaagctatattactagttcatatacatatatatattatctacttaattatatgtgtgcatactagcattattatccagtgaacacaacttttactataacataataatttattatatgaacagctagtataattaactcttgctaattttgggactttgtagtggaggatgtgtttcgcctctggtcagcaatgatatctctttattcattgtacttttagtaaaagatgatttgatcagatgaataagacgtttggaataagaagtactcaacataattatattctaaacataatcaggggatctcaaggagtaaaatgagcaaatttagatgacaaattcagaaaacacacttacgcgattttaatggctgctaccatttatcacattgggagagagttaaaacaataatacatattaggcaagagaagtgtcaactactatatatattgttgctactattaatagaattgtggtgaatgctcaccctcaaaacaagttgttacattagtgacaatattcaagaatgcacaaacaaaattaaaactaatcacaaaattaaaactagaacttagatgaaattagataaaaaaaa

SEQ ID NO: 379889 - DNA, 917 bp, Cannabis indica
tggagtaaaaccctagatgctgttggagtaaaggatcatcaacaagggcaagagcatttagttctgcccaactttcggtttcataaaacgaaacggatgaagcaacttatgaacatgattatgaaccctaagcatggatttatctcatgtattctgatcatgttaacaataaaaaagactggttttttttccaatatttgtaacaagaacacaatcatttccatgaacaaacctcacttaataaatttgtttaaactcatgaacatcatcatcatcatcatcatcatcatcttaataatcactatatcaaacccatctttgtttcaaagaaagcattgaatctcaaaacaacaattaggttaagaaaagaaaaagaacaaacaaacaaacttctgaatttcctttactcaaaagcaaaatttcaaagcttaacaatctcacaaaacctaatgtacaaataaactcacttcactatttcattcaaccaataatccaaaatccccacaatatacttatcaaattaaattcaatcaacaaaagattcaagctttttcttctaaacaacctaacagaatcaaataatcaaacatcggaattgaaattagaagaagaaatgagcttaccatcgcctttggtctgtgaagatccagcacaacccatttccagatgaagaagaaaaatctcaaagcttttcactttctgagtaaccaaacacaaaaaagaaaatctccggtgagattctctgcaaatttccggtcagttttaagacttaaaaatttaaactttaaattaaaaattgaatttttatttattaattttttttaaaaaaaaaaaccaaagaagaaacagcaaagacccaaaaatggggaaattagattcttcttcttcttattccttttttatttatttatttaatt

SEQ ID NO: 379890 - DNA, 6211 bp, Cannabis indica
gtatactttttaattgttaacgctttactttttacttacactttcagattttgctgtcagtagatgcaattaattcatacatcgcctgggatttctctgttgtgcagggcaagataactgtggtattgttccttaaccctaattggtgctcttgatagtgatatttctttttatttattataatagaaggaatggagtttattggactggggattgttgaattatttttcactgttctgttttattttattatattttatttttcaatcaaattattattaaaaaaaataatgtaaataataattttaaaaagattaagctataacaatctcaactcatataatttgtttttttttaatttggatagcaaaattaagcatagaaactcaaatttttcttataatactcactcataggtaatacctattaaactcaaaattatgttgttggggttttgagttttagtttggtgttcttaacaaaaaacgatgagtctaactttccttagtttctatctttttcaattgtatacttgcctggtaactgataagcggccctaatgctcatatattgtcctattggtttattacattttggatttgagttgaggataatgttttctgctgtggcttttctttcttcatttaaatttaattttcacttgtatttccatctttacttgggtttgtgtgtgcaatttttattgcctgtaactacataatgaatttagtcaactgaagtgggattttacgataaaacatttgtaacagaacattgcaagtcttaaaaaatttgcaattttgaaacttgtactataactttttgtaaaattcaagaataattacaattgagctgtatgctgtgtttcaggatattggatttagtgtggagtatacaaatccttctggagaaaaaactgtgagttggtttcttattctttctttcatacattattttatgatgttacaactttattccctcgaatatcactctttttattatccactttttttttattgtcctctaattaaactgataattgtttgtggaacagctaattttaccttatcgacgttatgaatctgatcaagtgagtttagtattatacccttgtggccattttgctgttgtaacacttgatatcataactgattaatatttcatgggaattcatttttccagggtaacttttgcacatgcatggctggagactacagactgatttgggacaactcatatgcaaatttctttaagaaggtatcctgaatgtttgcagcatccacaatgaatcagttttttttttcttcccatttttcgaagtgtttattcgattcaatgccacataactctttgttttcttctttcgctgtaataggcgctgcgttacaaagtggattgtatacctccagttgtagagccattaccaagcggaacccaagttgaagaatgaagggacataattgtagcattcttatgttggtgtatttgcgttgggtttgttattcataatattactattataattattattatctctcgagaggttggttctgtttatgtttataggctccctacttggtggagatttaacaattcgttggttcagaatgtatattgtttaaacctggaaaatcagcaaaatcgattcttaagtttctatctcaattaagtagagcgcaaatctccatcaatgacatcgtccccccaaattccaatatcttaatgatatcggcacacacaaattaaaaaaaaaaagaaggaattacacattatgtatgcacatattaatattattactcatcttaatatgacaattttacttaggttttattttgtttgtgtatgtttagttatatttttttaaaaaaaagctagaatgttttttaacaaaccagctgatgccttagcagaatggagtcattttgatatgtttctaacaaaactaagaaacaaaatggtatcttaaataatatcataaaatgatttatattaaaaaaatgccgaaattaattttattaaaaaattattttgtaatttcttaaaagacaaattttataaaattttaaataaacaaattttatagaaccattttgataggtttctaacaaaactaagaaacaaaatggtatcttaaataatatcataaaatgatttatattataaaaaatgcctaaattaattttattaaaaaattattttgtaatttcttaaattttatttaactcattatattttttgattaaagtttaaaggtaatacaaatttaatactaaataaataaaatgtaaatgtatcttaaacaatatatagtacaatattaaactgaaactataattttaaaagcaactactctaaataagtaaccaaaagtgggtcaatgtataaaattttgtttgatttaaaggtttggttgattatctcttaataaaatatatatattaaaaaaaactaaaatattacttttgattgccagtaatattttttttggtaataatgttgttaagcttgactctcaaatagattttaaaggtcatttaaatattattaaaaaatcataaaaacatcttacacaagaaaagtgtataatgttacttaaagtaaaaaatttataatctttaagatatcatttaaaaaacaactttataataacataaattagttgatatattaattttatttgaatttaaaatttggtgactattttattaataaattataaaagaagttcaatagttgcttttgattttggttatatttttttggtaaagataaaaataatatttactttccacatatcaaaatgatcaaccttaaaaaaaaagttacaatgatactatttttaaactcaaatgatcaataatgcaaattgaaaaaaaattttaaagtgagagaggagaaagaaaaagaaaaaaataatttaaaataagaggtaaaactcctaatactcaattcacacagaacaaaaaaaatactaacgcagcttgtgaagaaaatgagagaattatttcactttaggtataatcactcaagtatttggcattaattaaattgttaaggttatttttataattaattttaataatacgtatacaattaaaaattcccctaatatctaaattatatttctaaaacttatgtatttaacgtttaagtgttaagtcaatgactacatggtagtctttgatgaatccatgttagttaaaaatttatttaaatatattaataagaaaatagcaaattgatattgatttagtaattaacaaccacttatttacaaaaattttcaaaatataacttaagtaatattaccataaaaatttaaaaatttacaccgtaaattactttatatttttttttagtcaatataattataattactctccaatatacagcagaaattaataatacaaattagaaaactaattagtggcaacattgtactcaaacatatgaattaaaacctatcattaatttatttatttatttttttaaaaaaaaaaactatcatcaaataattagtgacaaaattgtaattaagaaaaaaaacaacatttatgcagtgtcatagacttagtgctaaatttaacacaatttttagcatatgttaaatttgcacaattcttttttctttaaagaaattggacactctattagaaatgctcttattttgttgctttggcaacaaaactgaggcagatgttgtgagaagtaagatcatgtgctgctcggcaaatttcccaactcaaatgaaattatgtgcacgctttgcagcatcaagggtgttacataggagcatggcaatggtcataggtccgattcctccaggaaccggggtgacagcggatgccaccctcactgcttcttcataacaaacatctcccattagacggtaacctaactcgcagctggcatcctgcaaattaaaatgggatgtgtaacatgaaatcacaagtttgttgctaattctaggctaagctaagtatgcaacacatgcaaaaactacaattacaatgcaagttcaaactataggaaacttgtgacaagttcaccatacctctattggactagttcccacatctataacaacagcaccaggctttagccaattcccgcgcaccaggttaggcattcccacagcagtgattaaaatgtcagcttcacgcgtaatgtgttccgggttttctgtgaatgcatggacaatactaactgtggcgtggtgcctctgtagaaaaaagaaaaaaataattaatgtacttaaatattagaatatgagcaacttgagtaaatgtatcggtgtatagttttttatttgtttagttttaaaaatagacttacctgcaacagcaatgatgcaggcaatccaacaatgttacttcttcctatcacaacagctttcttccccattatttcaatgccagacctgattaacagctcgatgcaaccttttggagtacaggaaatgaataatggctccctccctctcatggcaatatttcctatgttgattggatggaaaccatctacatctttttctaggctcagcacatctgaaatttttctgacatccaaatgctgtcccagacattctgttgtaagtcatcacacaacaggagcaagttctgatatttcatgtatcaaaatctcagctattaattgccttacatgttaacttagtagtgaaactttaccaaagggaattaatcaaattgtatttcatcataattttatatatctaatgcacttatattcacctattccagtacaacaaagccatcaaatattaataatatacagatgcctcaaagtcaaatgaacaacatacaataaaagcttttcatttcatatagagcaaagcaagggttaattcacatagattcttatgttacctgaggcagaggaagctgcacaaggaccccatgaacagatggatcaacgttaaaactcgccacagcactaagtaattcatgttctgtgcaatcatttgggagtgcagttacggttgataccattcctacttcttcacaagcaagaatcttgttgcgaacatatgtttgcgagtcccttctttctccaaccataattacagctaagccaggaacatttccaatggaatcctccatcctcctcacctcacaagctatttttgacctgatttcatccgccatcaactggccattaattactgcagcagtctgctcattggctgtgatgaagatcagatatagaatcaatcaaaccaggttttaaggaaaacacattacaccttaaatcaatgaaaagattttggtaattttgatgacttatctaattcttccatgtaatctctcttaaatgttacactgccaagtatttgaatgaataacaatatccagggaacatatccttgtatcaatttcaaacacaacacacctcccaacaaactcattgatatcatccccaaatacaactctagttgctgaagtattagtacaacaaaaaattacaagaatgattaagcccttatctaaaactgtacaatgataaccccatcatattcacattcgaacattttcgtacccaagttcaaccgtttacagccatcgaattacttaaatgaagaaaacccattaggcacgagaggtattacttacagaaatttcgattcgatgaaaattggtaatgggtatgatgattgttgggagcccaaatgtcaggggagtctaaggagacaagagttggggacataagaatttggcagtcatggctgctgtccttgaggatactattgtgagtcatggttgtaaatgagcttctccgtctaagtgccttgctctgccatgacattgacactgtcattctccgcatgaaatacccaaccatcatgttttcacaactcttcacacgaaaattttcaacttgtcttataccattttgagtttggtttgagagtcacaattaaagatgaaagaaatagaagtgagtgaaagagcataaagccacaaacggggatggaggcttagagtaagccctgaaactatcattaatttcaacgcttaacacccaaaatcccgcgactattcggtacgattgcaacccacccacccaaatgtaacccaactttttctttagggtaaataccattttggaccctgtgttttgaaaaagttacagattagaccctgtgttttgttaaatgacaaaatggatcctgtattttctaaaatagtaaaaa

SEQ ID NO: 379891 - DNA, 889 bp, Cannabis indica
ccctacatatacaaatatagttacggttagttgtaattctttgtagcacagtactggctctagctgttttttcatacttatataaatactaactctgcattcttgtttcatagtaatgaaaagttcgttccaatgtttctttcttagtttcctttacaatatttcttatctcttgtttggatttatggacgtgtacacagtgcactgcacttccattacctgaaaatggtgggtctgaaacatggctatcatgtccttggaaggggatatattatttacttttaacttacatatgattttttaaaaaaaataacttaaaataaaactaaacatactttgtatgtacataatattaatttagtgtatatatatatatatatattaatgtttgaagactatgctttactaattttgagtatatttgttagtttttatttgcaatgagcattccattgtcaaaaataattaacaccattaatcctcatgaacatctaaagatcaagcatgttacttaggatattgaattgcacaatccattcacatacctctaaatttttagaaaaatactaaggagcatcagaagaggtagtaatattggacaatttattaaagtagctaatagcaatgcaccatcattgatctatacattgatcaaaattgtcgaaatgcaaaaacgtgccacgtccaaagtaaagatacaaaaaagcctgtgcagtaatcttctttccagtttctacaatactctcatttttcgggttatgcattatatggctctaccctttttgggcctggcccataatatttgggaaaattacaaaaatacaggaatttgtgttaatttttacaaaaatattagtacacgaaaatcttttcaaaaatactgtgtttt

SEQ ID NO: 379892 - DNA, 1513 bp, Cannabis indica
taattttttttttttctgttcgatataggttacaatatcatcccgttaaatctttcaattttttttttaaatagtttgcaatgccgcttgaaattttttgaacaatctaaggaactctgttatagatactgtatacgaacaccattatatctattgaattcactttatgaatagcttaacaattgaattccgaacgaaacaacgtaatactagtaaaacacctcaaaagaatccaaaactccaaattctacattgcaaagcatagaaacgaagtaagtacccattagaagcagatgataagtaacgggaactcaaccatcggcgagtagtgagacgatagcgtaaccgagaaaaatccccttgcattggaaaaacggaagctttccgtgcagaaaaagagaagtaacaagtagaagatagcaagtgtgaaagagtgaccgtacaaccaccagaaattgttgtagccatagccatagccattgttgttgatgatgatgatgcttatgcttcaagtcgaagctcccaaccctaaaggaccagtaagattctaacctaaacctactcatgcagctgaccctttttggtactgaatttctgggtttggttccttaactcctcccctacggcttcagagctcatgacaaagaaatgatgtccatagaaacaagaaaagaagggttttttgaagtgaaaatgtggtgaaagtagagaaattggtaaggtaagcttatcctttcgatgatggtggtggtgggagagaacagagtccggcgttgggtttgggttggggggcggactattccattccattataatccatgggattacgtgtgggagcccccaaactcatcgtgtggacttaatctctcatgacgtggaccattctaccttttgcttatttttattattagagtaaataacgggataagtacctaaagttttaagtttgtaaatgacataatctaataattatttttagctgtataagtactcaatgtttatgaaactgtaacttttaaatgtttatttattaaatttaaaacggagtctgtactgacaaaactagaaaaaaaaattacagttttacaaacattgggtacttatgcccctaaaaataaacattaagtttatgctgcttacaaacttaaaactttaagtacttatgccgctatttacccttattattattattattataaagatggtaaataatctttaagtgtgtttgcggtacgtgtagtgtggtttttaaccattttttaaaactaatgatctttacatatggttttttttaattttttcagactatactctcactgtgaaactaaaaatttgcaaaaatcgttccacaaaaaagggtgcggtacggtgcggttgctgcaatttctgcagtttagactatcaccaaataattaaactatcacaaatacaacaaatcttgagtaacacttatcaaaaataccataagacttgaaaataaatatataaaaaaaaagtttcaaaatttcaacaa

SEQ ID NO: 379893 - DNA, 3298 bp, Cannabis indica
gaaatgaaaattgtttttcttagagaaagggggatttgacaaaagatgttatggtatcatcgtcaaatacatagatgataagaaatcatacagccagaccattttttttttccggtagattgaaaaggggaaaacagtgaaatccatattgttaaaaaacaccaacagtcacctgaaattaaaattttccctaatgtgcataatttccttgccacctttgtcattttgacaaggaatttttacattaatgttcagtgcactggtgcctagccaaggagagaaagttgttaattatcctactcgtccagtagacacaactacggactttgaagggacaacgagtctccagccttcacaaccggtaagtcctatggtctcctacatatatttgtatacatttcttagttatttgtagaggagggggggaacgattgttgagaggcatattgataaattcccaaagttcttcccaagacaatttatttcggtaaagatctttaaaggttctttttgtggctaatcacatttgagttgtactcctttccgaatgttgaaatgttttaaaggttatgcttctaatgaatttaataattgcaacatgagtctagacaaggtaaggacaaacgaattatactttaatggactgccataaagatagtattttagggaaaaaagacatggaaaaatgcattaaataacacaaataagaactagcaacaaatatctgataaaatcagttaagaataagtgtgcaataatattagtctattttttataaatgaccaaatttttctgaagcaaaatctctatttttttttcttttatattcatcataatatttaccctgccccctttcatttttaaccataatgattaataaatgctttttaagcaagctcatgtgaacacatgtattctattttgtaatcgggtagattacttggttaagctccgactgaaagtagatgccttatattagtttgcaattttctatttctgaagtgggctgctacatgcatcaactatattttagttaaagcactcatgtatttaatttacttaatctttctcactcattttcactgggaacatctaattgtttgtttaggatggcaagcttttccattctctatttgatttgcttatgctctgagtgtttggaccaggtttcttctggcaatgcagtagctggaaacatggctggtgttcatggagttccaaatagaggtgtcgctcggcctattattggtgttcggatgcagtctcagggcatagcaggttataatcttggttctcaggctggaatgggtggtggaatgaacccaggtggtatcccaatgcagcgtggtgttaatccacaggctcatcagcaacaggtatttttgttgagtattgatgtacttgtggaaatgttgtttcattttgctgatgcatatgcccgacttattcttagcagttgagaagaaaagacccaggaatggggatgagtgggtatcctcaacagaaacaaagacgcatgtgaagtaaaacatctgctataattcttcaggttgttctaacaattttgcactttatacgggtgtgttttctacgtgctgcttctcaggaaactagtattaaattattatgtacaatatagccaaaggaggttctgcattggtttagacttgtctaagaattctgtggttcaattattctagttatttgtacttgaaacaaaataagaaaaccaacacatttaaaatggagtaaacttctataaataatcctaatcttgaacgaaaaatcaaatgtctaatttcaattattgttaagaactccttggttctggttatttgtgaaagtgtttttagtttgttatgatattgattgatgtaggattggcatagataagagagaaataaatagatgatgtatagaaggtctgagtaattgctttcataataaatgagccatattatatactttcataatctaaatttcaaattctgttgcaatccatccaacttacccctaaaaacaaaataaggaaaccaactcatttgaagatatagagcaaacttccataaataatcctgattaatctttaaggaaaattaagtgcaaaacttgaatgcatctccattccccagttttaacttatttcattgaagagtttttttccaccctttttcagtaactggcttgtgatgttttgtcatggattctttatttagataattcaggtttcaattgttttcatggaggtgaaaataggtgcagcatatttgccttctaaaatatgaaatttgaaattacagtggtcatagcatccactgaagtttccatgtattttcatcaaatattcaccttatattgtttagtgcaggggatttacgggagaagttgtagataaacttagatggagaacttgcatgaagacctgaaactcatccaccatgatgccgcagactcgaaagtggagaaggttttctgtccaatttgacaatttaattttcagctacaagaaggtggtggagcttagtaattagagcctgagtatgaaaagcttcagttccttcgtgttggaattgtggttggtagaacaggactacagttttggccgaagttgagcactctggttggagttcatcatgcttgtcctgttttcatattcaacatgtattataattaccacacaagttttgatttttctctgtaagcttgccattagctaacattcccaatttgtagagaaaaagtggaatgttgtatcaaaattgctttgatgattctcagctactggaaccttgttatttatgctaactaaacctgacaagagatctacattgctgaagtggcatgctagtctattttattttatgctttagaaaaaggacttttctctatttaaaaaatagaagaaatttttttcttttgtaattccttttttaataatgatatgtatacacattaatttcaaacaagtttttttcaatctaatcaaaaattacatacaaatttgacacacttgtgtgtcagtttagaaatataagctaatcatctttatgtaaagtggtcccacttgtaaaaatggacttgttatgtaaatgttaggggtgttcgcggtgcgggtggtgcggtttttaaccattttttcaaaccaacccgtacatgcggtttttccaattttccaaatcgcacccgcaccgcgatactaaaaaaccgcaccgcaaaaaatgatgcggtgcggtgcggtttatgcggtttgaactatcacaatttttttttttttgaaatcatcataaaataattaaac

SEQ ID NO: 379894 - DNA, 1364 bp, Cannabis indica
atttttagtaaaatatttacacttttaccttcaaagttttttttaatatttttacggtattctatatagaaacataagaaaaatcatatgaaagtaacaagaaaataacaccaaagtaacataaataataatatataaaataataaaaaaaatcaaacaacaaaataataagagtacaatataaaaaagacatcaaatgactgtattttatataaataaaattttaaaaaatcataaaaatatttaaaattatgtacaactatatttttgtaattttttttttgttatttttgtaatttttgaaataatcattaaaaaatacgatttttttgctcaagacctcaattagcttaagataagtcagattcttccacttaattacattaccaaattcttagatgtaaagcaaaaattatacttaatatggaattttaagaactttttacttaaatatggtaaatgttttttatacatttttttatttatttttagacttttatatggtatatactatgccatatttatatttatgttattattaattttaaatattatattttatcttctcatgttatttctaagtcaaaccctaattgttccaaacattttatctctgagttgttgactctcttttttgtctctctctcctatgactgatccttgctctgatcgttgctagctctaacaaataaattgttgatagctacagcgaacgattgagttccttgcgcgactgctctgatcgttaattgtagctcaattattatttggattttttttttttgtattttgtctattttttaattttgagtttgtcttattattttttatatggttgtacttagttttacagttcacaaattttgcaatggtttcacaaattttattgtgattttttataaggttgaaattagtttcatagggttcaactgatttcacaggattttagggtactgtaacggggttgctccattatatgatgttattgcattattttttattttattttattttttattattttgttttaaggttcaaaattagttttcgcacttatattttgtttgcagaatattgttatgcattgtgtgttgttttaattatatttgtgagtttttttattattatttatttttatgcgtgtgtgttttttttcattaggttgactaataaaatcagtttcatttttcttcatgtttatcatttctgttttattatgattttttataaggttaaaactgatttcacaaggttcataagttcgaaactagttttgtaagttttgaagattctgtaatggagttgtttcattttatgatattattgtatattttttattttaagtttctttttattattttatt

SEQ ID NO: 379895 - DNA, 2345 bp, Cannabis indica
tgtttcatatatatattttgaatctgacacaaatattaaagacttgttatatttagtacactatttgttttttaaaatagaatattctttttattaattttactctatcagcattgtcttcttataatgcactatgtttgattgacttatcaatgaatatttattttacccttcaaaagaataaaaagttatataataaatgttattttaatattaattgaaaacataataaaaaaacattacaaaaaataggctttagtgtcactttttatcgtcgtttctctctttaaatcgacgctattaaatttcctttagcattaacatcaacaaaattgatgttatattttacctatgacgtcgattaaattactaacattgttacttaaactaacgatgagttcacttaatttgtacaattttagcattagtgcataatcggggccaaaagagcaataacattggttatatggctgctattagcggtgacgatgctttgacgcaaaatttcttatttacttatcatctttattcacaattatttacttttctccctctctatttatgaactcagagtagatgaacagtgttgcagattctgcattcgcccggtatcctctctttacacaaatttgagatttgcaatcctagataattgttatttttgggaaccactctgaaagttgttgttgtatttttaattctatatcatttcacatatatttaattacttttatttcaaatattatttctcaatatagataagtactcatttcaaatcaccttttaacaatattttataaataattatataaaaatattattagaattattaaaatttgaatatttatcaataaatactaaaattattatcattactattatgaaagtaaaaggatttaaggatatttagataagtacttttaaaaggtgatttctaatggtctctatgaccccaggcgatttctaatggtttttgtgactcaacttctttatgattgatctggtagtgatttgtggattcatggctacggtaatggccaatagttctgttgatgagattgtgcaattgactgataaattgggtatggatcaagaagaggaatgggaagtgaatgaagaacaagcttctgagtttggagacaaatccttggttaggagaattgtttccaaacaaagcttcagtgtaggattgtttaggacaattttcacaaggatgtggaaagcacttagggaatggaaagtgaagattatggaagaagataaggaaaacatttattttgggttatcatttcaaagaagaggtgatgcaaagaaggtacttgagaagcaaccttggcttttcaatggaggttttttgattcttgaggaatggccaactagtggacaatggagagatgctcgattagataaagtgtccctgtgggtgaagatgaggggtttcccacttaaaactttgacaatgaataatgttaagagacttgggaacatgacgggggaggttcaagacattatttggaataatccgcaacaaatctttcttaatggatatgttcgagtaaggactggtttcccgattatgggcgaggtgtttgttgggagattcattcctgtggatggtgggaagcgatgtgtgcaaattaagtttgataaattgcctttactctgtttcaattgtggtgtttggggacatgatcaagccacctgcaccaaggctttagcaatggagacgagtgtgaatggtgatcaagttccaaaatatggggtatggttaaaagatgatgatcatatcccaaattgctttgtggctcatgttcatcgtagagctaagcagcaggaggaacgactcatggctggtgttgaagtattgacggaggaggtggttcgtcggccgaaggtgtctcgaatggatgttagggacacgaacaaaggtatggcttccatgacagggcagttggagaaggaagcggttactagtgtagatcgtgggaaggaggttataggtgattataatatgcaaaaattaaaagggaaaatgcatgtagactctgatgtgggccacacaaataaagagatgggctctgtacaaagcccatatatctttgaagctggacaaagttctattgggctagagaaaattagacccattagcccattgagtcaattacgaggggaagcatctgtaggtagctttgaatctcagttaaagaaatcaaatgcagggaatgaaaaaggggtacgatgctgtgaggaggttgatagcagggttgttgttggaattatatttatccaggatcttagatctacttacaagtatgttgatttaacaacctaatattgaacttcta

SEQ ID NO: 379896 - DNA, 3776 bp, Cannabis indica
atttttaacgtatataattaattcgttatggtctttgtgactccgagtaacgtctaatggtctttgggactcaactcttgctgagtaatctggtactgttctgtggattcatggctactgtaatggccactagttctgttgatgagattgtgcaattgactgataagttgggtatggatcaggaggaggaatgggaagtgaatgaagagcaagcttctgagtttggagataaatctttggtagggagaattgtttccaaacaaaatctcagtgtaggattgtttagaacgattttcactcgaatgtggaaaacatttggagagtggaaagtgaagattgtggaagaggataaaggtagtagctattttggtttatcttttcacaaccgaggagatgcgaaaaaggttcttgagaagcaaccttggcttttcaatggagggttcctggttcttgaggaatggccaaatagtggacagtggagagatgctcgattggatagagttcctttgtgggtgaagatgagaggcttccctcttaaagctttgacattgaataatgtaaagcgacttggcaacttggcgggagtggttcaggacgttgtttggaataacccgcaacaaatttttcttaatggatatgttcgagtaaggattggatttccgattatgggtgaggtatttgtaggcagattcattcctgtggatggtggaaagcgatgggtgcaacttaagtttgataaaatgcccttaatttgtttcaactgtggtgtttggggacatgatcaggctatttgtactaaaccactggcattggaattgaatgagcatggtgatcaagttccaaaatttggaacatggttaaaggatgaggatcccattccaaattgcttcgtggctcatgatcagaggagagcaaagttgcatgcggaacgatccatggctggcggtgatgtaacggatgaggcggtgagtcgtcggccggcggtggctcgggtgattgagagagacatggctaagggggtcgagtccacgatggagcagttagagaatgatgtgggtgatgggaatgatcgtgggatggaagttatggaggatgctcataatcaaaaattaaaagggaaagtgtccatggattctgatgtgggcccttatcaaaaagagatgggctttgttcaaagcccacttatgtttgaagctggacagagctcatttgggctggaaaaacttggacccactagtaatttaaatcattcacgtggggaagcactttgtgctgggttggatacccaattaccaaaattgtctgttggaaatgaaaaaggggtgagatatcgggaggggaaggactgtagggtagaatttgatacccaggaggaacgggaaggcagaaagaggaggtgtggtcgtaatggagttactatggatggtggggcagctccgatcgaaggcgagacgatggtggatatggtggaagctggccgatttaatatgggttatgggaaggcagtacctggggacgggaatcatggcaaagaaggtaggaaaagagtctctatcaaaaataaggctcggaataaagctaagcagggtggtccgaatgtggattgtagtctctccgagaagcagacattagggacaagcacagatggaatgcctgaagtaaatgctcttgttgggaatgaagaaatcagcggttgtgagtctatttctgaggttggtatttctaattgtttggatttgccttcttcttttactgaatttgaagcggcgagccttgttaatcaaggccgccgagcgcaatgaaactcttaagttggaatgtccagggaattgggaatccctggacattaagagcattacaatctcatgtgcgtgatcttcaaccgagtataattttcttagctgaaagtaagttaactcgggttcaagctgaacgggtgtgtagtgttcttcaatatgagaatttgtggactgtggatagaattgggttgagtgggggactgttgttaatgtggaaagctgatattcaggtgcaagttttgtctagttctcccggacatatacttgctactgttgcagggtgcggatttccgccttggtcttttactggtttctatggtaatcctgatgctggtcaacgtcgtttttcgtggcagctcttgcgggatttgaggaaggaagtgcaagggccgtggctttgtatcggggactttaatgaaattgttagtttgtctgagaaagtgggtggccgtgatcgtcttccaggggttatggatgggtttaaagaagtactagatgattgtcaatttattgatttcagctctacaaaacatgagttgacttggtgtaatgagcatagtaattcaaggattatggagcggttggatcgaggtttatgtactgaggagtggttggataaattcgaaggggctgatatatcgttgcttgattggtgggaatcagatcatcgtgcgttggttgtggatataccggttcgattggatggagataagtgtgggaaggctaaacgcaagagtaggtttcactttgaggaggcatggtgtcaagaggaggagtgtactgagattgtggatcggttatggagtgaggagaatgttagtggtcgagtggggtcttttagatgtaagattaataaatgtgggaaagcccttcagacatggaatcgaaagaagaagtctaagctgaacagtgaagttgagaagcttaaaaaagcactgcatgagctaacaatgatgcagcaaccgggggtgtgggaaactatacaacagatggaagctaaattgaatggattgttagaaaaggatgaacaatattggcggcaaaggagtcgagctttatggttacaatggggggatcgtaatacgaaatattttcatcataaagcatctgcccgtcgaaagaagaatgagattaaagggcttcaagatcatatgggtgtttggcaagatgataaggttctcgtgtgtaggattgtggaggactattatgagaagctgtttacgagttctgatattaatgaatctgtcctaaacgaggtgcttagtgtagtccagccgaaggtctcttcagttatgaataatgacttgttggctgaatttggtgaagaggaagtgatccgagcagtgaaagagatgaatcctacaaaagcgcctggtgctgatggacttccagcacttttctatcaaaagttttggtccaaactgaaagtagatgttgttgccgtgagcttaaatgtgttgaataacggggcagatctgcaatgtcttaatgatacagtggtggcattgattcctaaagtggataaacctcaaagaattgaggagtttcgacctattagtctttgtaatgtgatttataaaattgtctcaaagtgtttggctaataggatgcgggtttctcttggaagtgtggtttctgattcgcaaagtgctttcttgaagggtcgcctcattcatgataatgccattgtgggctatgaaagtttgcatgtgatgcggaaggatagatttcggaatggttcaaaagttgctttgaaattagatatggcaaaggcgtatgatcgggtggagtggcggtttttggaagctatgatggtgaagctcgggtatagtcagttatgggttgcaaagatcatgaattgtcttacttcggtgcagttttcttttattatcaatggtgaaattcagggccgagtactcccacaacgggggttgcgacaaggtgatccacttccacctttttgtttctactttgtgc

SEQ ID NO: 379897 - DNA, 2272 bp, Cannabis indica
aaggtacctataatttcacctaaaaatattggttaatatgttattttgtaatctttcaacttatgttatgagcgtttttcttatgctgttcttgctgttgggaacgtgtcatgatcttgagttgagatcaaaggatatcgtgtagtaaggaagtttggagaatgaatttttgctctcttcatgacttcaaccttgccattttgagcaaacaagcttggtggtttctgtctatgcctgactcgttggttctaagagtgcataaggctcggtattttaaaatgagaattttctttcagcatagcttggtgacaagttgagttatatttagagaagtctcattgaagttcaagagttggttcgtaaggggcctaggaaagggattggtaatggggagaagaccattttatttcatgatccgtggcttccgaatggttcaatttcgagtctaactagcttggatcctagattggctaatagtctttttatggtgggtgaaaaagcttgtatgtcgagcttcttaaggatttgtttgttgagaatgaggcggcaagtattcttggtattccgctgtctcattcgattttgaagattactggtatttggtgtttaactcttcgggtaagtattcaatgaagagtgcttttaaactattataggcgaatcgtgatgtagcatggatgtggatattgtgatgttttggaagaagttttggcagttaagccttccttgaaaggctaaaaaaattgtgtggagggctgtgaatgggtgcatccctactagagtgatgttgaagactaaacatgagaatgttttttttgttgtgttcagttttttatggggcaagtgaatcaatcagttaaagactacatcgttgttcagatgggatttcgattcaccttgaaaactgccaacgccaagcccactctcaaatatcaaaccaacctccaacttcctaactcaaacgagtaattggaaacccaccctgagaaacctccaacatcgttttcttctctattacactaaaaaatacgctaaagtttaaaccttccttaaaaaaaatacttttgaaaataaagacataatcacccacttttcaagcattaaaacacctccaagtgtcacgatgtcattcactaccagacatccccactgatgggatctctcttaacgaccctatactaaaaaaattatacggtcattttacaatgcactcccttaaaaggaatgtactgatgcaccctctacttgtttcggcatccaaaaaaatatttcagtctatttttttttcatattcatgtacgttatagctatttaagatatcctacaaaattttgagaaattcgaaataatttacaatatagattacaatgttcaaataatctattttacacgcgtataaaatataatagtcacgcgtgcaacacacagcttgaacgtaatttttggcgtgttcaacttttccaaatttcttaaaattttgcaagatgtcttaaataagtataatttacatgaccatgagaaaaaatttgactgaaaaattattttagatactaaaacagatagagatcatcgatatatctttttaactggtccattataaaattttctaaatttatatatatccttcaaacaaaattatatatattaattttttattaatactgttttttaaagttactttttcggtattccgaatttattttttttattttagctaattctaattttatcttaagatacaatacgataaaataaagcgtgtgaaatgcaacatagtatggctccataattctagttttcggactattatacaaaactacatttacacatctcaactgctagcatatatatgatagcaaccctataattatacttaatataataattatcaataataatgttaatgtagttgcgtgcactctcacccaatagaatacaattgctttttattgcttatctcacaatattcttttgtagcacgaaacaaaccctttaaaacaccaagcccttgtcatcttaacatacatattttgttccctaactaaaaatggagatttataaaatgcaatattggtacttagtttggaataataaattgatataattgaatgacataattcatagtggggaatcttgaaacaaatcaatggttttggttatagcatggtctctataatctctataattgcctaagaaaaaaaaataataagttttgcaatatctagtaattaattttatgcaatatctagtaattaattttattttattttat

SEQ ID NO: 379898 - DNA, 1901 bp, Cannabis indica
tcggttgagacattgagaaacaatatgatggcttcgacgcttctggcgtcgatggctattatgttgagttctttaatcgcggtgttaatggctgatggtggccgaaacaaaaccgagttgtttgttttcggaaataaaagtgaggccagcttatctgtcaagtacttttccatattggcttgcttcttagcttccttcttgttcaatgtccaatctataaggtatttattttctttgtttaattgcttattataataatatattgtaattatatctatataatttaatttgatcttaataattagtgttgtgacaattaaatcaagtttcacaaaataaaatcaattaaattcatcaaagactattattggtcaatttggtcagattttttttccccactctaatagaaagtttggtcaagttataattctacatattttcaccaagtacttgggcgagttagtatgcttgttaaaaaagaagaagttacacattttatgagtttttatacaatatttataaaaaatatagttttcgtttttttattattattttcaaaaatctactttatacagaaaaaattaaaataaaataattagaggtaaccagctaccttagggtaaccaatcacctagcttttcaggctgtaactaattataccttattctagtattttccagatttttttttttataaaattattctcataattaaaacaacttttttaaaaagagcaacatttttgtaaacttacgccttaaaaactataaaaataaaattctaaaagttaaaatgagatgtctcgatataaaggactagaatagtcaaaatagtggaatgttattatattgttttaatttggtaattattcataagcatataatttttttttttgttttgttattataggtactttaaccaagcaagtattctaattaatgtaccatacaagaagaaatcacaagatgatcaacaccaacaattgacaattgattttgtagagagaaatgttcatagaggaagttttttttggtctctagggttacgtactttctacttctctttcactcttttcttatggatatttggtcctcttcccatgtttgtttctagtttgattttggttctgatgctctatttcttggatgttaccttcgaatctgctcgagttgttgatgtttccgacgacaacaataattacgcgaaacgtgaggaactaggaatgattgggatgagaccaatttaaatgttatttttttttgttaggttaacctataatatgaaactctatattgtgtaacattccaagttaaatgtagtaacatatttcactattcttcttgactacaatttagttatagttcaattaattaattaaggtgctgtttggtaactattattattaattgattttatatttcgttaattaaaaactaagaacaaattaaagaagtttcttcaattgaattggaaaaaacaaaattaattaaattttttgcctaacaagatcacctaagcttttagttattttgtatcttccatgtataatcactttaatgtaacctatttaatactttgtttgacacgtgttgtcttgaattgtcagatttttatgattagcttttctaaataattatgtttaatgattgttaatatttttaggtataaactgacttgtatggccaattaatgttgtttgaacttttttggccgttaaaaatttctattgaactattaagattgttaaatttaaggactttgtctaatctcattcaattttactattttcagtaattgtttatgtactaaatcatgctccccaaactttaatatctaccaaatcatatccttcgaactttgacatatactaaataatgctccctaaacttttatccatgtta

SEQ ID NO: 379899 - DNA, 1258 bp, Cannabis indica
tgaaagactatttgttctaacataaattgacaggtgacaaacaatggttgggctgaaggagaatgcaaaggaagggcgggttggttcccgtttggatatgtcgagagaagggaccgtgttcttgctagcaaggtggctgaagttttttaagttttcttctcaagtaggcttctgtcaaaaagatttttgtatgtgtattgttgttgtttctatctaatggactcaaaggtggagtatgttctaacatattacatatagaagaaagctcatcccaccttttcatgtgatatagatattctgaatttgtgtttcttctattgattgattgtttatatccaagtttctttcttttatttcaaggttgtaatttcattgtcttggtttatagatattcttttcaatgattctacattgttttgttttttttttcgtttgttaaaattatagatgtgagtacttagaatgtttagttcctttctctgccatttaataatttttatttttcatatcatttttgttttgttttctttggtggttattttgtttattgtttttatggaattgcacctttaaattataattaattaaataaagatctagaactagaaaagaaaatgagaatataaagactatgtttttttatgtaattaaggcgttaatgagtcttagttcatgagtcattctcctgagagtgactccttgagcatagggtcccggagggttcatccttgagcaatggggtattggaggatgcctccttgagcataagctcccagagggtgtctccttgagcatagggtaccagagggttcatctttgagcatgggtcccagagggtgatttcttgagcatagggtctcgaagggtgcatccttgagcatgggtcttagaaagtgcatccttgagcatggatcctggagtgagcatccttgagcatagaatctcaaaggtgcctccttgagcataggatcctggaggatgcctccatgagcacaaaatctcaaagggtgcatccttgcttattgataagtcattaaccaaggtctttgcataaagacgtatcttctaacagggatggtacttgcacaaggatggatcctccaccaaagatggtcaaggaggatttttacatgaggatagattctccaccaaggatgagaggatcgatcctccaccaaagagggtcaaggatggttcttccaccaagaatggtcaaggatgattcctacatgaggatgtatctgacaccaggatgatc

SEQ ID NO: 379900 - DNA, 3309 bp, Cannabis indica
cattttagacatacctacaatgacaaaagtctagtgagagagttggatgatgcttttagagggaatctagacatagaaaaaccatactccttgaagtcgtgagtttactgcatgtgctggttgggcatatcacattggattgcttcttagtgaataaagtcgatcttggtcttgtccttcctcactagattttactctagcttgtaaaaaatataagactttgtcgagagacgtgacctctacagactggtcccaccaaaaaaacataccatctagcaagcagtttgtatacttgcacgatgatttgaaatggagccatgcccaccattctatagaaattagtgaaataactcctaagtagaagatgggctttgactttaatgtggccccaactctaagtggaggaaggtgagctttgactttaccttcattttcatttatttttttaaatatacccacttttatagatgatgtccccattagacgccttaggttatgtaaattttatgctatacttaaatagagagtgagggtatattaggcaatccactcaaaaagtgggtatattttaataaaaaaaacaatatgagggtatttttgattaatggatataaaaaagaggtattttttaacttatccctaaggcttgtttaacctcttcttcagtataagatttcgatggcatatgaacttgagcatcactaattactagaccttatttcaccaatttccaattcacttattctctatgttctattttccttccacacagcttcttataatagtctacaaaggcatttgtaatcttgttagtttcatctacccgtctacaaaggcatttgtaatcttgttagtttcatctacccatttaccatgagtcaatttaatcaaataaattctactttggtatcatttcattttgaggctttgaagaaatattttaatgttgtcaccaccatatttcatccgttgtaatttagctttttgagttaaaaaggagttgtaactttggtatgcctactaataaagaattctaactttcctctcttgatcaatcaagcttccattaaatggatctccttgaaaggcttcctgaataagcatctttatataaatgttatataaatgataagaaaaaataatttaaccatactaaatgatagatgaaccaaaatgaaaaataaatactcatctttatataaatgttatagatatagattatagattatagaatggtcatcataatttttcgtactatagaacatggcacatgagaaagaaaaaaaaaattatacaattactttctcattataaattaatctagtttggtgtactcgagaagcatatggggtgaccggtaaattttaacaagtgtccaatacagaacctcttcaacttctagttcaccttctgctcttgctgcatatatatcttcacatattgctagcaatctgcatcaaaaaaacatgtaaaaaatctaagtaccaaaaaaatattatttagaaagaaagttacaaatgcaagcttatacatagatcactattcaaattatgattaatttagaaattataaaaataataataataaataatttgtaacctaataattaaatatttgtaataaaattttttataatttaaaattattacacacataaccttaattaataaagaaaaaaaagtaagaatgacttctaattagagatacttttacactcaatcttatattcaatacctttaaatgccaaatcagtatgtcaatcccaaattggctcaaattatttagtttttcgtcaaaaacatgaaaaactaaataaaaaaatagtttaaaatgtaataacaattatacaattaaagattagctaactatttttcgctcctcattgaaatcatttttactaaagtaaattatcaattaattgagatggtgccttttttacacaaataagcataatagtacaaaatagcaagcaaatcactaaaaaccaaagagaaatctaattgtagctggtggattggaggaatggatttgtgacagagatgtaggagattgcatggaagtaaaaaactcacatgatgttaggttgggacacactgaaaccttaatttttgaaattgagattttttttatatatataaaagcagttgttgcaaaaaaataattagatgtcttttttaaaaaataattaattattcaaaaatttatttagaggggttagaagtctaatttttgttaaaaatattgtagttaaatagtttaaatgtttaaaaaaattataataagaacttaaatataaaaataattataatttataaatattaattgctaaaaagtgtcttgataaattaaaaattaattatattaaaaaaacagtgcattataattaatttaattctaaaaaagaatttttacctgttacaagtaaaaaaaaaaatataaccattatgaatacaataaaaatataaaatatgtatatattacctatcacaagaaggaaggttctcaaatggtattctcattctgagatcagaacattgtaatcttataaaacggccaactgctagtacaaaggttatgtaaagaccccatatgctgaatttgctcagtgtttcaccaagaatgccctctgagatcatatatcaagttagttaataccaaaaacacaaaatactaagattcatattagtagattaattagggtaaaaatattttctctcatattttaatctatactcaaaacattgtatatctaagtccatatataaagaaaaaaaaataaaagatacaataaaattatgcttataactactttcctagaatagtgatatggcagttatacaagaatgtctctcctagtaaatataagattttactccactttcccctcaagctggtctaaaaatgttatccatagcgagcttgttatttaggaaatcaaactacttcttggatagtccttttgtgaagatatttgctacttgctctgatgtaagaatgtaagacatgctcattagtcaaatttctattttttcattgataaaatgtttagtacaatcatgtaggattggattgtgagaaattgcaagtgtcgctttgttatcacagtataatttcataggatacagttgttaagactttaggaggcgtttggttagggggaatgaaaatataagaatagaaatgggaataggaataggaatggaataaaatttaaaatgcataaaaaaatttgataaaaaatcattaatttttttttcttgttaattggaatgatcattcctttctttttaaaatggaatagccattcca

SEQ ID NO: 379901 - DNA, 11455 bp, Cannabis indica
aacatgagtgagagtagattattatatgtgaagataatatacgataagatactgtgtgataagtgtgtgagtagcatgtattaagtttatactatgatatgatatatcatatgtaggaataatgtgtgatacgatatgttgatatagtgtgtattgatttgatgttaagatattgttatattgtattctattgatgattatgttatctagttgggagagttatgtcatatatagttcttcttactgagctttagctcacgggtactctatgtgtaggtaaaggaaaaaccaaatagcgaggatgcgagctcaaaggtttgagtcaaaggccaagtatccatttaggtcaaggtcttggtacaggatccaagtccaaacccatcaggatccgagtccaaggttagggtccaggtccgaggtttgagcccaagtccatggtcatggtatgggactgggataaaaatcgaccctaaaccctttgtgaatattataatactagctaatacatgtcatttgttatgtattaaataatacgactcacattatattaaaatttataatcgtaataattaaaacaatacaatattttatctaaacagtattactatttaatacaatacgacccttatatggtctgccaaacgagccctaagttcattaactaagaaaaaaagatggaactagtagggatgtcaattcgtgttcacagatcgtattcgtattcatatcaagactcatgtattacaggtatatgtttgtcctgaatacgactcgtataataatcgtgtcaaaaaataaaaccctcacatgactcatttatacacaacacaacttgtgaacccttttatatataaatgttgtttaaacatgtcaacccattaatatattaatgacatgtttaacacatgacaaattaacacatttatgacttgttaaagtattaaaataactttaaatatctcgttaaccagacagtttcatattggtcatgtcaacctaaacacgatcccgtttattaaacggattagacaagttaactcaaatacaacccgaacctatttaaagcaacattaacctgctaactttcgtgcgatcaacactgcacaaagctctctctagcaccaaagtcgatccttgaagaagatgaacactcctctctctcatctatccttctagttaggactgcttcaatcaatcatatagctacagtgttctatctcaccacacccttgttcctccataaataaacaatgtcctagtcaatccatcaccacatgctaattactcaagttattgttagcaatacggagcatgtgatgaatcttctcctatgacacgtatccttcatttgtgttagatattcaagaaaatctttccagagggagcacacattccgatcaagaaccaggtcatctcgtagagatgcaaaaccatcatctaaccaaaaaaaatacaatagtcccattccttcctcaataggagcttggaacttatttctctaagtccctccactacatggtgcacagattcagtcacaaaacatgaatgttgaacctgtacgcaaaccacctttccgtggttacaataattctcaaaatacgatagaatacgagcatgattcattcggctgcagctgcaagtgactctatcgttctgtctcccacatcagtcatgttgaaatgaggcttacaagggaacacaaaaatagtagactcgccacttgatggctgaaatgcagatgaatatcttgttgaagttattgtaaatctaggcaactgttgcatgccagaggcaagtggtacaagcttgtaaccaacaatttgctcagactttggaagaacatagatggcatcattgtgtgacccggacaaaacaaaactttgtgcatcagccaatgacaacttgagttcttgaagcaactgtgtttggttcctcactttaatatagtatgtaaagggatctcccagaacagcataaggaggacattctaaactcacaaccaaaggtgacaactcgagaatcacatcaggaagtctttgatcagtcaaaaccaaagatgctgctgagccaggctggtctccaatcccagcatatcttctccatttgatacgtacacttcctaacatgagttttgagacattcatctttggcttgacactaaaaaccttcttaaactcttctcccggtacaagaggctcagggtccgagtgatcactactgttttgcacagaacataactttccaatgtcatcatctgattcaactgaaatggatatcaactgcaatggtacatcagagcaatttttagcactaacaacaagtatacttgtttcactcagaggtagtgttaccagctgatcagaatcaggaactggcttgatttttgagggtaacaatgggtcattcctgaatggcagcataaattgatggtttattaagatggctgtctttccttcaatctgtaagctcttgtggatgttaactatatgggcagttgaatcattgccatcgggggaataacctagtgatgcatatagcataactggtttcggcctgtgccacttaatttccaatttgcaagaccacgagtctccagaatttagaaatggaacagacaccaaaccaaatgattcttgaattttcttgatattatcagcacccagattagattcatcctccccttctggtccagatatgccaagaagttgaacatgatgactatccagagtgataggttcagtttccctcggactgaacaaaccaccacccctaacatctaccagattgatctttaattcaccagaatgaacagcatgtcccttagcggccacggtaacaggtatcacaaagctctctccaacaaatgcagggccagaagcatctatgtttagatcaacttgtgggtctggttcctcaacctgggtcgctttctgtccagtaaatgccagagcacgatccttggttggataagcctccacacggtcttcaaacttccaaagaggcaaatcacccattgaagcgggactctcagctctgcaacagattgtgaagtggggacccattttcgcaataacagatatgcattcaagctttccactttgatctggaatcagtcaacaagctcactttattattaagaaatgagaacatggagatgtcacaaataagtaaagggaaaatgagagcagaaacaagaaaatagctaaaggtaaagtgaccaaatctcgaaataagaattgaaccccttgtaatgtaaattactagcattaataaaataactaaatccttgatatcaacctaatccaaatgctggaacaattcgtccgatgttgacacaatcacaaggaaaacaaactcagtagcatttcaaaggtccaactttttaccctcgaatgtcattttagtcgaaaggcttaatatagcagtttctatatataaaaaaaatccatatttgaccataccgtttcacgtaagttgagtttttttatacactactcttactaatttagttttttcaacctactggttgaggttaaaaaccattgaagagagttagtatgccctttgaccatattctagcaaacactaagcacctttgaggaatcacttgcacacattagttaatccaaactgcaattaataatataatcttatgtggaagggcaggtgtacaaaactttgaagagcaaatatatgtttattcttgtctatgtgaaggaagatgagatcatagttgatttaccagatttgatgtcatatgttaggcgcagccacctgttttgagaaagtgacagagaaggggcagcctctactcgttgactctgttgatcatcatttgctgtatctaactgagttctttgagaattcacaacaaaattgcaagcagactgattgaactggacttctaactgatcaacttcaacagtaagaggtagttgtgatagaagtgacaatgtaatcaaagtggaagaaccaggcttaactatgtgttcatgaaaaacaactgaagcaagaagaaccactctgagggggctgacaagatcaatctcaagatgaagttgattaactccagttactctgagatcagcatcgctttcgagtgaagtcaaactcaactctccactaataagctcaaacacttccttgtgtattaattccttttgttcaatactagcagacccagctggattacattcttttctggaatactggacaccaccagtatcagatgatacagggagggcagccatttcaagagagtactctataaaatccttaagctgaccttgtttcctagagcattctcgcaaataacccaatacttcccacagcaaggagacccatccttcttgtctgtatagatttgcaataccatcaaaaagttgttttgcactgctgaaatcccccacaacatagtattctgaagccatctggaatccacaaagagcagccattctctggactttaaaattactaaatgattcatatgattttttaagcagagcaataatttcaatggaatcttgaaacctttttccttcagaaatggcatagtgaatatattcatcatcagtgaggctgaaagtgaagaaaataatttcaagcctttaatagaaaacctaagccaaatcaaagacaatttttaaggaaaaatatgtacatcaataaaacttgacttacggttgcattagaaatgcatttccttgctcaattaatcgagcaaattgacccacaaatagtgaaggtaccacagagtcagtgctattatcactatcattgaaagtttctgacaatgagacggcactttccaaatatgatcttttctccttcaagtacttagcagccaactgtttcaggtaaatgttttcattcagctcagcgatatgcatcaataacaaaaacaagtagctgattttctaattattatagttgcatactaactttacagcaactggataagataactaaccaagttcaattctaggagccatctagtaaaatagaaaatgaagactacaattaataatgggaggacaagtgcataggtgagcaagtcccataaaaaattgataaaaataactaaccaatggtcaaattgcttggagaacaaaaaaatataaaacataaccaaacatatgttatagaaatatatatttatacatagtatattatcggtatctttgtggatttttagttctacagattttcatgttttttctacctctactctactcaaagattggaatcggtggttgtaatttaagatgatcccttatcattttctgtaattcaccttactctttaataataatattgttcatatttttttaaaaaataaaaataaaaaataaagaaacaaaagacacatatccatgagtgacctccaccaaaatttattaaaaaccctcacgtttctttttatattttctgtgtgaaactaagattcccacctaactgtacactaaggaaacttattaaaagccctcactcacttacggtagaggaaaactgtggtgacaaacattaacttagaagtttaaacaacaaaaagaaaaacaaaaacaaaaatataaagcacgacatgaaactctccattgttcttatttatttttgataaaaaaaatacaaagagtaacgtgagttgtataatctaatatgttttgtggataatctatcaaaaaggtttaaaaggatttaagttaactattcacataattctagtacctctaaacgtacttttatgttttgttaatgatgactaaaaagtatgtcatgacagggcataacatacttacccattaaatgattttcccaatcaaaatgcatgagatctgaagttatgcctctccaaattcacattttcaaatgaggagtgagaacattgcctgttacagtcttaccttacaaccgcttattcactatatttctattagacaaatacatctatattcaccctccaaaaaaaaaaacaaaagacattacatctatactcaggctatgcatgacgatgtatgtccaaaaacataaacctcctcgacagacatcagaattctttgtgtgtgtgtgcacaaataaaactttttcataaataattttcatactaaagacgttacatgcaaagggacagatttaccattgctctcttgatgttacttgtatgatgtgcttacttgaggtgaatgggaatcatttgtatggtaatgattcccattcacatatttccaaaaaattagcactgaaaaaattaagtgatacccacataaattaaggagaaaagacaaaggaatgtcgttacccgtaattattatttctttttttcattttgttttgttttaggggagttctatttccaccccataaaattataagtacactcaaatattaaaaaaaaattaaaaaattactaacattttattttacattattttgcattaatttcaataattattttaattctttttgtatatattttttaaaatcatgtataatttttctaataaaaattcatatatttttttccttttaattgtattgtcttaatattgaaaatatattttatttttacttttattttatgtgtacattttttaataatatgagaaggaagaaatgtttttaaaaaaattaatataaattaaagatatatattttatttaaaataaaatttattaaaatgggacgtctttataaaattttggggtacaaataaaactctccttattttattttgatatttaaagattaaaagacaattgtatccttaaaatatttatgttatcatgatctcaatgtaaacttttttattttttttgtttcattgtctctatttgcaaaaaaaatctttttaaaaatgcacaattttcattcgaatctttattgcaactttttttattccaaagatgttacaatgatatttgtaattataatattattaactctggaaaaaaagtcacccataatatgtacattcatgtatttccttattcattttttcatattacatctattaataaatagaaaaaatgaaaaaataaataaataagggcaaattggtcaatttaaagtattccaattacatttttttatacagcggtggcaattcatgtcatgacacgagaacacggcacaaactcaatacaaattattgtggggtcatgaaaaatagatgcgggttgaaattactacgtcaaacccaaatgacacgattattatttgggtagggttagatttaacgcatgcaacacgaaatcgacaagaattgacccatttatatccaatatattattaaaataattagtttatagttaaaatattattaattttcatacaaaaatagataaattagaaaaaaaaaatgcttacaagaatataagatagataatttatatttgatattaacaattttattcattgtattgatattttgtaataatttttttataaaaattaaatatgctataccaatcatgttgatcaacatgtattgtaacaaaagtatagtcgacaagaaaatacgacggaacgagttagggttgagagttcttgacacaaaatatatatgggtcaggttataattcaccatatgtcaacctgcataacacgaacacgaatatgacacaacaacacgaattgccacccctatttggatatgtaaataaaataaatgatcatagttccctttcagctattttaattaaataacatcataatacaatttttttttgaaaagtgacgaaggtcatatgtataatgcactttatattttattccaattcatgtctccaataaagattatggtatagtaattgtgtcactaatgctttaaattcatggtaaagagaactgcttacttgatagtagtttgccggacgaaattcccattcagtcaaagatttctctatggtgcctgcaatgagagatgagatgctctgaatggctcctgaacttgtctctagcaattcagcaaataccaggaattgtcgactcatccactcccaatgaagaaaaaccgcttctggtggtcctatgacctttctgtatgaagcattgtgctgacgaaaccatgtaatggcttctataatctttccaccatgcaataacaaggttgatattttgaagtgcacttgctctgcaacagttttaatctcaattagccgttgtatagcgggtaacctagtcgatgttccaatcatctgcatacaatatttgacataatcaaaaatgaaaaatggaatcatctttatgagattaagaagtgtgatctctagtttcacaaagaaaatagtagtcacttgaaatacaaagaaaatagtagttgattcacaacaaattcaagtattagcaagaatcgcaatctgtaagtctcccaccaatgcttcattgtattctttaaattacatttgagatagaatcatttgttgagcataactaaagggtttggagtttggagactcttcaattgcacaaataaaatattgagtatcttacgagaattgtttcattcaagattaaatcatgtacatggaagagttctccaactgcctatagttcacggttggtggaaaattttcttatgctgacataaccttatacatgcaatatgattcaacaagaaagttgaacagcttctgagcaaaatggtctgttttgggtaggaacttggcaagctaccataaaactcaaccaattgaaaaaaaatgacactttaaagaaataggacttgtattaataaagaagaaatagaagcttaagagtgaatgaataatctatccaagaagaaagaaatcacataacaaaactccagtcccttgtaaaaaaaaaaattactcactgatagcatctatgatctataaaaattcttaaagatggagtgaaaagaataaataaatcaagatatacctctcgcagcgtgtgataagcatcttcatagaatctaatagcttcaacccaatcccttctaaattcagcatacacagcaacctatatttcgaaggaggtatgatagaaaattagcaccacaatgaaggtagcgacaaaccaaaaccagaaatatccaaattgcaaccccaatagtgccaataaaggttacaaaattctcagacgaccaagatcgtgctgtcttagtttgggggcaatgttttaacttagagtaaaggggaaaatgcagattttatacattccaagaaccattaataaagaaagcagacccgcattgcatcattggttgatcttttaatgaacaagctatctaagaggtttaccgctttacaccaacgaaacattaaacttactgtttgcatcaaatattagtagtgcaaacagataagagaaaaaatgaccataatcctcttcagatagttctatacataatgagtcaaagcaaaaacatgatttttaagaatcaggagagtcaacaaaacaaactaaaaaaaagtaatcataagaaattcactaaaatatgtgattcttaaattctaaactgttaccacaattttgaccaaaatctaagctaacgaggcttgccttgaaacagtagcgaacttgcaactcgactgcactgcaacttttcttctcaattcgagctttaatccttcgcccttcatctctatagtatatgtttgctaattctccaaatatgctacccaatctgcaccaatacacaattcaaatcaattaaatatattttctttctttattttccttatttgtccaaagaggaccctataacatgaaaaatgcatacctgtgaagagattgtttcaattcagtttcatcattttgtgagaaggtaataaagtacttcgaatcaatttcagctcgcttccgtagagcgagcattcgatcttcagtaatgtcatctatatcaaatacatttcctatttgatcaaattctcctctttccaaaatatatacgaaatgtgtgtacaaatatactgtataaacacaaaaaagaaatatacaaaagatgacatgaaactacatctacaaacctttcgaatgagaatgaacaaccacaagtaccaatctaatgtttcgcgcacgaatcaccgttctgaaacaaacacagaaagttcataaacacttctttttcgaaggtaacggcgaataaggtgaaagaaaacatacttgagattatcaagatcagagcaaagctgaagccactgagcaggatcgccagaaacgcaatcagaggataagagagctgcaacgacggcaggaatcttagtgcgatgcttgagcagccaatcccgcttcaaaatcccggcggaggcggcggaatcaggaatggaggattggtcatctttggggttaggtgctaggagaagagagatcttggaaaggtccggcaacgcaagagtgttgattgggggctgaagagagtgaaggtgcgtggatatggtttggtgaaggtcagggcatccagcgacggagaccagactcaccggcggactacgcatctcttctgggtaatcctccatggctaccaagggaaggaagctcgttttggttcgtaagtaaatcgcctttagatttagcagtgtcgatgatgactttcccttcaataatatttgtttgggcttcataaatcaattgttgttggactttatggaccgtcccaagcccaggccttacccaatttcagatataacacagaaaaatgccatttttcaaaaatcaaacaaagaactagttgattgcaagcacgtgcagattaccctacgattttaggggtgtttatattgggataattacaccatatattgaaattttaactttttttacttttatactgtggggttgaatttttttcaaaaatactgtgtactgtgttaagttttcactgttgttctacggttattttttagttgttctactattgtttttagttgttatgttttgtgtttcactgttgttttgtaaaaacacagtatttttgaaaaaaattctgacagtatctttataaaaattaacccaaattctagtacttttgtaagtttccctttatatttgaacccaaccaatcaagattagtttagccaactgccaaaaaataaaaattattcaataattaataatttatatctatttttttttaatctcatgtgttaaatataaattaaatcaattaatatattttttaaataaaatatattaaatatatataattatcaatatattttaaaaatatacacatataattagatgaccataggatgataattgaatctgttcagttcttatccatggatcgaatgtctcatccaacaattaatccgatccattgaatttttaaatgggaaatttttagttatatacgtaaatttaaaattattaacaaatataaaattggacatttaaatgataaagttgagggtagttgtaccgcatataaagggtaaattacggcataaatacctaatgtttcagattttatacacttaaatacctaatgttt

SEQ ID NO: 379902 - DNA, 1609 bp, Cannabis indica
aaaaaaataaattcaacaacaattattgttgttatatttataattatgattaacaacacagaaaggttttgggcataaaaatttggtggccagctttaacttggaaaagaaaacgttacaggtccattttttgggagctaagctaacaaactttaggtagcacagttgataaatcaacaaaattaatataaaatattaaacaactagctattagcctttgcaattatttctcttttccaaaaaaaaaatattgtgtctattcaagaattcgaaatgctattgtgtattggacgatcttcctatggtcgttgatcttgaaggtttggatcctgtgccctcttaaaaatatgattttatctttaaaaaaatcttattataaaatagaattagctcctaggaaaaagaacaattaatatatagttatatataaaactatttttaaaaaacgatttatcgcatcaacttagtttatagaaatgttttaagtgaaatctaacttattttacccaataaaaaatttaagataggcttaatcttttaattttatatatttctatagtgttttgccaaaaatgttataattttgttttagaaaaaaatcaaaatcaaatgattccctctatatactaatcaaactaatataaaacataaggatcattgtataaaaaatgtgtattttattaggaataagtagtatttagaattttttaaaagtattactttatgattagttaaacatatttgtaaaaaattatttaatatttctctaaaaaaaacaacaatatacatacatagataaagacataaatctttgaggttcctaaattaaaattttgaaggtgaaatgattagtagggtcctaattattcgtttaggtgaaggtaaaaaaatctacttgagattttcccattatccgaataaaagtgaattagagagagatatggtgggaagattttgtgtttacttttttcatcgttgaatcttggtgctatggataacactacatcaaagttggaagatgggacttttgtttagtattattttttgtattttctaagtacccatttggcacgccaagcgaaaatccaatgattaacgttctaacaaatgctctattcttgttgatcatgttcctttgattgcctctaaaaagtgccaaaaacaaaagactaggcgatcttgacgaaaagcaaattgtttttctctttgacctttgaataaaaatcacccaaatcaaaatgggaaccaaagaaaagaacactatcaaagcaaagtataattatgagaacctatacattatttattatatattttggcaagaaaaagcacttttactccaaaattatttattatatttgaaatattttatatggaaacgaaaattcttcgtgcactgtcgtctttctctccataatttccaccgaaatattatatcaatgtaacttgaaaaaaacacaacaaagtaaattaaattggctttactttacatgatttcggattgaaagtctctaaagggaaatcttgattaatttgagataataatatgagttcctagagtggaaaagttaatgtaggcagttaattatattaatgtaattattattttttt

SEQ ID NO: 379903 - DNA, 5472 bp, Cannabis indica
aaaaaaaaaaaagtaacttataagttgatttttaggtactcgaaattttttgtacagaatgatattgctctgtaatattttaaaaagagaatttttgggttgaaaatataaaaaggtgtttaaaattcattaattaataaacaaataatatttatttaattaaataactttttcgtgtaaaaaattaagtgattatatatttacacttgataatatatctacttacacattgtagtaggagactgaatacactagtatggaacacagttcacaattacctaactctttagctataacttctttatcatcctgcattgaatttctaactcccatttatgtaactatccaactccgaagcttttactcagtttccgattccacaaatggcttctcaacagaaacttccccgagttttctgtatcggaacggccgatactaagcttcaagagcttcgatttctctccgattcagtccgatctaatctccacgcctttttcaataattcatcggctaacacaccgcaagtcaccattgttgatgtttcaacctctgaggcggcggcggcggccaccgacagagtggacggtttttctttcgttacgagaaacgaaatcctctcttgtcaatccggatcggaggaaggagctccgattcggctcccgaatgacagaggagaagccattaccgttatgagtaaagcattggagagttttctgaagaaagctaatgaaaacggtgtcgttgctggtgccattggtctcggaggatccggcggaacttcgttgatagctaatgcgttgcgatctctcccaattggaatccctaagctcatcgtctccaccgttgctagtggtcagactgaaccgtatatcggaacttcggatttggtactacttccgtctattgtagatatttgtggaattaacagtgtgagtagagtggttttatcgaacggtgctgctgcttttgccggaatggtggcgggaaggcttgtaaaacctagagagtctggccgtggtgatgagaaattgacagttggaataaccatgtttggggttacaaccccatgcgcgaatgccgtcaaagaaaggctggttaaagaaggttacgagactctggtttttcatgccactggggttggtggcagagccatggaatctctggtcagagagggatttattcaggtaattactatttacttgttttaattcattttgtttgagttctgttttctgagttgttaagtttaacttaggaatcttgttctggttggaaattgttttgggcacaatgtgttagaaatttatcaaacacgaggatactatattgcatacaatttacaacactacgagtaattcaatgatatagaaaacacacgtgattgattcatgaaaataattgagaaataatgaaaattggcactgcggtgtgcagatcaataaatgaacaaaagcatacaattctgatatatcaatagatcttcggtgtaagtctactgaagcagaacaacagatcaacaaaagcatacaactgttataagacaattttgtattttttgagttaggagaggatctaacgactaaactttagttggactgattctccttatcaaaggttttagttaactagaatagtccacatttctgattcaggtaaacttcacatagatgctaagcctatcaacctatagatcactaattatgcaggcttaaacagcaaaaaattattcatcatttcatattttaatacaatatttaaaatgtatttaagtccaaataaagtcttacacaatgacattagtagtttatgaaaaagatttgaacttgggttgtggagtaaatgaaaatttgctgaaatatgatttgtgagctcttcataagttcatacgaagtagttcaaatttaggaatttcaacttaataatacttaaataaccattgctagcttcagggaatcgaagagctcagcttgtttatatgttcaagtttttaatggttttgttcagggtgtcttggacattaccacaaccgaggttgcggacttagttgttggaggtgtcatggcttgtgataattcccgctttgatgctgttgcagagaaaaaggttcctctagtcctcagtgtgggtgctttagatatggtgaactttggatccaaagataccataccttctgaattccaacataggaagattcatgtacacaacaatcaggtgataagccatttattggagtggcttccattgtcgttctattaagtttgtgcgaaaatctctcagtaataaacccttcatttttatatctggtgccagtgattgtcatgctattttactttagatggtatatttatcttgggtcttacacgatttctgttctggtgagtcaggtgattatgggtttgacctaatcttggtctctccaggtttcactcatgcgaacaacagttgatgagaacaagaaatttgctagctttatagcagataagctcaacaagacatcatctaaggtttgtgtttgtcttccacaaaagggtgtctctgcattggatgcaccagggaagtcattttatgatcctgagattactacttctctcatagaagagctgcaaaagctaattcagacaaatgaagatcggaaggtattgctaacagtttctacattttcattctttgctctgtttcgtgtgcatggccttgttgatatttacaagcaatttgtgttcataacaggtaaaggtatatcctcatcatataaacgatcttgaatttgcgaatgcattagtcgacgcatttctggaaatcagtgtgaagggttctacagattccagctttctgcaagaatctactcctgaatcgaaacaagatattgataagaatcatgtttcaaatgtgaatttaacaagttttcatacaattgcacgaattccaagtgactttccagatgcaaggccaggtgtttgttaagacagttattttcctaaaagtaccgttggatttggcaaagccttaaattctgtatgatgacatcaattttgtcatgctttttattcttagatagtactaccaccggtctttttatggttaatatgttaacatctttctcgaccattttgaactcaagtctaataactatcatgtttcttttgcaacagaaacattacaaagaactcgggcagtgctgcagcaactgaaagatcagataaacagcggaataccaattataggagctggtgcaggaacaggcatatcagcaaagtttgaggaagttggtggtgttgatttgatagtgctgtataattcagggcgttttcgtatggcaggaagaggctcgctggctggtttgttaccttttgctgatgcaaatgccatagtacttgacatggcaaatgaagtgctacctgtacgttttttcaactggtttgcttgttttaaatactctttgcaagcctttcttactactaatacaaaacttacaaatataataggttgtgaaggctgtaccagttcttgctggtgtgtgtgctactgatcctttccgccgaatggatttcttcctaaagcaggtggagtcaattgggttttctggtgtgcaaaattttccaaccgttgggctatttgacggtaattttaggcaaaaccttgaggaaacaggaatgggatacaggtaggttttgtttaatgaaaaattgtgttcttagaaaaggatacataaatagtgccatatgcctgagtaatattgtataagtgaccaatgccacatatagttagtttagagtttttccaaagaaaataatagaaaacaagaaactcacaatggaacaggaaaagctttctctctagtgacaattagataccaacaaaatatcccttcttcaaataggagaaaactcctcacaattctctttagataaatttgaagaaacttaataggtcatttaaagaattccaaatgaacaaaagaagaaaaagcatctgccatcttttatttcaaccatcatacggtgtagctttcccttgttttgatgatcagcttggaagttgagatgattggaaaagcacacaagatgggtctcttgacaaccccatacgcattcaaccaagatgaagcagtggaaatggcaaaagctggtgctgatatcatagtagcccatatgggactcacaacatctggctctatcggtgcaaaaacagcagtctcattggaagaaagtgtcgttcgcgtacaggaaatagcagatgcttcccataagatcaatcctggcaccattgttctctgccatggaggtaagtaacatctcgggtagcttttaaattcgaatccttccgttatacttccctataattgaaatagattgttgctttcagttagctttaacttaaatgcaatgcaactttcagggcctatttctggtcctagagaggcagaatttattctgaagagaacaacaggagttcacggattctacggtgcatcgagcatggagaggctaccagttgaacaagctataacatccaccatcaaacagtataaatcaattccaatgaattgaattttcaagtgattctgtaaaagaagcttcccacagtgtacaatacggtatcaataaatttaaataaagtaaacaaagtttcatttttttttctgcttgtgagaaacctacagccatgtagcaaaattgctctacaagatcaactattgctactttttttttgtttgttttttcatctttgctgtagaagaatcacatagtatgattagtgagtctaaagcataaccacacgaattagtttatattttgatttaaacattattaatttcacatttttcgtagtaaatttcttaattattattaacattaagagttagacaaaaaacactattatctcatctcatgtacattaaaaccaagccgattattgattgataatgtgtgaaaatgttggaaatgtttaaatgtataagctaattcgtttaaatgtagggttttatttttttttttcatttgcttattttaattaaaagtattattaatttttaatattttattaaattaatttatatttaataaaataattaaatattaactacagtaaataataaaagtgattctctattttaatattttagctaatatttagctaaaaaataaagagtacctatagagatactctaacaatattgtgaggtaacaaaaatgttcaattaagggcaataaaagcaaatcaaaacaaatggagactagacaaaattaatgctttcttcactaaaaagtgcaaaacatgatgaattaatttatggtcaaactttctaagtctttgaatttggcacaatcaacttttattactaatttttggggtagaactttctaagtttcgattttatttcagtctctattatttcgtttactttgaacagttaagtgttaagatggactatcacaatatactaacgtattactacgttagcaaattttt

SEQ ID NO: 379904 - DNA, 1192 bp, Cannabis indica
aaaagaaaaaaaaaacaaagtactctcatttataattaggttataaaaagaaccatgttagtattatgataatagtagtcataagtacctgaagcttcttagcaagatcctcgtgtttacttgcgacatccttaggcattattcagcctctgaataacttcagcctacaagagtacattgcaacaaaatctaagaactccgaagggcacgccaacaatatcaaaatatgtctaaataactcagcaaatcagattagatatctaattgactcttttcatattttcatgacttgtgctctttattggtataaaaaattcgtgtaagtgatattattgttaacggcaacataatgatttattattgctaaacaattaaaccttatctaacataaactttttacttgtccccaaatccaccaacacaaaggataaccccccatccttgaccaaaaagcaaaaggcattaatgttacttaccatgcattgatcacaaacacgaacagattgggcattctcatcagcagtaagagcagttctaccttgggtacacttatcacagaaaatgtctccacagttccgacagtgatgctgatataggaaaaaagtcagacctcaacttaaattgttcaaaaaaagcacaaaaaacttgaaatgaaaggcaaccttccgcacgaaagccccgaaatctgttctacatgatgtacactttgtaactgcttcatcagggacctaaataaaacaacacagcaattaacaaaaacaaaattccaaaagatgttggatgacaataaaagaaggggggaacctatactacaatgctttcagaaaacaaattacccaatgatccttctcctcattgacaggcttcactaagttgatccaatcagtaaaccctttctttttctctgtggactgttcattcaacttgaaagactttgaaggcataatacttccacccatttccttcccctgggcaatataaaagtctttaaaaagtgatcaccaataaaaattgcatgcatatcaaaatagggagacaggaaatacatgtgcttcatatgtccaataaaaaggaagtctcaaatttgggaattgtccaataatagttatgagtactaatttctacgaatatgacatcacccaaacacaattgttctattatctacccgcctataaaaaaataaaaataaaaa

SEQ ID NO: 379905 - DNA, 1618 bp, Cannabis indica
caaaagttgcagcatttgacccattttcatgagcaaaaaaagaaagtagatctattggaaaccaagtcagcaaatacataatcatgcattaatttctttttatttaaaaaaaaatagaaaattaaacaagaaaaagagaaggaaaaactttaaaagaggtcagggtctccatgtgaggttatattagctctttaatttattaattatatagttttaaattaatatatataagaaagtcaacatggagatatgtaaagtttttggtcatattagtgtgtttatattattatttttttcaatcaatatatactgtatttataatttagtagtggagtgaaactgatttttattgatggaggcatttcacatggatttaaattaagacacttattttaaaattaaaactaaattattttttaatatattaaaattgaaaatattttaagtcaaactatatttataaaataagataaatttatatatatgaatgagtactaattattgatatatagtagatatctttctataatcatgatttaatgttaaatattaattttaacttactattatttttaaatattttaaatgatttgaaccaatcaaaattaccatgcaatcaattagttggcatatttaatgagaaattaatgtgagatacctcatttgcaataaaattattaaattgaatattcattaaaatgcacttcatcacacttgatcactcgaaccgagtctagacttaactaaagatttaggcagtgtttggttaggaggaataaaaatgggaatggtaaatagaaatagaaataaaatagaacaaaatttaaattgcataaaaaattgataaaaaaatcattaaattttttatcatgttacattagaatgctagaaagaacattctattggaaagactgacattctaatactttcaaacgtaaccaaataaaaatgaatggaatgaaaattattttctttctattctattttattttattacctccaaccaaacgcgctatcttaatttcaagctattaaaaaactctctcaaccgactataataaaatgttataataaatacctcagatcaagctcatcaagtattcatatcaaagctagtgagagaagctccaattataaataagagagagagaagaaaacaaagagagttattatagtgaatcacctgtcaaagattatgacaaggaatctccaccattgttgtactgatcgagatttcaacatagtgaagaagagccaagcttcctaaggctatattcacaaggatgtagtcagggtatgccctaaactttagtgagttttagaaaacaaattcttttttttggctcttatttaaaaattatgtttatttttaagaaggaaaatattttttagctccttcaactaagtggactctaggcccaagcctaacccgtcttaatttagagccggccctagatgtagcccaaaaattaaggtaaaccttgccaaaattaatatgtttgattgatctctttgggctcgtttggaacgccgtattaggtcgtattgtattgtattgtattatattgaattggattatatatcatatttttatataatactatgttaaactttaatt

SEQ ID NO: 379906 - DNA, 3242 bp, Cannabis indica
ttctgcagttcgacaccaaccataccagcttccgaccgtcctgctgatatataaattccggccaaagacgtcgtcaatcacagaacaatgccaaagcaaatgtcgtgataattacggtggtgtggtggagaatgatgaaagcaccctttaaaccttgactatttaacaaaaaaaacataacatatatactaatgatagtgattttgatacaatatataaacaaaaggaacaaaacctggtgattgaatcccattcactgaaaactggaacaaatacaatatataaaaagactatatttgataccactttttggggaaaaattgaaacttcaattttgggatcgcattggaggaggcgttcaatctcgtccgccgtgaccggagaagaatcgggataagtcattggaagcggaagagcatcatcatcatcagccagatagctttctccactacgtgaccacttcttctccttggcattcaccttaatcccgccattaaaacctcctcgcttctgcacgccgtctatggacgcacctccgtcggagccgataaaaccaattccagctccggcgatgtcggcgacgaatggatactggaccaatctcgggaacgagggggcagttggaaatctccggcgagaggtcggcatcggcgcgggagtggtcagaggagtggaaggcgattgggtcgaaaaatgaaatttgtatgtctttttctttgttttcacttttctccatggatttaattacatataattattatctattgttctcgtcgctttaattaactcagtgtcgttggctaaaaataagatcaatattttggtgctttcattgagagcaaaaagaacactgtttatcactttgatcctctccaaagatggttgtaactaccagaagttcccaaaccactaaaacaactgatcagatgactacgaatcttaatgtgcaaaatcatgttaataggagtgaactaatggtggcaaatcctgatccaagaacttgtctgcctccacaagttccaccaacagcaggataaggagtgataacccttctggctgggttcacttcgggcacataggaaattggaaccacttgtgttatctcaatttttgcccacatgacgtggcatgtctacatgggcaagatcattaccacgtgaagtataagttgtcaacaagaatgccaagtcatcgtacataacacctcaattgatgagaagtttgagtgcttaagcgggacgaagagacaaccaactggccaccctgaggggtctggccagccagccttcagctagtgaagggccacccagcctgcacctggcaggtacttggtgtgcagccttcatctgggacaacaagtcaaggtgcgatttggacttcaacaacccacaaaataggggagaaaattcagttgttctcctattgttgggggataattaacccatttaatatttattatttaattatgttacaaatacttaatatttcctattttttaaaggatagttggttattaatctcttgtaagctctcctatataaagagcatgaacctaaccctaatccttctaagtctttacgctccctaaagttctaaagctctaagtctaaaatccttactctctctttcgttctctcttacacgcccatggcttctctctcacttgagatttgcctacttgattctcatattgtaatcttaagagagccacttcagattgcacaacccttgtgatctaagtgttattatctctaggattaatataaccaaaatgggagtaggtcattacccactaactacgggggtaaaacctctataaaaatcttgtgtctcttttactttcttgttcttattgtgtacgcaaaggatgatattaggtgagtcattgtctgacgaaaccaccaaaggctcttcctcgaccacattttcccctttactctcaacaacaggtttgaggggggggggggggaacaacttcagccattgctctagctatacttattgaagtgcgagttgggtagactggaggtattgtattagattaaacgaactttctcttatccaaagaggtccgaccagaggaagacttgtcctttgtcttcttggttttctactttccaacttggacggatagagtctgtacattaaaaaattctctgatgtagccagcttggagaggtttcgagcatcattggacagcataacgatttggtgagccctcctccttaattctgaagtgaaagtaggatggtggaaaggcccaacactctagaaggatatgtgatctgccttgatgccatgagcgataaaataatctcgagcggacacaccaatcttcgtgagggttttagtgtcggtcacccacgggtaactcataagtgagaagtggaaatagccatacccgttctgaagaggatttgacttgaggttaaaaaatcagttgatgtcgtggggtgatggttcccctaactttgttgtgcgtacaatacgtacacccttatttctagtatggttcacagaacaacaaataaagaattgtaaaagtgcaaggaagaggaacttactcactgctttgctggttggctgaaacttcttagcgaaaatggtacaatcagagatgaacaaggcagattacttaagaatagttgtgcttccttactccaaaaatctttgaatggctaaaaatttcaaatgtgtgtttttgatcctatttataggactagcgaggggtataatggtaattaaattcaaagtatcagccccaccaaatggaaagtaatcattaaagagatttgtgtaactgtcagtgcgcgatccacaaggtgcagtttccaagggaaagcaactaatgcaaagatttgaaacgacagagagacatttgaacacctcaggctgggataacttcctatccatgcaagcatgtgagtataaatgcgtgtcaactagccatgaaatgtgtaagcctaggaagtcgccgtacaaccaaaagttctcatgctgactttagggaaaatgttatctcaaaattgtactaaagacatggcatcatgctagttgacatgtggcaaggaaaatcaaccttgggcataatataactctagtttctaccgaccacgggagatgatgccaaaatccaccgacacgagttcaagactccacctcatgccaagcaaagtgagctacttgcgtagcacggggttgccgaccaaaagtgtaatgaccgctttagtaatttggattag

SEQ ID NO: 379907 - DNA, 1254 bp, Cannabis indica
gtgtataaaaccgaaaacttatgatatttatattgtaaatatccttattttttattatttttcaaagataaataacaatcaaccaataatgagtgaagcccaaaaagttaggcagaaataaagtgcacaattctaagaccaaacaaaagcaccccactccgatacaaaggtaaaatcccacaattatactaaacaataacaatttgaatgtagataaatgaattattcatgctcatattcatcatatcttagcattgaaatacacatgataattagatcatataattcattttactaccattcttcattaaaacgacaataataaaaagaaaaaggaaaggagacattttggtgtactgaagagaattaaaggcttactttacttccaagtgacaattactttgatctaattaatgacctctatgattccgttttatatcatataataatagtaataataataataaaacaatctcacaaattaaactactttttgattagttagtactttggtagagagcattccttgggaagatcattttggaaccgttgattatcttggcaataatcataaatcatgtgatacttcctaacccatttgaaaagctttctttgtgtggatgttagtgagctgaacttgtctttgtgccaccaattagtagaactttctgctctacaaaaccttgcattcccattccatacacacgcatctatcttatgattcctaaacgaagccaagaatggaccttttgaccaatcaattttctccttcccacctcgagtggcccagctgtcaccattccataggctgactttgattcccattggctgccaccttggaaaccctacacccttctctgcatggtttctgtacactcttatggggacccaatccaccatgaacctatcaaaattatcatatcattattctaatcatatagatgggacggttgtgtttgaaattaaaaacgagaaagaaacaaagacttacacaatttggtgaaggttccataaaatagaataggtatggaaatctttggtgggatcaaaccagagattaatcctttcttcgcggttgtcatagccatctgcaaaaatatttgtctgaagaatatatggtttaccatccacatttccaaggaactcatagtctatctcatcacgatttggttgatcagatgtcaactgcattgcgttgcacatttatttattagtacatcattaataagtcttaggatatatatatatatatat

SEQ ID NO: 379908 - DNA, 5006 bp, Cannabis indica
tataatttaaatatatttatgaatttaacccacaaaatgttataattaagaaataaaacctaatctctcttttcgtctcaatttacccttaccttagtaaaaattttcaaacatgacatagtaagtttactaatttcattaatttagtaatcaagatgatattatcgtaggtattatgggcactatggacctatgaaattaagctcccaatatgttaatctaaaatttaacaactaaatttattaacttatcaatttctcaagactccactatagactcaaaatttcattcttattacatagaatatgttgtatatttccaacatacatataccataaattatctattattttgataagaacaatcaatgatcttctatagattgtctacatcgagtggggataaaataactgtttaaccactcaatgaattttatagattatacacattgctctttgtaatgatatatcagtaaagtaatataattactggaatgggtactctgccattaactcgtttagccaagctcaaagaaaattattgtttcacttctaaataatcatagaagctatagttgtccatatttatgattaactctcccactcaattgaactactgagttcccaatatataaatataagctagatcgacgagtaagttggtagaaataaatgaatcaaagaactcaatcaataaaattagcttaaatcttaatcatctcaagattgagatcaaattgatcaagatcaactaagtgatattggcaaagaaaatatataggagtaagtattacacccaatatttgagaaattaaaaaagtaaaccctaatactctgaccaagccttaagagagcaaagtaaggttaagacgtcctatttgagggctgttgcatatctaagaaactcatgaaacactagccaaccgttggtgtcgggacccacaccaaagggtgccaaacgtagggtttcatgggcctgtgcgaggatttttatccaagagacctcaatccgtgaaagaaactaataaggacaggactcattaaggcataagaaggccaatacttgaacataaagtgaagattgcacaaggaatccatccgaattggtttggccgactagtgccatcttttggcacaaaaagatggcacaggtcaccattctcaaagtgatgaaagagacttgttcaaatatgttccttcaacaccaagaagcgtaaaacaattgaaagaaacaattcttaagtccttttttctaagctaggcgacctgtgctatcttttttcataaggagatggcacaagttggccaaggagaacaagaaagagattcatgaccaaatgtatttttcatacatcaagacatcaaaaaaagtgagaaaattgaccaagttatgggaaaccactatggccaacgcctgccatctttaagacccaaaagatggcacatgcttcctccatcaattggccaagagaaaattggtctgaggtgttttttgaacatcaagatgattaaactaagcaagatataccatcaaaggtctcccaacagtcatgaccaatctgttccatttttggtaccaaaagatggttcaattctccatttagggttttagacatcgacatgagattttgggacaccgaaacgaagaaaatatgaatcaccattaaaaaataagtcaaaacataccacaaggtgtgaaaaagaagacatggctaacctatgcaatcttttggcacaaagacatggcacaactcttatgcaaatggcatagctcgtcttggagcagaaattcacttacctcccttcaataaaatggccataactctcttaattcttatccaaattactttgtttaaattatgttgcaagggaaatttagagacaaatctatgcttgcctcatgctcagataaaaattctgaaagtttttcgcctcaacattttgccacaagacatgttggctaactttgcttgagaatttgtactttcaactatgtgggggccacaaggaagccattttatgagttgtaccaccttcattgtggcaaggatctcccaaaaagacttgaatatgagctgcgaaaattccctattgtcacatctcgccatattcatcattgttcaaggaagagccattttgacatgtttacaacttaaagtgtaaaagggaaactacccaaacccattatagttcctataattgtgggatttttccttcatatttatttatttgtatttatttctttttatttgtaatgtaatgcaagatttttgtaagattctacgaattgtggggagtcacaacctaacactagacctatatgtacatgttgataaacctaggggaatgatccttcttttgatctctcttttggttgcaccaagaattcactatatgaattctttcaagtcaccactaacattatgaagcaaagaccctatcaatctttggagaaaagacttcatcaataactagacaccattctatatccttcaagtccttcttacagttgcccccaagaacgttggttctatcatcattattattagaattatgaattatttgtctcccttcaaccattgttcataagttttaacctagattacacctaaaaattatttttgtaatattatatacactcttgagaatattactctagtgtgtctgatgaaaataataaaatattatgctgatgtagccccactaccatcgtgatgtggagtaaactactataaatcccggcatctattttttactttcacaattttgttttgacaaatattagttcaacattgtgctcttaattttaccatcttcttagactatttgataaaaaattgcgtcaacagtttaatgctttcattaagagctctacgttgaaggattttgttgttttcattaaaaaactcattgattcttcatttccacaacaatgatgggacctagaaaatttttttacatggagataagccaagagccatgtgacaaatttcaaattatgaaattatttgatgagtgaccccaatccacgtttggtgaaccaaaactctttctgggggaacctcacccaacacagagggcaccaatccatgcaattatagaaaagttaaagaaccaaaagtgccaaagcttaaggaaattcatccttgcaaagatgacgatagggtcgaacttggtcccattgaagaacttaaagatgtcatattaaaccaagtcaaacaaaaaaatgatgctcatggcaatacgaatctgtcaaggaagggtgaacaaccacctatacccgagactgaagtacgtgccaaacacactcatgccacctatactccattgcataggtatggcccacatggcagccaaaagttgcctccaaggacaccccttagaggtatttgcgtggacaaagaataaaaaagaacaccctctaaaagagaaagagaggacgtccaatggctagtaatgccaaatacgaaccaatgaggaatcaaaaaggacccaatccacataatgttaatccttagcatgcatccaaaggtcatatagaatatcttcctaggaaacataatatgccctcccttggaataaaaacctccttataggagtttgtgccaatattgatggtccacttccgcaaaataatacaaaccatgcatgcgataataaaaaatacaccacacatggtgttcatgtccaatctccattaccaccttaccttctaagggatgtatgggtcaatgttgtggaaataagggagaatcctcatcaagaaaggaaacaacctactcaagagatgagttacccttcaaggtcacaagctaccacaatgaattcccagcagggggcatgaggaaattcttaacaatctgtcctcgaagatagtgatagcatcgattcactaaatcgttcaatgattttttatgacaatactcaaccttgattttatctagaatattccaccaatcgtcaacactataaggaagcacgaagggaagatatgtacagggggcatccataaagaaaatacccctattcaactagccctccttatgttggtaactatgccaacgttcctcgttttaaagacgccactcaaaatatttgtatccaagctaaaaatcttcacctccctgtaggaattgattaaggtataccaaatgataatcctcacatgaaaattcttgaggactaacttcaaatattcttgaacacaaaaaaaattaaaggttatgaatttgatgaaaagttggagcctttttcacctcatatcttggcattaccatatcctcaagattttgaaatgccaatgcaacaaagtatgatggaagcattggccctcgggtacacataagtaacttcaatacattgatgcaagcatatcaagtggtaggggacattaaatgaatcctatttcctgctaccatatatggagttgcatcgttatggtgaaaaaaattgaaaagacattccatcacttcgtggggcaaaccttcaagtgattttaagatacaattttatactgcaaagaccaaaaagttaaagtgctattccctggcaatgtcaaacaataaacaggcaaaagtttgaggacatactttaaatgctaaaatgctacgaccactaaggctagagatatcagtgatagtggaagacttaaggcactagaggcaggaattacatatgtatccaatttttggaatagtctacatgaaaaaacagctcgaatcattgatgagtttataataagagctaagaaatacatcaacagagaagagacaaagatagaaaataacatttctctctcatgttgagcaacagaagccgtagctcctacttgagataggaataacccctccaacacaaatgcttccaatcataccaacaaaaagaataatgacaaatgccttaaataaagctcattaatttaataagaaattgtatttttttttaatatatttcattgtatttactttaatatttataaatttatttaattaaaattactaatttaga

SEQ ID NO: 379909 - DNA, 4560 bp, Cannabis indica
tattgtataattgaaaatagcaatacatagcttaacgttagctaaatctatacaaaattgagataattcgagttgaaatattgaaatttaccataagatttttaaaaacgctgtcgttttattagcttcgtctttaagctctgcctgattcacagggatatttgaacgagatcggagccacccatggtgtcagcatcaacagtagaaccactcagccaccctcaccacgaattctcaatcgccatgaaatcatatcatctcgtctaatttgtgttgttttgaaatcttcttcgtgttcgtccagatctttttacacattagctccatggaagaagagagcaatcaaaagctggatgtagctttaaaatgttgtcacaaccccatttcagggatttggtggttcttcgccatagccgcctgcgtcaagctccttctgatcccatcataccacagcacggactttgaggtccaccgccattggctagctatcacaaattctctaccactttcgcaatggtacttagacgagaccagcccttggacactggactatccacccttcttcgcttacttcgaacgcttcttatcaatctttgctaaactcgtcgatcctcaaattgttgatctccaaaagggtttgaattataactcaaatactgtaatttattttcaaagaatcactgtgattgtatcagatttatgtcttctatatggggtttttagattgacaaagaatttagattcaaagaggcgaaaatcgatatgggtattggttatctggtccccaatgcttatgattgtagaccatttgcattttcagtataatgggtttctccttgggattctattgatttcactttcttatcttgaggagggaaatgatttgatgggtggttttgtttttgcggtcttgttatgttttaagcatctttttgctgtggctgcaccggtttacttcgtctacttgttgaggcattattgttggggagggattttgaggggttttaggcggctatcggctatggggactgtggttgtggcagtttttgtagcagcattcgggccatttgtatattatgggcaggtaattatctcttgttctaatgtttaatactttaatatctatcatttctttattttccttatgttatgaaaagtaaccatgtttatctgtagcttggtattacactgcaaaatgctttgtgtttttcctatgttgtgacttgctatgaagagtaaccatgttcctaaattggtaatacactgaaaaatgtttatattgttcgcttcgtctttatgagttaatgtaaatgcatatttgatgatttgaatcttttacatgttacaaatacatagcatgaagaagtaccaatagagatattatagttttgttctgttctatatttgcagatacaacaagtcatcagccgtatgtttccctttggtaggggactttgtcatgcatactgggcaccaaatttttgggtgctttatattatactagataaagggcttgcattcttttttagaaaactcggcttcaatattcaaacacctgcagcttctttcactggtgggcttgttggggattcttcaccttttgctgttttacctcgggtaaatttcttgtgcttaaaacctgaataaagtttacattccttttcgcttggcatgctatctcaagagaacggtaggagtaggattcaactgagtatctatgctttttttttcttttacaaagagtatctaggctttttattgctgtgaatccctcaaagtattccttttcgcttaatctgttcacaccatggggcagttttattccttttcgcttaatcatcttttaaatttatacttttcttgtattttcggtaaaatgtaatattattggacttgatgagactaagttgtctttccttcaatgtgaaatacaaacaatatctgatctgttgagacctaacttttttataattgaatttacaatggcagatcgttccactgacaactttccttatggttctccttgctttatgtccttgcctagttcaagtttggagaaatccacagccgaggaagattacaagatgggtagcctatgcttatatgtgtgggttcttgttcggttggcatgtacacgaaaaggcttcacttcattttgttattccccttgccattgtagcagtgcagagtatggatgatgcaaagcattacttcatgctatcaataggtacgttttgctgcttatcagcccatgttatctccactgttaagatgttatttttggggctttttcttgaaagttattttgctttaatgtgcatatgatttgcctacacttttgttagatgtcgtgttgcattgcaaaaccagtttcttgcttaatgtgttcttcatttcatattattgtctattacttaatcggataaaaatgcttcctaataaacaatctatttaacagtctcataacacaattactctgtattgcgtggacactgtatagctcttttacgatcgtcgcactcgtatatgatgtcttacgtatcccttatcctccttactgtaacttaattttcattttggtgctaatttcccttgtttctccactttcttacagtgtgctgctattccctcttcccacttctctatgaaggtcaggagtacccaataaaagttctattgttgctactacactccattctgatgtggttaggattttctgcactatttcaaagtggcagagctgtgaaaacttcttctcttaaaaggaaggaactaaagacgagttctagttcatcagctcagggagaagaagggtttagtattggcttgattgaaaaatgctatttgactggcattataattgttgaaatttggggtcaatttgtgcaccctttggttcttggtgacaagtttccttttatacctctgatgttaatctctatatatagcacaataggagttgtgtactcttggatttggcagttaaagtggattgtaagaagtgttggttcatagtattctcattcttaactactcaaaatttagtttttattggtgggttttttaatgtttctccatttattcaaaattatgtaattggtcaacatgaagttagaactaggtgaatagttttcacatcaacttttttgagcaataatggtcatccgctattaattggtaatcatttttttttccttaataaacactgtatgaaaaattattaagatgattccaaacaaaaacttatctttgcttttcaactcatctgaaagttgtaaaaccacaacaatagcataccaaaaccatttttttagtttaaaaacatggatttgaaaaaccaatgtgcttgctctagaaagtttatcttcactacttttgtcctaacacttttgttttgtccaactttgttatgatctgactgatgataccccacctgtattgatgtaggttatcacttttatgggaaaatttattacaatattttccttattctttttcttttttcttgtaatcaattatatccaagagtatgtggagtgtggacaatttttgaaattgattgatgtagaaaccatttaaataatactcatataatgttttggtattatatatccttgccttcaagatgatcttatccaattattatgattattacacactttattttttctttctttctattaatatgaaaatatttattcgacaacttgttgaatgattttcacttttcgtactccatgatcatgacccaacaagtcttgttaataacaacagatgttattaaaaaaaaaaaaaaaaaaattatgttaattttccaccttatatttggctacttaatatgttttttccgtcaaggtgcagtatttaattttactactaatattttgtaaatggttgtacactctaaaatacaaattagttgaacaccatcattaaaagggactcaaaccactaaaagtgaacatatttatctacattgagagagtgaaaaaaatacgggcattgcactaatattttgaaaagttgtggtaaataaattgactaaataatctttttaaatagacagtgaacttatttggtaaaatagactcgtccactttttgcctaataatttttcattgatttaatctatattgatctaacttaatattgttactctccttttttgttatgtaacaatttggatctgtgttttacgatcaaattgatcacttgagcacagtttcgatgaaacaatttttcaacaaattaatatcttaagctcagttattcaatgatactttcgaattgagatttgaaggaaaattttgaatttagtcatattgaaaattattttgattgaaattgagcaatgatatcaattttatttcattttacaattgtacatagtaccaattgtcatataacaaaaagtatacaccaattgtgtattcacttaaattcaaaagtcaaattagtatttctcaattcaaaaatggaatatattttttttttatttttaaagtagaatgtattatttcaattttcttcatgtattgatttaattttatttttattttt

SEQ ID NO: 379910 - DNA, 2052 bp, Cannabis indica
tacgtagtgaatagtgatactatatgatatgaagtccaagcttttgttcctcgattagtacacatgtattgaagtaagaagaaaagtgaggcatgataattgtgattagagaatcgtaaccaataagtgcttatattaaagctatttaatggtgtggttatatatttagaaggatgatttgtgatgctgaagggaacagttaagtgtagaaggagagagaaaagggcagagcacaatttgtgaatgagaaaagagaatagcaaaagctaattctccactcgatctaaactttatttataagctacccattacaaggaaaacaagaaaatatagttgttaagttaataaataactaactctacttgactaccttttacaaaatttctcagacttattttcaatactaacatccccctcaaacgtaaaggggttgaagttgtttgaagtttgaacttgagatagttgaaatgttagtcgagagtgactttgtgagaacattcgcaattaggtcgagagaaagaacatatcttacagagagaatttgatctctcacaaagtataggtccatttcaatatgctttgatctagcatgaaagacaaggtttgccgcaagagctatgacactttgattgtccacccaaatgacagggtagtaaggcattttgacatgaagttcattaagaagtgaggttatccacttgatttcagcaacaacattagctagagctctgaactcactttctgtactggatctagccactagatgttgcttctttgcagaccaaaaattgagatttccaccaaaaaaaaacacaacataaccacttgtagaatccctgtcatccacacaactggtagaatctgcatctaaatagctttcaagtgtcattacagcagctaatttgagtaacatgctatctaaaatggttcctttaatatacctcaatagccttttacaagcttcccgttgtatggtggttggagctttgataaactaacttaatttattgataataaaggcaacatctctgaccttgttaatgtgagatattgcagagctctgtaggtggatctgtacaaagtgggtgttaagaacaatacttaataactgtaataactgtaataacagttttctgttatgtctgttggggttcaagggtattcttgtcttttcccttttattgtttatttcctgtatataaagaatgtaatcacattgctttaatcaatgagaatcagtttattcgttttcttgttttgtttcgtttccttacatggtatcagagcaggctctgattctcattcttcatcttcttcgttaggttatgaatgacatcgtcaccaaccatgtcctctgcaacaagccagtcaacaccgtttggagctgcaacatcatcgtttgtacctgttgtcttctcacacaagctggctacaaagttggatcatgataattttcttctctggaaacctcaagttctttctgccattagaggccacaagcttcaacaatacatctcaaaaactgccattcctccaccaaaatttctctctgaaaatgatcgaattgctgaaaatgtcaatcctgccttcattgactgggatcaacaggatcaattgttattctcttggcttctctcatccatgattgaacccattctcacacgagttataaatagtgaaacctccgctgcactctggtctgttcttgaaatgtactttgcatctcatattgaagccaagatcgatcaatataccactgagttgcagaatctcaagaaaggagctctcactctcaatgaatacttactcaaggttcgttctcttattgataaactaaattttgttggtcatactacttcgaataaagaacatgttactgctatctttcgagggcttccatctcctgattatgatacatttgttatttctgtaaattctcgagctgaacccattgaagttactgctcttgaagcccttcttttggctcaagaacatcgcattgaacgtaaacacaaagatcttgattcaacctctgtgaatcttgctaatttt

SEQ ID NO: 379911 - DNA, 4349 bp, Cannabis indica
aaaagaatcagatccatggaataatcaatccaattagaataatatttttgcaatcactaagagatgaagtttttaataataataataaataaaggtatattaaaataccaaaagtaataaaattgaatgttacacatgaaagggaatcacaatatctctctatctccctcctttgtaaccccaaagtaaccagcacagttacatattatatttctaaaaaattacataaggaaaagatatttggagcaaaatcctttctaatccccaaaaatggactataagagaggataatgatataatgatgacaccctcctaaatgatttaaccaaaggagccaatgaatattaataataaaggggaaagaaaatgatggaacaagcatataacattttcagttttgacatcatagatgaaaaaaaatatgacaaatcatataattcctaaaagagacccttcttctttcttttttttttcacttctagagtatataacccagatgtgttcttacccttttctagttatgtggtaaacaataaatggtgaaaacgaatttcttcttaggaggagttttagtttctctcctccatttggtttcttcttcttgttgttacttactgtagttaccttttctccacacccaatcccgccaacaaaaatctgaaaaaaaggcattatgttatgtaccaaaacctttctgttgttgttaactacctctcagggctcttgctgaaacttttttcagttttgctgagccacgagatgatcgagctgcatttgttcaagccatgctcccagcacggcatgatcgactccctccgtttcgttggaggacgtgttattggccgaaacacctgaaattggagcctttgacttttctttcatttcggttggagattctttcactagtgattgaacccatgataggtccggttcttctccattgttccctagctcaaatgaggaggacctgcgatgcttgcctagctcatcggtgctaactgcccaatccggttttccattggaggatccccattttgaccaagaatttacaggggaaccaacagtggaagcagaattggagcccagttctcgtgagctgagactgcggaactgctgcttgtctcgctgagctaacatggaaacccgagagcccattggtgaaataggctccatatttcgtggagacatcctcccagatgagggggcaccaaatgaagactgatgcatgagagggtgatcatttttgggggagaaatttgtgttgattggagaaagcatagtctgctgctgctgaaattgattgataactgctgatttgtgagtcggtgagaaaacagccgatggcaagccttgatcagagtacctaggtgacgagctctcagccgagaagagatcatctagattcgagggtgttagtgtcttcatcctcccggaacgattcaaagaattagaactaaaagatggttgtgagagacaagataactcattaaggagttgatgttgctgctgcatatcgaaatctgacagtaaatcaaagctttctgttggaatgtctcttgcattaagggaagatctcaagcgactggactgaagattgctgcctgggagatgcaatgcaggtacatttggttggggccagccaccagaggcatgggacataccattaccagaaggcgatattggtggggtgaatggtgaaggagacatgacagacatagatgatggagagccaggtaacatgttcattgctgcagcaaaatccatggcagcagctccagaagtgcctgtgcgaggagaaggaacagcagaaccagtagagacgtacaatggtctgagttcttcaggagtatgggcaaagaagcagactctccttgcacagcttgttccatctttgcaaaggcgggttcgatactgagctgggtgtaaccagcactcaaacacgccatgagcatactcacacatgtccccacgtctgcaagctccttttcgaaattcaggacaaggaacacaactgtaatggaacttcctgggatcccttctccgtgcattttcacctggatggacaaaaggacattcagtccaatcatgagagtatgcacgagaacacggccggaccttgaatgagtacattcgaaactcgtccgttgaatagatgctgttcttgatatctggaagagacggatcaacaggatattctttcttctcggaaacaggaaaatcaataaacttagacctcgatggtgaagaattaaaatcttgacccaaaggagacccgttttctgaagatgaagaaagagtaggagaccttgaattcacagttctagttgaaactgttagagtgtgttccatagcagaaccattagtcttaaggagctcttcaagtgccaatttgacatcttgcagcttaggatgaacaactataacatcaagaggaaaatgaccattgccatcaaccaaattcggatcagcaccagctgctaaaagcagttttacaacatcaacagcatttttagccccaccagatgcagcacagtgaagtgcagtacttcgatcaagaccacagtgaaaattaacatcagcaacagacaacgaaagaatcaattggacaacgtcaatgctaccgtaagtggctgcaaccatcaaaggggttctctgttcattaaccatcacctttgagcccttttgacgaccataccagagaccaggctcatcaacactggaagggtcgcgctcaattgatcttttgaatccatcaatgtcattgttagcagctagctcaagcaaactggcaaaagtatctcggtttgaatagtcaagtgattcatggctatgttggtgactctactttcaattaaagaaataggagatggggttgaagatgatataggcttcagtttttctgatccacagcacatgcttttattggccgaaaagccagctggaatttgaaatcaaaaaagaagtattaaatcaccatttggaaagaggccaatatacatatggagtaaaaacagcttttatttctgaatgattgctcaaaatagaaacctccctagatcataatttaacagaaacaaagattcagagcatcaataagaaacaaataaaacagtcgaataaagatgatacgctatcaaatactagtttaatatacatagatatattatcgtgaactctcgaagactcaaaagaagcaaagttttccaagttttcgattaatttatacttagagccttcacttttattcaacttaacatgattttaaacaattcaaatgatttccctctttgttcgctatgttttttcaaaagaagaaaataatctaaaaaatgggtatggaacgttcaatgttatactgttatactatcacatgatcgttcggcggcgcacaatttctaggaagatcgaaaaaaaaaaaaaaaaaagttctgaatacagcgattctaggaaaagtctcagcaacctcgccccccaattcaattttttttttttttttaaaaaaaaaaagaacagaagaagacttgttgaaaatttgtcgaccataacaatagaaatggaacaaaccaaacgagatctaagaggcacaagaccaaagtagaaataacagaaggcaaaaaaagctaactctgtactttaaatatcttttttcagcaaaaacaaaattataataaaaacatacttcaatagttgatggagaagaaaacataatgatcgaaataacgatcattcacctaaaaaaaatcagaagtgaagtgctgatattaaaaatgaaaacggtaaaaaaaaacagaagaaatttttttcttttcttttttttttttttaaagtaaatgatagcgtcaacaaagtttcaatcaagagtcaaacaacaagtaaagatttcacaaatatatacttataccaataccaaagcaagagaagagtgtaaggatcagacattagtataatccaactccaagccttatcgcatacctattttaggcaaaaccaattgcgatactaatatttttatccatttaatcaaaaccaaacaaacttctcacagagaagaatcgtgtcgaagatcaaaagtagacagaaagaaaggaagcgatctaagtgttcgtatatatatggctatatatatataagtatttgtatacatatatatagtagggtttggttctgacaaaacgaatcttaccaaatcctgcagctaagaaagcgaagcagtagcaagcgccattgaggcacactgtgatagtgacggacagatctaagaggtttcaagtgttgagcggagtgtttggattccgagaaaattttctttgtttgaatgagtaagagagagaaagagaaatagagagaga

SEQ ID NO: 379912 - DNA, 3702 bp, Cannabis indica
tcttctcatttgagaggaaattgtgagaaggaaaagaaagatgggaagattacaatacttttaggttgtttggttgtatttttagttttttaattttaaaattatgttttaaaagtgagaatagaaaatagtttttgttattttaaaaatttaatggttttgggattggagttggggttcgaatatggaagttcgggtctgagtctaagattcgggagccaagtccaagtcaggatcggtctaggttctgggtgggtccgcgtattggtttggagttcgagtcagggtatgtgagcgaaatgaaaaaaaaaaatatgttacacaaaatttttaaatatttattatattttcttttacaaaatattatatatgtaaatatcttgtcgtattctctctccattttcctttttgttttttgttttttgttttttggagggattcatgttagaattagaaggagacaagagacacttatccctccatctttctctcctaccctttcaaaattccttccctccaaccgaacatagtgaaattattactctccactttctctcccttcctactctaaatccaccattgtagaagaggtttttgctcagtaatgggaggaacaactatgttggagttgtttgaagttgggccatgcaaagatgcttaccaaatgggctttctaataggccaaagatttacaaaccagattagaagcaggttggctaatgatctcattctccaaaatcaacttctcccttttgcccaatccaaacaatcacaacccttcattcaatctctctcttccaataaccaaaagagattcccaagatattgggatgagcttgtgggtttggctgaaggtagtggtgtggctgctcttgatgtaagtgacttgattctacaatcgacttttcgagtcacgtttgattttagagtgccacgttgctcggaaagctaatttcatcataatacatagactatggttggttggaattttaaaatccagttttagtaaccaatgagcttcagttcttagcataagtaaaatcaaactaaacagagctatttttaaggtgccactttgcttggaaaacttctttcatcatgatacataagttttgattggttgtgcttttaaaattgcttttgggtttctgaaactccgaaacttcaatctttagcagaagcaaaagtccagctgaacagggcctaagcaattttgtatttcttatgttgtttggttctaaaaggagcttttcatttgcagataatactgattaatttcaggaaagagattcttccatttattccaaagacagagttgagcaatgatgttcctactatggatgatatctcagctgattgttcaagtgttctagttgttagtgattccatggccattgctgctcacaatgaggatgcaaatattgctctacttgaccacacgtatagcaataaacttcattataccaacctcataagtgttcgacaaaatgccaaagtgaaatctttttgtgtttttttctgggcagatatttgattaaaggaactctttcaaatgggctatcatttcttgcttacacctatgcaggagagctcccaagttgtgcttttggggtcaacaatcttggactagtaagaacactctcttgttttgaatttgtctaagcaattctttaactccaatgttatgtgattttaacaggcatttactctgaattcggttcccccatctgaaaatgagattgaagctggagggatcgggcgaaacttcatttcacgagacctactcgaagcaacaagcatcgaggatgcattatccgttaagtgttttaacataacaacttcttgagtattcatatttgatttttgatgattctaatcatgtggtgtgcaacttcagaaaatttgttcttctgaagtctctgtgggacatagttacaatctaatcgaaacacgaacacgtaggattgtcaatgtggaaacagcttctagaaatcgagtttcgattcatgagattggcaaaacaccattctttcatgcaaacatgtatctacatcttcaagttcctcaggtaagtttaaaacaaagttaaatagattaaaatcatgaaatgaatttttgttcaattaataacaaattgaaaccattattccatgaagttacaagatgagaactcaataagcagacaaagaaaagcagctgtgttaccaaaaactacaaaagaagaaatcctagccgttcttggagattcagaggacccgaaataccccatctacatgacaggtatgtactactagagtctggacataaagctaacaactttgattccttacaacataaagttaacatctttgattgccttctcttcaggtccaacactttacacattatgcacagctgtaatagacatcgatcgacaaacgctatcgattattcaaggaaatccacacaaaaatgaagtttcacacatctttgatctgtcttcaagagatttgaagttgctataataacaaaaagcttattagcaaatttattacctttaaagattgtattcaaagaagagatgtttgtacagctcctatgcacgttcatagagccccaacatgtgcccatcaacacatctcattgccgcaacctaatcacaatcaaatcattccatcattgtttttttgttgaactctgaataacattattatgaagcaaacaagtcactgattttcctttcttccctatttatgtatttgttactacaagagtgctaccatagtaccattaacctcttatttcaatatctgtgtccaaaaatacataccgaaatatttatttttctaaattttttagttattaaaaaaattctgaatagtctacaatatcgacaacaaatgttgaaatatgaggttataattacctttccatggatttcatatttgattggaccatctaattcagctcctaatgccattaattttgttactgtactgttgatatctgttactgtgaaagataataatgaagagtactccttctgtatggcatgatcactgccagaaacataacaagtaatgaagaagtataaaacaaacacatataattacaattgggtgtaggagactttaggcataatcaaaagaaaaatgatggtttttttttcttttagacaaattatcaaacacatagagggcaatggagaaagatcatttacattggagattgcataagagcgagcttaagtggaccagattgaagctcagcccatcggagagtacagacgttgacggtgaaatcgagcccctccgagtagaatcgagctgctttgggcacgtccttgtgaagctgcattatccatctaaatgaagctgccatttttcatatgcagaaagcttcatacatatatttcttttcctgttaagatttgttactgaaatgttctgctatttctattgggccgaatttgggccaaatacaggtggcttacagttcagacaatcgactggatttgggcctgtcctatccaacccaaacactgtttatgaaaaagtattggagtatgaatttgaactttagttttatttttttattgtattttttttttatatatatatatataatcacataaaatatagtatttatctaagaagcataattcatttttgtattgtattttaaataaatgtatatatgttgctttattttttattttatttc

SEQ ID NO: 379913 - DNA, 935 bp, Cannabis indica
ttttaaaaaaaaaaaagtaatgtatgagttttgttattagataaataatataataacttaaaaacataaaataataaataaataaataagttaataagaaaccctaaaataacatctcattttctctcatcctttcttaccgcctccttctctctctctgaaaatctcttaagctctcaacggtgaatggaagatggtctgaatcaatgggttcgacggccatgaacggctgtttcttgatgtcagtgagtcatacagaggccacaaacggcctctctgctactcgaaatcccatcctccattccccatgacccaacaacatccatgttctatctctctctggcgattctcaatcagacacgaatcgacccattcaactctcagttactctatcatcggttcgcttcccccctcttcgacttctttgagatcgtcgatctcctctcctcttctattcttgttttttttttctattttacaatggagctgtgttttaggttgccgacggttgggcgtttactttgcacctagttgtgcttgcatcgtcaaggtttggggttcacaagtagctgttcttacattgtcggggttcaccggtagttggttctatcgtttagatgtaatttaggttctgtatttttcttaagtggttgggtcttagaagggggaggggttctaattcttgatgtatgtaaaaaaaatgcatttttctttgaaaagatcatgccattttgcttgattgaaaccaatttatggcagaactttgatcttaaattaaggtgtgttgcacatacttatatgtttttattttattttattcttcgggggagtgtagagaggtttgtggatgggagtgattaagtagattctatgtgttttcttatgtgccgttacttaagtccttgatatctatgtgcatgtttggcatcataact

SEQ ID NO: 379914 - DNA, 4151 bp, Cannabis indica
aagtataatgactttataatggagttcaaactaacaaaaaatatataaaaaaaaattgtgtttactaaaatcaaagaaaagattaattaagttggaaatatattacttagagtagcatgtattatatgtacattcaattgttgaataataagtcagtgttgtttggataacattgcaatttcaattgcttaatgccaatatttcaaagagatgtataatattcagtttttgtttctcagttggtctcttcctcaatagctccatcaattattatcctatactcatgattagcactgtctttgttacaaaaaaaaaaaagaccatatactaaattgtatcatttaggtccataaatgttacttttatttatttttttatttatactttgacagagtcatgaactaagtttacataacagtagaacagcataaaaattcccaagtcttggttgttttttcccatttgtttttaaatgaaaagtattactataataaacttattaacattcctaaagatgatgaaagtcaatagtcaataataataatacatcgtcataatgttgtgaagttgaatttttaatacaagtgtaaacacaagaatataatttcatctttctagtgcattgctgcctaaaccataagaagaaatagtgttagtagtgataaagacaaacacaggtaagaatattgatctaattataagtctatcctttctcatctactttgggttgttcgaccagttaaaataagatttgataagcacaacataacaaaatagtcagtcaacacggcaccaaatttgtcaaacattgcatatttttgtatgacattttcgtgtattttgtacacactattaattaattcaatatgaagatcatgttgtatatcaatggccatgaaaaaagaaaacaagtggaggaatcacatgaatcatcttattaaatttgatgagaaacacttttcatggtttcttatttcacttcattttgtgaaatataactatacattcggatattatgtacaaatgaatgtaatatacctcaaaaattgaagcgaaagaggaagaaaaaatcgctgccaaaccacaagcctaggcataaaataagttaaacttggccttttgttgttgttttttttgtttatgaaaaatagtaaaggaagaaaaggcaggcaaattttgaggctgatatgctgatcaattcagaaaatgactgaaaaacctttcacataattgcacctactagactatatagagcctcttgattcaaaaacccagttgatgatagtgagtagagtcaatttcattcagtcgaacgcaacacaagatatgctcgggcaaatcttcgggcttagttccctgtttcaaagcacaaaccagtatcatcagttatggaactcaagatgtcatgaaaaagctttaatataccttatttgacaattaagttacctgaattgtaagaccaatatccaatatacatagcttcagtctgtcttggaatgcttcgatacctttcctcgaaatgtagctgaatctatgcatatctagatcgatctccaagtagttttctccctgtaaagagagtcagtcaacaagtgttttgagtaagattatacttacatctaccattcatggtaatcaacaaatttctatatgtaattatgaaaactataccaaataaaattcgtgttgaggacgcgaaagaacaggtttttcattgtaagcattcataagcttcttctcagctgtgctcaaatgaagatcctctacatttgcaactcttcccaaaattttcaatctttccctaaagggtgcaattgtatcaacaggaaaacctcttactctttcaacttcatcattgatcattttctaaaaaggaagacaaaacataggctagtcaataaatgtgagcagaagcctaaaacagaaaactagcaaaattaggaaacaaaatgctatcttacagtgatattatctcgaaagtgagatgggagctccttcgaataaccttcggaaagcttaaagtacataacaaaggacattccttctccatcattctcgccttgaaatatcgaaactggatataatggcacctgcaaaatgtcaaataatgtacttttaacataaataaacttgttaacagttcgaatatactatactaatagataaagttaacaatgtacctgaacatttacaataagagttgaaggaacatcaccagaggcattctgagcaggaagttccacaaaccgagcaatgtgatcgatcttcctcggacacaagaaaacatcaacagcgaaaggctcaaacgcagcgcaatttggagcaaattccttctttttatccctgcaaccaaatcaggatttaatatgcaacaaaaaaagcaatcgaactgcatcattccaacaagtttttctctaatttgtactcaccttaaatagtttttccctctaactttaaaagtgcttggatcaatccgagaccaacaatcgggcattctcttctcaatagggcaattaggaactgttgaacctgctattggcctttgtcgaagaacctttggcgaaactaaacaagaaaacacaaaatatcaacattacaatcactaacttattatcaaactaagctcaattatttcccattttaaatgaaatactcacttaatgagagatcagaatgctgcccttctctccatttaaaggaaagttttgaaggcatttttttctttaaagttgaaggaccagccatctttttgttgtcaagacaaggcaaacaattatttggaagaagaccacaattatccaatggtggtgttgtcccttcttcttcatcactttcaacggtagaaaccccatcaatattttcactgtgctcctttcgattcaaaaaccctctaggcgatgaaacactcaatctcgacccattttcggacacaaaatctgcacataaatcaagatcagattttgcataattatctttctttataagaacacctcaaaatcacataccttcacggacgctatagaaatcttcatccaattcagattcattaaccgaagtacaatcaacccatgaaagatctgtacttgctctggctgttccttcattcattcaaaaaaaaaaaatcaaaacccacattcattcattcaattcccgaaatcaatacaaaaccaaaaccctctctttcttcagctcaaacccaaataacagaactaatcaaacaaaccagaaatcataatttcattaaatataaaaatcaaaccttgaaatgcaggattagagcaagatcgatccgaagacgaaacccgtctctggacagttcttcttcgccggaattttttctttttgacaaatctaaactctttccaacacacccttttggtctagaaacacaagaacccatcttccctgtgaaattctctccttaatttctctgtgaaatctttatatgcttatatataataataaatataagattccactttagtccacaaaaaactgcctccttttcttcttcttcttcgtcacacttctttgaataagtactcaataagtataagagaaaaagaagaagaaaatgtatatatattgatattttcaataatgaatattaattttatacattttcatataattattgggagacatgatatgatgagattgagaaaaaaaggtgagttggagtaattagatgcgtttatgggcttcgaaactcgccaatgtctacgttttttttttattattaaagtcaaaaatatgataacgcagttaaagcggatattttttttttacagaaccactcgtacgtgggcccacgcgctgtccaattaaaataaattagatttggccactttttctagaagccaaggagtgatattctcatccttcttattagaatttttttttagttagtttttgtgcttaaaaatacttactaaaatattttttaagttgttttcgttatagttacaatattatttctgtaaattttttaaataatttattgtgtcaaaaataaatttaaagttttttgaacatagtaaattgaaatattaagaattatattttcagtatggtaaactaattggaatattttaaaaatttatattgtaactgttaattctatttttggcatatttaattgacaaaaatat

SEQ ID NO: 379915 - DNA, 2202 bp, Cannabis indica
atttagattggcttaattctttgaaaatcttcaatgtgagaacaatgacaatgacatccatctcaagggcattaatgcacaaagtgcacggcagggctgaccagcctcagagggttgggcgaggttggagctctcatggttatattgtccaccataggccttataatcccataggccatagcttattacagagttaattacaagagaagtactctattaaatttctgtcaaatagtagaattaattaaccattggtataattccttcaacaaaaaaaacataatggtattataccctatattttacgagaataatggctaactttttcaatgatcaatatcgcagcttagagaataaataataagaagtcacttttccacttgtatacaaatcgaatcaatcaaaaaagttgaaggcccaattgagagagagaaagaaaaagagccaaaatggagtcataataatgtccccactgttcgatgaaatgttgccaaaaatgtccacgtaattaagtacatgttcatttctcatcactacatgttgtaaacacacgcccttagtgccttaccttatgcatcctggcatccctactttacaaccccatcagaataaattggcccataaaagagacaccgtcggatatatgagcaatgccaagtgtaaaggaatattctactactgctaagctatatgcatgttttaagtcactaacacacacaatcagccacactctctctacgaggcaccacgaagtagcacaccacatattgatagcaggggaccatataacagtcttttcctcttgtatataatgctcaacaacttaagctattacataaccatatcttacatcactactacttcttaccaaaacacacatttcttctctctattactttaatctctcttcctctttaagaagatggtgatgcttgttgaccttgttgactcattgtggagcaagaagcatgtaagtgactttactgctactactactgcccataacgtcagctatggatacatttcagagggatctatggatggagatgacgatgacgatgatgatactggttatgattatgctccggctgcataatctatatatatatatatatatataattatatatgtaccttgtaaactaattcagggctatcactttataagttcagagctaaaaaattttcttaggtaggacaggctacatagttggggtttaatttcttgattaatttgtacgccttaatggtttataatttatagaggtatctataatgtaattgtgtcaattagtgaagttataatgtatgcagcaagacagagatgttattgtttaagcaatgaaattaagttacgtaattataattttgtttttaggacctgttttagtcacttaggctaactacttatctgttaagcctaatcaaggctttgctatatcaagggtcctgctctcatttgtagtatcaatcttcctttacagagataaaagaaacacttttgttttcagagccatttaattcacacctatctaaatgattaaatagccgcatgagatcctaatttacatatcatcataattaattatcaattattttgttatttccaacagtggttggattctttactaaaacatcgctttagcatccacccatttcatgtttttgctttggaactaattataattttgttattgtggacatggttggatgttaattaattaaagcatgttcaagttttgtattttacgatttccctcatccagtatgctaattaagggtaaagactggaatttacaaagtaacgaaatggcgtggacgattggacattatttttgtaagagccacaaaaatgtgttaacattaaaatgttattagtaaaatgacatttgctagatttggtgaggaggatcatgataaataggccgtttgggataaacccgatagcagagccataagggtgatcttgacccaaaatggatcatgtcgattggagatagatggtgcccaacattttaataataaggcttgattacacaaagtttctagaacaatgacacctcaccaaagggtgagaaaactctaacaacaatgagaatatactctgacaaatgtaactgaaaggataaagaaaagtatattagaatatttctaattaaggaaataaaataatattattgattctgataaatgaatattttat

SEQ ID NO: 379916 - DNA, 1180 bp, Cannabis indica
tctatgctactatatctttatttctttgtgataatatagatgtgatccgaatcagtacatgaaaaagtgacttttatttttggaagaatatatgatttttttttaaccataaatctaacctgtgaaatgttacatttgtttccccctatgttatgggttcctgttttacaatgagctatattatcagaagaagaaagagattgaatctggtatttttttttttacatggacagtttaagtctagtacaatctagtatatagcagtattctaacaaactcacaagtataactagttctcaattgttataatagtccctcgctaactcatgtattggatatttctttaattagtgagaacattgagaaggaacatgcctaacatttaatgcacttttaatacttttttttttttctataataagcgttcattgataaataaaattagacatgctcattataaaataagtctttcttaatagaaggaatatacaagctgccatactgtttgtggataaatgcctacttggccacactataggcagtaaatttacaagatttgggaatacaaataaaaatgcaaccatcaaaacaattagagagtctcaaataaaaacaagaatagttctcgatttcccaacaagaagataaatgatagaggaaattaatcaccactcttgagtcgctttccacaatgatgaccttgtgccctttgatctttgccgtttcaatagctaagcaacacgcagccacctcgccacaacaagcctccgaaaactccaatatagccgtattaacccaaaccacttcaccagcggtggctatctctacttacgctgcttattttctattgcaatatagagcagctcaaacccctactaacctgatttttgtcccaccaacaaatgttccagcatcgcgggtaccatgtaagcctcctgcaaattcgggtctgaagctaaaagttgatgaaattgtcaacacggttgctcgtgttactggtaggccggaacataaaaaccgctaaaccgtgggaaccgcctaatccattagaattcgcccgtatggaaaccgcccattaaaaactcgcaaaaattggattgggttgaattttaacccgctgtttggcgggcgggtacggtttagcctaaaaacgggcgggttcaacccgacccgtaatata

SEQ ID NO: 379917 - DNA, 4938 bp, Cannabis indica
ttctttctttcttttcttacgctcacctaattatgtataaacatataacgaaaccttaaacacttacctaattatatacaaacatataactaaactattaaatttaataaaatatatacacataaacttttaatatatagaaatagtatatggtcatataatatattttgtattatgtaactttttttaagaataattaatattatatttttgaggtcaaatgtatatatgtacaatgtaaacttgtattattaaagtttaggtaagaacatatatatatatatatataaaaattaggttcaggagcgggtctgggtccaacttgaaatccggtcacccaaaaaatcaaatccaaaattcgctcgaaagttccaaagctgaacccgacttgcctgcaatgaacgtgtttcttttaatttttaggttagtcgagtcaggtccaggcgagttggccaggtccatcattctttcctgccatcatttctaaactctccatccatcctacaaaaaaaaaattagtataattaaagtatacaaaatagattttcaaatagtctatacgtgcatttaaataaaatagacacgagtccaataaattatttaaattttatttttaatataataaattatattaaattatttaagactttacaagactcaagtatcaacaatttactttgtcatataaaaaaaatacaaattaatataactatttagatgccgaaatatgaaaaggttgcattaataaacttattttaaataatgcatctcagaaatttttaattaattttaattttaacaaaacttattttatttagtttattgagttaatatcctcatctttatcctaatcttatttaaggagtgatatattgatacatttatattagtatatgtaatttatttatttaatgattcaaaattactttagattaaaaaataatttaatttaactatacaaattcttcatgcttaagaacattcataactaagtcatgaataaaaaaatcataaattaagattacacttggaaaatttgacaaacaaacttgtaatatccttaaatgaagaactttttcattgacaattaaaaagcaagtctactattaataactaaaaaaataaccgataaaaataaattaataatataaatataaatatatatatttgcttagataaatatttttttaataatgaaaatattgatagagataataaaaggaaagtataaattagatttttaccacagaactataatcttggtagagttttatctttattttttttgttttaaaaattctccccaaattatacaaatgttgtaaatatctatctctaattacattccgttaattttttaagctaaatttttttatgtgactatgagttatatatatttgcagtgcaagagcttatttaacaacattaagctatctaaaattcaatttattgacattaaatatataaatattagctctaaaaatatacataattctcataatttatcattagattgctatttatacatttattttttatctgtactcttaacttaactagattaacatttaggaaattttcttcttcgtgaaatttccaccaagcttgttctaggtttctaggtctctccaccttcctctttttctttcctttctttgcaattattgcttgtaactgccagttgatctctctcttccctctgccatgatgattatactcttgattctgaaaatccaatctcttctcgccttaattactctctcaaccttgcaattaattttgacggcacatgctttgtcgcaattaatttgggttcagggaacctatggtaaatactccatccacccatttcaccagagtctcctaccaccatttttagttctttgaggtttcagatggcaatcattgccaccgaaatgatggccagcctaatttaggggagatctgagcggacctaggattttcccactcttcaagaggcctttcatctccaggtatcttttcttatctctgtatttttgctatttaaaggtctgactttctgtctctcgcattaaaccattttccacagtcatctatctaagcttccaacctacgactatggcatcctcctcctcccagaaccccttaaacactctcaaccttacagatgaagaaaacctcatccacgtttttgaccatgtctccctcaactcttatactactacagactctcactgccttgtctttaaaaattattacctccaaatctccaaaacccaactggattgaaaaagcgatgcgtgaagcctggaccctccgtttttcagtcatcatttcggagtatcattcgggcctattcttagctacctttcagtgtgaaggagattgtcgacgggtccttgaagatcaaccctgacattttgataaatgcctcatgatctttgccaaccctgggggcctcaacactctaacacctgatcagtttcgttttgttcctttttggatccaagctcataacactcacttttggccaaaaataccccaactagcccagtttgttgctgatgagctgggagatctcatagaagtctaccctctttctttgtttgaaagttttggaccttatctcaggataagattcctacttgatgtcaccaagcgccttaggcgtggtatgaacatccgtttttcgtaagatttctaaaactaaatggctttattttaagtataagggtttgtggtatgcttgaccacccttacaacaattgtagaagatacgttatgagatgtgatcactttacagtccctcctaaactcggatacaaggatacctttcgtgcccctgttagaactctcattaagaagaacccatttgatctctccaactctaccccaattgaagagtatctgagttgtggaagcagctctgatcaagtcctacagcaagcagttgatcagtttctgaacctaggtgtagatttcatggttccaccccttaaccaagaacacacacttgtcccctctgaaattcataccacccctataggcttgaatatggtgttctctacccttccaccgcaccctatcattgtcatatccgtgatcatgcacactgacaaagggaagggcatagcccaatctaaagctccacttccactagtttctactatctcacggtccctaaatagaggtattattatacaggagcccatcatggtcaccaccactactacggctagagttaaaaggccattcacttgacaaaatgcccaagttggaaactctatcagaagtatgctcgaatgtgctagagctactcagaatgatgatgttgttgtcctaactctctctggccctgatgaaatggtaggtgttgccatgcaaccctactgaggaaaatgaatctcctaagctggaatgctcgaggcttggggagtcctcaagcattttgaaatctctccctattggtgaagcaacaccaacttattttgtgttttgtgatgggaaccaagcttctttctagccatggaatatatgttaagaatagattaggttttgataatgtttttgaagttcctaagagcggtttagggagaggtcttttacttttatggaataatattattagtgttaatattttaactttttttcttaatcatatcgactgtattattaatattaatgatgatataaaatggcatttaactggtttctacaattccccctactcagttaacaatttacttggaccctccttgaaaggatttttgatgctgctcccactttgccttggtttatttgtggagatttcaataactatctttttgctagtgatagaaacaccaccactaggccccctattcatgctatgaatggcattcactcttttttgcacaagcacaacatgttacctctcacacatattggcaacaaatatactaggaagcatggtaaccttcttgaacgcattgattaatgtgtggttaataactcctggcagtccttttttccttttgcctccatgttctgatcatagagcccttaaaatcacccttgaggatgaccttagaggacctacgaattgcaacaactttttttttttaaaaccattggctcacggataaaaatttcttcacaatggttcactcttcttagcactcctataataataataataatagaactactaccaatctttctgacctcacatccaaacaaagaaactgtattaatgacattaaaaattggagcatgtgtcagagttctctaaagtataggatctctaatactcaacatgaattagatagactgcttcaaactaataatcctagtgagagtgacatttctagagctaaagcccttcaatccactcttaaagcccttcaatccacccttgataacctcttgcacaaaacgagatctattggaaacaaagatctagagctgattggctcaagtcttgggataaaaataccaaaatctttcaccataaagccttggccaggaaaaaaataacttaaacaaaaccatcacccttgaggattgttccattgctagaggcactctttctgtcttaccccatttttttgggttatataccaggctctttgccactcaaggagaggatcaaaattccacctccaacatcttgtcaagggtctccaaccacctttcccttaggcaatctttagccttagatagtcctttcaccacagatgaaatcaagaatgccttgtttaatatttttggtgataaagcccctggttcagatggcttgaatgcctacttctaccgaaagaattggcataccttaggaaaggatctttgcaaagccatcctggatgttcttaataatcactttgatatctcccctgtcaaagaactatttggtctaaatctaaagagaagaatgcctccactttttctgactttagaccattagcctctgctccactc

SEQ ID NO: 379918 - DNA, 1360 bp, Cannabis indica
tatataatatataaaatatatatgatcagatcaaatctttttatacctaaataaatatattattccacactaaattagtaccctagcaaaaaaaaccttcccccttttattttccttaattttacttctcttttatctaaaaaacaaaaacgcacagatattatgtaataatatataaaggaaaaatatttaagttgttttttttttctttctttatatatgataaaaaagaaaatactgaaatcgatcgatctgatgaatctaaacaattttgcttgttttgtttttctttcttctctcttgggtatacctactgagcctttctctttctgggtcagtaccaaactgtccccaaatttgtgaaacacaacacaaagttggatacactcttataaacacaaccacttgttgaaaccctagaaggaaagaagaaagaaatagaaaggaatggaatagtagaaaaagagagagaaaaatatataatatatatattttttttatatgatgcttgtgatgaaatgatttctgatctttaatttcttagctttggattctctctctttatctatctatctatctatctatcactctttggtttataacctttggattatttgccaatctacattctgtatttaatatatatattaattaaagaaaaataaataaatgaggaaaagaaaaaaatgttgatgcttttttaaaatttttagggttggtattttctacttcttcctggtttcatataaaaccacttttgccattgtaagatgtttgctactctatctttgttaaagaaaattaatccacactcgcaaggttagcgcgtgcatttacttgcattccaataaaagcaagtgttttgagttttttaacgttaatgtgacaccaacggcttacaatcgagcgtgagcgtttcaagttgtcattttctggtttatgaagtatcagaaagtcgtcactaaccttaaaatggttttccacgtgtcgttttgtgtctgtgttttaataatttttctttttcagcaaaaactcagagataaaacaaattgtgagacgaaaataccctttggcatagttaattgcataaacgtgtagaggttgtagatttcatatttgtactcttgtaatgttgcactagctcagctcagcccacaatggagtaccctatagctacttttaggttaacgtatttggttagtaaattgttataaatttggtaatgaagaaaggtcaaagaataagtccttcaataaaatgttcaagaatattgacagaaaatatcacctagcttgtttttaccattttcttcttttgctatctgtaactctctctctctctctactaaaaaaaaaaaaaa

SEQ ID NO: 379919 - DNA, 2310 bp, Cannabis indica
atctataatatatagtggtatcatatttatcgtactatatatataataattatatgtatatgtagatacatcacggtaggaaaattcgtctagtgtgagtaggagtaattaatatagtaaaatttaaaatgaaaataataattcgactttataattatatgattgtcgtattattatattattcagaatactaaattttaataaagtcaaactaaaattttgtcatgaacttgtgagttgtgatatttagaagcaatgtataaatatgtatattctttcagcaataatagtaagttttttttttttttgttttaagaaaaaacaattattatattatattataatagggacataattttgtctcgtgattgtacttttacggaatgtattctgtgatgtacgacaaaattgatctagggtaattagggttaaaaatagtaacgtattcagacattcatttaatgtaccctgagactcatctaatatactacgaaaaaagtacacggcacaaaatcgtgtcccataatttatatataagtggtagtaaataaatattttaaggtaaagagtggcagtattgaaataaaacgaaaaagatagtgcttttagcctactcaacaacgttaaaaacgaaggtacgttgatgatgagaatgagaagaagctaattataagctaagctaagaaaccaattgcaggcactactatactactacttctactctcataataaatacacaatggaatcttcaacgtttgacgtcatagtcatcggcgccggggtcatgggaagctccaccgcttaccaaacctcaaagcgaggccaaaaaactctcctccttgaacaatacgacttcctccaccaccgtggctcctcccacggggagtcacgaaccatacgcgccacttatccagaagactactacactcaactcgtacttgagtcctacgcgctatgggaaaaggccgagtccgaaataggctacaaggtctacttcaaggcccaccagtttgatatgggcccatctgactgcaaaagccttagagccgtcattgccagctgtctcaaaaactccctccctcaccgggccttaaatagcaaccaagtggcccatcaattctcgggtcggattcggattcccgatgactgggtcggggtttactcggagaaaggtggggtcattaaaccatctaaggctgtttcgatgtttcaaactctagccttgaaaaacggcgccgtactgaaggacaacattgaagttagagatatcaagagggaagcaaacggcggcgttttggtcaccaccgcgactggcgaaacttttcgcggaaagaaatgcgtggtcactgttggggcctggaccaagaagttggttaaaaaagtttgcggggttgaattacccattcagcccctagagaccaccgtcagttactggcgaattaaagatggccacgtgtccgattatgcaatcggcagtggttttccttccttcgctagctacggagacccctacgtgtacggaactccgtctctggagtacccgggtctcctcaaggtcggtgtccacggcgggttcccttgtgacccggacaaaagaccgtggggacccgggatttcaattgaagccatgaaggagtggatcgggaagcggttttcggggcgggtggatccgagcggaccggtttcgacccagctgtgcatgtactctatgaccccagatgaggattttgtgttggatttcctgggtggggagtttggaaaagatgtggttttgggtggtggattttcgggtcacgggttcaagatggcacccgcagtggggagggtgttggctgatctggcgttgaccggggaaaccgagggagttgacctcaagtactttaggatagggagatttgtggagaatcctaaaggtaatgtcaaagattatgaggagcaagtcaacctttttattcgatcactcatttgaagattctcaatcacctattcaaatcaaatctgtcccaatattctctgcctttcctcttttatttattttgtttttattatttttcttgtatattatatatttatattaatatgatctactacaatatataaataaattccttcaacaaaaaaaaatatataaataaataactgtgggtggataatgatatatcatttatagtatgtaatgtagtagatcactagatcatagtagtagtagtagatagtagtagtagatagtagtagagtgttccattgcttttattattgttatcattttcattttatcttttattaagcaacaattattattattattat

SEQ ID NO: 379920 - DNA, 2056 bp, Cannabis indica
ccttaaagcttcactcttttactaagtgtcacaagtttcgttaatcattttcttgttattccctaatttaacttttctggttttggaaatgggacagcgagaatcaaggttcacgagctgaggcagaagaacaaggcagaccttttgacccagcttaaggatctcaaggccgagctcgctctccttcgagtagccaaggtcaccggtgcccccaacaagctttccaagatgtatttcttctcacttctctgcttatgtttttgttttcttttttgatactttgaactgatttgtggtttgtgttggcagtaaggtggtgaggctttctatcgctcaggtattgactgtcatatcccagaagcagaaggctgctctaagagaagtttacaagaacaagaggttcttgccactcgatctccgtaccaagaagacaagggctattcgtagaaggcttacaaagcatcaggtactatattctttccattttcttttaagtcacatgaagtgaagatgtatggttcttctgtgtttttcttgctgttttgttttgtaattcagtatgtttgtgtattgtttgttactttttaacctgtaatatttgtgctattgtatgtgtatatgctgtgatttgtaacttagattacttatggctttagccaagatgaaacaatgaaattaatcattgctatatttgataacaaaatgtctgtctgtattctagtatcattacaggttgttgtatggaatcatcctataactgttatgtatagaacctaaccaagttaaatgtcattatggtaatgcatactccatttaatttaccaatgttatttcaacatttaatttaccaatgttatttcaacatttaatttaccaatgtttctcgattttgcaatagccactaaatgtttttacatccattaggtttcactttttattgaagagacaagtattgcaatcatttaattagttttactgcatattactactgctcatgtaagctttgatgagtcatcttcatccttatttactttgcattgggttaatgtggccatttcttttaaagttaaatagtgcttgttgggttgtgtattctgtgtttgtccctttttttttttttaaaaaaaattaccaatctatcttcactttcttgatctaatattatcacaatgtgtctgttttttcatttcagttgtctttgaagactgaaagggaaaagaagagggaagtctacttccccatgaggaagtacgccatcaaggtgtagggttttattactatttaggtcatgatgtctttgaatttacagacctgtttggttaacaagttttgtcttttgttcactctttgatagcgctttgttactagacctgagtttgtcttaaattttattcagtaacttggggaggacttgtctcaagctgaaccaagttatatttcttccaaattggtagttgaatattttgtttccccaaatttttgatgaatgcgtaagatgcttcttgttatgttagaatcattgtgagcctgttttgtgttcatttttttatattttctttatcttctttggtcaactagagttgtagttttggctacaacacaacacgactatggattcaattacatgctaacctatatgatgtagtttgctccataagcttgctgtagaactggctgaaagccaaagctatagttgcagagaaaccctaggtttattctaatcactgttagcagctaattgagtgtttgtgaattaaagctgcaaatgtgttataaatgtatcattcttatgattttcccgagtacctgttaaagaaaatgctgtgtcgtcttctgaaaatcaccaagggttcacgttgaatgttttggtctaggggtgtccatccgatccaatctgtacttttttgatcaaacaacattcaatccgcactaacttagtgcggatttcatattttggatctgatcagcataacgaaattacactcaatagtcaataccctttttatattgtcctcttttatttttaccttcttttttaaaatctattatttttacc

SEQ ID NO: 379921 - DNA, 3797 bp, Cannabis indica
taataaataatgtctatatattaaataaataatattactaaaataaattaatataaggtatagaaaaataataataataataataataataataataataataataataataataataaattcaagaaagttattaagaaaacatttctaaagttttataacatatattacaaccttactacctttgattctttattactgtaatcatgtttttttgacttactaaatatattaaatgtatttattttcttataaactaaattttattaattataagaaatccaaatcttttaatttagattaaaatgagaatcattcaataataaataaataaagaattattttagataagatatccttactttaaattttaaatcaaattcaaaaataaatcaacaaacaaacagactacaaatatcaaaatttaaaaactattaatatttttttaataagaaaattttcattatataacaatattataatattaaaaaattaagattgattccatatacaataaataaaagatataagttgttttatggtaaatatcattggacctgcaacaaactatcccctaagaagatcattttcatctaatatggtggaaatggttggccttttcaactactggacttgaaactatcaataacatattactacaacaacaatagaattttaagtttcatttaaagtagttacttgagagttcaattattgcatgttttgatgttgcacgctctttaccatgctttattgaaggcaatcctagctcgcatttttttctttaattcctttaagattccattgatttttttttcacgattattgctcaagtaaccaagtatgtggttctccattggtatcttaccacatttacattgtcaactacaaatgataatataaataattaataaaaagaattcgaattaaatagcatttggaaagatttgccattgagaaagaactaataaaaatcttcatatcttgatcataaaataataatatctttaatcctagttaattttgtataaaatacaatctttgtcatactaaatttgtggattgaaaactgatcctaaaatattataagatttaacaaaatagaagattaaagaaatgaatatatacttacatgaaaaaagttataaaagcacttgctggactcttaaatttgttagagttccaggcaacctaaatatgaaagaggcctacatattccatcccaacaaaacacaatcttcatacggaacatcgagaagaattttaggttcccaagagaaggaacaacagtatactgcccaagtgagaaaaaggattgagtcaccaaaaataaaagaaaaagaaagaaagaccttcagcttacattgaacaaagaatgcaaaagaaaaagagaacgatcaatgaatcttcttgggtattctctcaacaaactattcttcctattttatcatttttcaattctacaatgatttattttttagatggttcaccttaatttttttttactatataagaaatttggtgttagagaaagtcattaccgagatgtaagaagcgaggaatcgccggcagacatgtgaccaagcactggcgatattccacaatcaagcccaagaatccttgcagccaaaacactgttgaacataaaaaaaaaaaagaagagagagaatcaaataccagaccaaaccatgtctattctaatcaacaagagggagttgattctaatgagacatttgcccctgttatcaagctagtttctgtcaaactcatccttgccttggtagccattcaaggattggttcttcaccaacttgatctcaataatgcagtccttcctagtgacctacatgaggatgtgtttatgactctacctccagggtatagtcctaagggggagttgccacctaatgctgtttgtaagctcaagaaatctctctatggccttaagcaagcctctaggtaatggttcgaaaagttttttacaattttgattgaagtaggatttcaacactcagcctcagatcactctttgttcatccaacaaaatagttcaaccatcataattattttggtatatgtggatgatgtaatcttggccagcaatgatacaacaaccttagaaaaattgaagcttaacttgaatagcagattcaagttgaaagatcttcgtgagttaaagcacttccttggcattgaaattgctaaaactaaacaaggcatttttatatcccaaagatactatgttttgcaactgttggaagacttgggacaattgggatgtaaacctggcaatacaccaatgaaagtgaatttggatctcattcgagatggagaagaaaaactggctgatccaaaactatatagaagagttacaatacttaagaatcactagacctgatttagcctacacagttaataagctaagtcagttcctagtcactcccaaagtcacacacatgaatgttgcacaaagggctcctcagtatgttaaaagttctcttggacaggggctattctatcctgttgattctaaaatcaaactcgaggcatacactgatgcagattgggcagcatgtatggataccaaaagatcaacaactggcttttgtgtgtttgttggaagatctctgatatcgtggaagagcaagaaacaacacacagtctcaagatcctcaacagaagctgagtacaaaacaatgtcaaacaccatatgtgaactggtttggctactttccttgttgcaggagataaagatttagcataggggtcctgctatactacactatgataataaagctactcaacaaattgtagccaaccccttccatgaaagaaccaaagctgacatatacaccaaagctctcttcataaccagtttcaagtctcaaaataagatgggaatttgtaatatttatactccatcttaagggggagtactaagagttgtaagctggagtgttagttaggagttagttgagagttagttaaggttgttagctagttgttagaaagtggttagcatgattttcgtgtataaatagacattgtattgctctgttttctgataatgagaatttcagtcactttgatcaatttctctcttcttcttgtttattctttcctctctcgtccctaaactaaaaataattgaactaattagacacaagagaaataaacaaatgcaacaagagttaacatggttcaaatttaatttctcgagtacatccatggagaacaaattatataggacaattaatttctcgagtacaaccatagcgggacaaatactaagccttcttctttattacctccaaaaatattgagttacaaataacaaggattacatagaagagttcttaaaccggtctctagagtagaaaaaaattatatcaactgtcatgtagaaatattaaacgctttagaagaaacttcctaaacactaataaagaaatattaaactctcatagaaaaactctcaatacaaaaggagaatcattaagtactaattaattcaaatagcttggttcatcaaatctttttttctatctcgttcccatcttgaaattgctttggtctttacatagaagccaacaccctaccggatttactataaacattcttgatactcactaacatctcgtaacatgtttaagtatttcaattacttcaccaataattacattaaattaccaagccaatgaactttctgattttatttattcatttatgttataaaataatataaaatagatgagaagaaagaagaagaagatgaagagagaaagagaaagtgaatg

SEQ ID NO: 379922 - DNA, 2066 bp, Cannabis indica
agagattttttgaaggagaattactttatatattattttaatttttttttaaatttacgtagttgggttgctccgatagtttctatgtgggtcgctatacgaatttttggtggcgagttaggttgcttagtgttagttattataagtgtttatatagtcgaaatttacgtaaaaatagacaaaaaaaaaaaaaacggttttgaaagtataaaaatagaaaaaaaaatcattttttaatcaataataaaaaaaaaataacaaagggattttagtataaaaatactccatgagctttatgtttacaaattccattgatagcaaagcaaatgtagtgatcagttgctttagttctataactataagcaaatagccactaatctttattgtttatttctttcacaaaattttttagtatttttttatctgatgtgtaaaatatttggaggtgtaggttcgaaacccagcaaatgtaattaaataatatcaaacctagaattttgttagaattttaatcacagaaaaaagttagtttggattgctaaacaacaaaaaatcaatggaggaggcatttatgctaaagtacaattggttaacaaaattatccaatccaattgctactttccaaaatttgagttgagtaccataaagtagacagagaaacaaaggagaaaaaaaaaagcattggtgatttatgattgactcaccacagaagggctgtccagagcagtggttatccatagaggtctcttgtacttctcacgacctgtaaaacttctaagtggatcctgcattttcagtcataataataataaatcatcatactatgaaataaagtcacaaataaacaaagcaacaactacatgtacaatatgattatgattatgaataaatataactgcactgaccttgtatttaacagaaacagcataggttccaagggcacggttgccttccctaagctccaaaatatcacgagccagctgtctagctgttgattcaaccaaagggctactaatacactcaaactcattgcatagctcaccaaagttcatcccatctatcatcttattaacatcatctgatttttcactggcttgatctgtggtggtggacacttcagtcctactagaatcattatttgtaactgcaacaaattattagaaccaaaaacatttacaacaacaaaaacagaaacgatccagtattggatctttgtaacagttcctgaagtgtgtataaataaataaataaataaataaaacataggttcatggcttatgtaacaatattgttactataagttactaaaatggctatttaactgtcaaagtatcacaattgcatggtaaaaaaatgaaatcatgcctctttttatctgttgcattttcactaacacatgcactctttttcttttctttcccattttctcatcagccaaacaagggggtaacaaaaatagactgagaaagaggtagcatcaaacctcggagtgaaaaactgtgtctgcaatgggatgaagcaatggaaggcttgtaagtgacactaaacttcttgtggcggataccggtggtggtggaagcagcggctgcagcagcagcaccagctttggccgtgatggcagctagagcagaggacgaaacagaggcactcatctctccccatactgctggggacaagcattggtggctactcatacaatagaattagagcctctctttcctatttttcttttgtggtttttttcactcttgtttttagataaggtgggggctacctacctacacatataacgtgtcttttcatattatgtacacttggcttaataaattatagttcctttctcaactaccctcctatcatttcacttaaaccatagaaataatttttttttactggttgtacgtagttcccaaaacacaaattacactcataatgctgcaaagtatacactgaataataagtacaaatctaaactcatattacatcacattaagcacaaggtattagaatatttctaattaaggaaataaaataatattattgattctgataaatgaataatttat

SEQ ID NO: 379923 - DNA, 3223 bp, Cannabis indica
ccatcttccatcaaaggcaatgcctttttctgcttctcctccaacataactctggaaagctcttcaggggcaagtaaatcagtgatctcctcattatacaattctaaaaaggtgacttttacactgtactccgcattctggctctcaagggtatcaaaaatctgcttaacagaccgaggaatcaccccggcctcaggaggcaattctccattaggtccactctgtggcatgacttcacaatatcagtaaagtaacaaacaactaatctttggattattcataaaaacaactatggagaaaatatatacattatacctttgctcttttgcattcaccctccattgtatatgttttgcctgtaccagtttgaccataggcgaaaatggtgcaattaaagccttccaagacttcatgtacgattggaatcacggcttgttcataaagatctttctgctgagcagaaggaccaaaaacctgaccatataattcacaaacaatgaaactgacctcaattcaaatatagtgaacattgaagttaaaacagtatgcaagtaagttaacccaaaacaacagccatcactgtgaaacatgattcactattcaattatgagcattatttataactataatctaacgtacaagtaaacaggcataaactttaacttcctaacattacatatacattaattaacatcatcttatccactgagtaccaaaccaagtagtaaaatacaaacttgaaaagttacaaacactgagaagaattcatcagaaactgaaactgtttatgttcagcataaaaataaaaccttatcgaaagtaaaaactctgtctatgtgcttccccgcaatgctctgagacacagccacttctctcatgtaatcattacaagtcaccacttgaggcgcgttgcttcgcaactcatcttcgctaaacggcctgttaaatatataaaaagcaataattaacaaaatttgaaaagaagggctcccaaaagctaatagtaaaccaaaagatatttaaatcgaacactaatgagaaaatctaaccctaaatacacagtacctgcaacgaagaaggacttgaacattaacgcccttctctttctcatggcgacctgacattttgaagtttcacggcgaaaagagagagaatcaatccgaactccaagtgaaaatgatagtagcagatctgaatccagaaatggtcgaacaagtttctctgagcctctctctcttagattcgaaacgtttcgttctcagaaatggactctattctctctctctctctcttcgtctctatctctctcctcaggtactgagtttagggagagagcgggatcgggcgtgggatttgaaattttgggagccgctctccctttaatatatatcaacggctcaattttaagtttttgaatattcgacggtgctgatgattttaatgttgtttgaactgatttacgttattacccttgtgctgtcacaggctctcggcccacgtaagatgtaaagcccaaacttatgctatggcccttagcaaaaggtcccaaatattaggggtaagttgaaaaataccacttttattaatcaattaatcaaatttacctctaattttatatttaattgaaacatacctcttttatatgtattgtacccaatatctagaagtgacaagagtaaaattggtacaatgtttaaaaaagaggataaaaataaacgataacaatataaaaatggtatagagtgtaatttctccaaatttattagcctacttttgtataagtcaattttaaaactttatagtaatataatctagggtgcttacactccattaaaatacatgtagtgatacaactcctaactatttcagtatttataaaaaaaaaaaaatagtttaaattttttcataatcgtgtatgttatagttatttaagacatcctacaaaattttgaaaaattcagaatattttacaatatagtaatcaatatttaaaccgtctattttacacccgtataaaataaaaaaatcaaacatgtaactgactctttgaacactattgttgacgtgttaaatttttctgaatttcttaaaattttaacagatgtcttaaataactataaggtgtacgactataaaaaaaattagactaagtattttaaataaaccgaaatagataaaagtacattgatacatccattttaagggggtgtatagtaaaattttccaataatttatatttctctttctctatagtatagaaaataatttatatttcagggatacataagaaatgtaaaaattggatgagaaattagaggttatggctctttaaagacatgtttgggagactatagctaaaagttgttagacataaaaacttaatggtagtcacttataaaggacaagaattagatgaatatgctttgaaacttaaaataaaatttactatataaatatgtgacttattcatagtgtattttgagtcacaattattaaattcaaacttgtaaatcgcaccgcgtggtttagcaaagatgcaaaccacaactacactgcaaagaatttcaaactgtatttttatgtgatgtggtgtagtatggtgcaggtggtttgataaacacccttactcaatatagtatttaaaaatgtctattttgggatgagctcgatgccctatcaagccttttcaagctaaaaaaaatccaaatcgttaataaaccatgattctaggttgggtatcatcgtaggtttaggttgtaggaaaagagaaaaagaaataaagaacaaacagaagtggtggtggtggatgctctatcgtttggtttagtctgagagagagatttatatatatatagagagagaagattaggttttgagttaaaaagagaataggtaaaattcataggagggctattttgcgtagagtaataatcattatcataactttttttttaagtaaaatgccaatatattgataacaaagttagaatacaagagacataattggagaaggtaattcctctcaccatgaacaattagaatccaccgaaagagcaaatttggctaacaagtgagccgcattattagcagatctataaatgtgagagatctgttccccagggaaattggatactaatagggaaatattatttaacagacaatggaaatcagaaacatgtctttgggaagcttgcaatcctttaaccactaatagagaatcagt

SEQ ID NO: 379924 - DNA, 3874 bp, Cannabis indica
attactggagctttgtgaaggttgctcattagaatcctcatttgtagatggactggtaagcttcaagttttcatcaacaggcgggagggtggtgctggagttggtagtgccaacagatgtcagctctaactcaggaccaattcctggtgagatgttggagacttgtgcattggtacttccagaagctataattgccgtgccattggaaataatagaaccagagctgcaaacatagttgtaatgtaacttatccagaccatgcaatattacacgaccatgtcatgtacaagactcaaacagataatagagagggcattttttaaaataatatagcaaccttgttactggacttccttctttatccttagcacctttttccaaaggattaacacccttttccacaccttgctggagaccattctccttccccgggcctgaaatcctgccaccaccagaatctggaaaaagaaacaaaaaggagattaatcaagacaggtgactgaacctgaacaaaagacaaacatataatctgttgaatgacaatacagtatttaagatattttcaattaattaaacttcagaagttatataaacgtatagacaactatgaatcaataaataaacacaatcagccccaaaagtcagaagaaaaggaaaaagcacacttcaacagtgatgaaatataaatagactcagtgttttaccatgtgacacattgcgagatgaaaagtttgagcgactgcccctgcccccgcgcccctgcactccaggtctccaccgtgactcagcagattctctgttgttcacattctgcaagtatacaaagaaaaatgcctgaagttctaaaaagaaataggaaaaggaaaaaaaaaacagaatccaaacttcaaataggacaatattaaaatccatacataagttaaaccacattacattataaaaacaaataaatgtggtggaatagtaagctttgtgacaaaagagaaaaaaaaggaaccctgttacaagtactccaactaattcgttcaatcaaacaccagagatactaaaataaacaatcttactttcaatcaaacaccagagatactgaaataaacaatcttacttcaaagtacaatttatttattttaaaatctgctaaataaagaaagaagcactactgggtattcagcatttaatcatatcggtaactttccagactggcaagggaaaaaaataagtatcaaattgaaaaattttaggcaggacaaggtaggaataagcctataattcaattaaattctaaaatttccaatatgggttaataaagaatatcaagtcctcagatctggcaaaaggtttctgttagaaagtaagtgtcataggtttgcatcttagaaacaaagggagtgatgaaagaaggaaaacgatctatcaaatgcaaatttaccctaggcatacgtagtaaagatgagtagctaaatggtctactgagaaaggcaacaagacaaacaccacaagttaccaatcaatatagcaccaatatatataatatatatacatataagatataacaataatgtggtggcatcttgattatgcaaggcaaatgtttcattgtctgatgtaattgcaaaagtcatcataaaatagttacctctttcttcctgtcacgtttccttttcacctcatgaaaagtgtctgaaaaaaaaggagaacgatcaaatcagatggttctgtttctcaatctttctaacttgtgcatatgaaaccaaaaaaagattgagaaaaaccagtcatccacagtcactgactccaaaagttatggattagtaatcaagtggataaacattaatcacggcttagaaattaaatttaacagcacaaaaatcagataaattattcttgtaatgctttggataaaatacccaatccaatgatgacaaataaacacagatgcaatcttacaggtaaaaaaataactcaaaagtacctgacaaaaaaaaatcaaaggtaggaggaacaatgcctacttctaaagacttctaaatatctgaccattaatatgtgatagtagagaacataatttcacttgtatgaaaaggaagcagaagtaaaataacaagatgttgaatgcaatgcttcatccaaccaataaacaagtgcttcctcaggattaacatgctatggtgttctatagattcacaggctcaaaaatagaatttgtgataaaacatatataagaaaatggtatagaagtggcaaaagggaagcttcataagtaaaattagtttctttcttaaatttctgagtaaccaaaataagaaccacacataaacaaattttacatttaaactataacattaaatacaaactcgtgtaatttaaaccgaataataacactttaaaagaaaattcttatctaacttaactcctaaacctagtaagatcaaataaagaaagtcgggagtaacataagcactttcaaagagtgacaaagcttagcttccagaaaagaatccaaatagaaagggctaacaaccataaaaatggcattctaatgtaacgctgccatttttttctgatttatatttctataaaaagaaacagtgaaacctcatcatatcacattaaaatataaccagacataatcaactagattaagacttcaacataataaaacctaaatcaaagagaccaaccaaaagcaagtaaccaaactaacaaagcccaaagcataaaatttaaagttcaatccatggatcaacagaaaatcacgaaaagcgggatcatagatcacaacccaaaaaaagaaacaaagcaatcataccctgaagaagaagcttttgggtagtctcattaggatccatggagcattctttaagcattgtatagatttcctcatcagtgtgattactcgtgatctccttaatgttctggatcgtcttcctgacactactggggattgaaaccctaaacccaccaccgctcatattggcagacccagaaagcgaaaaacagcaaggaagaggaaaaaggaacccgagtcacagacgaagatgaagagaagcctccaatggtcgaacgagcgagcgaggcgagggaagaagggagggaaggattggggttaaggtgaaactaaaccaaacatataagctaaacccaaatatataaataaagtgatgttggagaagaaatggggtatttgaaaatttgatccaagttggaagacagaccagagattaaccagaaaacaaactctagagagagaaacatagaaaggggagaagaagagggagcaaatgtgaaagtccttttttttattttaattctttttaaccataggcttctacttttttaaaaaatgaaatatataatttgggctgttaatttaaaaaataaataaataaatctaacaaattatacaaattttagtgaaaaaaaaaaagtgaattatgtttatgtttaatgcaagtgtgtgcgaagttagctcagttttgtgcatgtgttcctcgtaagcactgtcagcactacactccttttgcaaggctttttttcccactctgactctcacattctaatactttgtaaatataatatatttttatatatttatattttcaaaacaaaaaaagaacaaatttctttgtagaacttcctaccacaatacaatgcaaatacacaaaacagattaactatgctcccgctgttttgtttactttgtttattttgttttttttatcaaatttaaacttttgatatattttttttataatataagtaattattctagtaaattttttattattttttttaattttaataatataaaaaaattaatattataaaattatttaaatataataaattaatacaaaaaattaaaattatacaa

SEQ ID NO: 379925 - DNA, 9092 bp, Cannabis indica
gcctattctatatcgtaggttcgtttttcttactaaatactcctaatatatatatatatatagtaattaatagttttaatggactatattgtttgacacctatttaaagttatactgttattgatctaattaaatatttgcttttatataatttaaattaataactattataaaatatcgttaattatttataaactgctaccttaaaatgatgctaaacgttactaggccctaatagcaatactcatgactataaattatcaagtattattttgattcattattaggtatataaatagattatgcatcaccatgaaaaaatctataatgcacccttctaaaggggtgtacttatacacccttattcatttcggtattcggaataatttctaattaagtctatttttttccattgtcatatatgttatagttatttaagatatcttgtaaaattttaagaaattccagaaaaaattacacataaaaaatagggttcaaatagtctattacatgagtgattcttttattttatacatgtgtgaaatagactgtttaaacactattttatatactgtaaattgttctaaatttctcaaaactttactagacgtcttaaataactataacgtatagaactatacaaaaaattagaataaaagtttttcttaaatatcgaaacagataaaaaatgcatcaatgtgtacctcttttagatggtacattgtagaatagccatatatatttaacaatattatactaattctaaataaatatatattgaagaaataaatacataaatatatattatccatattttacggagcagtaatgtaagcatttccaaaggactatatcaggcaaaacaagcccatttattggcctaattaggttaataactcatcccataagtggagtcaagccatggctccaaattcggatgcaagtctagttaaatacataataaggttataccactctactctgtgagatactgtttggttcaaaagacaaagagtccaccacgacaaattcggtaccctcatggggtaatctagacgtaggtagtcgaagagacattcagatagttcccaaatatcaccttccaatatgcccaccaaacacagggcctggctatgacagaggtttgtcccctactttagccccgtagagtgtgttttacactaaaaacatatcacctttttttttccaataccatattctctgaaattctcggtacagacatagctgcccacaaaaccaggcatcctaaaatggtccccgctcgcatggacgattgcaatcttgtcaatatggcctcactcaattagcccaaagtcagtatattttatttttgtctccatcggtgggcctatttcgcaccttagaatcctattgggtctgagtatatccataccaagttgtagcctataaatagaacagaatcccttcatgaaaggcaatcgatcgattggaaattaatttttgggatcaagaactaaggattggggttcttcatctagggaaaaaataattttgtaataacaccttgaaggctttctacctcaataatattaactcgtggactagagttcattaacactcgaaccacgtaaaaacccttgcctcttcttctttcattcatttctttgttaagcttatttattttagaattagtgtctgaaaatgtcggttaaaaattaggtgttttcattgagatttgaggaaataattaccaaaattgtcatcgacaacgatggttgcaacccaaaaggtagtggtcaaaccacctgctcgagatggtaggaacaatgtcactgacgatggcgagaaccagctcccctaaaaaattctccggtaattgtcgtagggggcagggaaacgtcataggtgggaaaccgttcacaccaagaagaccagtatcgtatggaacaacttgttaatgatcctattgaggaggatgagttggaaggtcatggagatgaccctaaagactgccacaatgaaaactataactaggaatatgaagaagagtactatgagcaagatcctgaagtggtaagattgggataggaactcatagatactcagaaaagattgggggagtaggaagagtttcctaaaaattgcaagaagctcttgcacaactacatgctaatgcaaatctcccaacagaaaacatccttatcccatcattcaaccatcttggagctaggccatctgtcccagcaaatgataaaggaaaaggtataatgggtgcccctctgaggaaacccataagcaatgttccacggaacaactataaagcagttgaccaacctcagccgaaagaaatggacgcttaaaccccaaagccaagccaaccgatcaatagagtcgtgcataacaatgggccaagtgcttaggtacatggacccaacatttgaggatggaaaaacttccccagtgattctattaaccagagaattcatgtggaggacctcaactcggatgatagcatgacaacacggaccccaggaaacactgaatgaaaattaggaaaaaccaaagagtgagaaagtaaggcctcgtagaggtgatttaagaaacaacctaaacgatagaatctaaggatgcgagctcctatatgatcatacaagatggttagaagatcagaaaactacattaacaaaacttaaggactatatggcccagaaacaaagtggtgccatatctgactcaaaagatgaagatctagagccatgtgtaaagagaatcattgagacacagttgctagaaagtttttgaatgccacaaatagagttgcgcgtgggaaacacaaaccccagagcctacctatggaagtacaacagactaatgtaattggtgtaagtgaagatgggaaatgcttatatttctctttaacattgtccaaactcgtcaaggacttgtggaagtggttgtcgtctatatccatccgaaattggaaagatctacaatccatgttgcgggagcagtagccgcaaaggactttgatatgaggttagctcaatggccaacattaggtaataagctagggaaagcctaaatgcttatatccaacagatgattgaggcagtaggaaaaataaaagtgaatgatgacatgaaattagtggccctgtagtcaaggattgtggcaggatccctattctggaatgaaatacaaaggcaaaggtctgatactttgtcacatttcttacaatagcctaatgtttaattagtttggaagaagcatataccgaagtcttcggagtaactccgacaccatatcacagaatcagtaattctatgtttgcatgacaactcttagttatggttattgtacgtcccggaacccagtataccaatccaatcatttatggcctagttacctcaggttatgcacttctgtaaacaaatttctccagttttggaataggacatgttggatatagtttttctcccggataaacatatagacaaatcaacaaacaaaaattccagagttaggagtaagccagtcgcagaataagatgaatggaaagagtcagagctgtagggaggatacataaaaaattgaagaaaggatatgagcccaatatactgagtatattaatttgattgacactagagagaatgtctaaagagttacgtgcaattcgatttattatagaattcccccacttatgtataaggatggaaatcacaaaagggatcctaaaaggaggttcaagtaccattgtgacatcatgcacatgactattgatggtatgaaattgttaactacgtaatagccaaaacttaagatttgaacttaaaacataaaatgaagatgaaaatatcaatgtgtgttttgagcaaaatagaggggaacgtatctttttatttctttaagtctagtgttacaaaatgattttctaaaccctcttacatctaaaaatagagtatttataggttctaatggcctaggatacacttgtggtccccaagagacaaactgacgtcctggtactgcaagctactagtgtaggaggtggtcttgtgccttgtacctttatctagtgtcaggtggtcctaggttgcagaggtggttgccattgtatattcttggttgggatgtcaaggcttgcaagtgtggtgcctccactacttgtaccttctcggtaacaaaattataagaggcgtggtcgtactccattcacatgcatgcctcatccttgtgattgtgcctcaactgattttgtccttaacacttatggtggattcactaagcatggttatgtcatcgagaagagcattaccaagaagcttatggtgcatccttagccaagaggcttgcatgcatgctggctgattggcttcgtatgcatgctggctaagtggccttgcatgcaggttgacaaagttactttgcatgcatgttggtcgagtggctttgcatgcatactagtcaagtggccttgcatgcatcctaactgagtggccttgcatgcgtcctggctccacacctccagctccttgagcttgttcatcttcaaggtcaaaaatcatctcttgtgcgaatctatctacctcagccatagcaaaaacttggaaaaagaagaaaaatcaagcaattaatactgtaaaccaatagacttagtaagagtacgggagagtccttccttataactactttgagaggtccccgccggacccagaatccagaagaaagttctctaaggaacattgctccaaaataatgagattggcaacataaagatacaaaatgaaaattctaaaataaaccatccagaagtgaaagggaccaatgggagaaaatgcagtattcacaaagctaacataccaccactgcagaataaatttactaagctaagttcctctaatcgacctaataacccaccatcacgataaatatcctaagaaccaccctacacagcagagcatgcaacaaagattctaacaaatcttcgactacatagctagccacctagaatttctatttcgaaaaaaaatgactttgataaaaattaaagtacaagtttgaagttaaaaatgcttacttatggaaatgacagttgagggtacttgatatagaaatttgagccttgcttgaaagtctcgagttctctacaatagttcattgacccctgatcaaaaatcttgtgaccaaaatggctttgaaggatcaattgtgaggactggggtggcatgtctggatctattcttgatcaaatttgaagttgaatgttaagtatctcagtcatgatgcaggttattcaccaaaaaaagcattggaggttttgtctttcctagacaattttcttctcttggaaattttttaattcgatggctgaaatggagaaaattttgactagtctattttcactatatttatactaaaagtggcaatcaacatgcttttgaagcaaacagtctagatcatgtcttaaaaaacacaaagaagatccaacagttttgggatacggaaaggctacatttaatattgtatgtgggattatatttgcctataaaattccactaacataaaccactcttcatctcgcctccctagacctcatatgcttccctaaggcatgtagtgtgcatggaccaaaacccacgtgacacatgtactccgttataaggagatgaaatgattgcggacttccaccacctattgcttaaaaattccaaaagggcacacgaattaacaattccacatccataagtgcatttaggagtgtgttgcaagcctccttacctctctagccccgaagacttgggaatagatgttatccatatttttagagcagtgacgcatttataaaggactacatcagccaaagtaggcccattcttgggccaaatcaggttaataactcaagccattagcgcagtcaagctatgactctagatctaggtgcaagtccaatagcaaggctgaaccacagtggtttgggagatgctttctggtacagaagatgaagagtccaccaggactaacccagatacccttatggggttatctggacgtaggaagtcgtggagacattcaaatagttcataaatatcaccttccatgatgtccatcagacacaggaccccactatgtcaggggtttatcccctacatgaggcttggggaatgcgtgcaccacagaaagaagatcatctttttgtccaacaccatattctctgacattctcaatacggatattgttgaaaacaacatctggcctcctcaaattgtcctcgctcattatcttctgaattgagcctcactcaattggcctaaagtcaatatatattgtatttttacctcatctatgtgcctattttacaccttagaatcctactgagtctaggtatatccatacccggttgtagtactatataaatagaatatgatccttccatgcaaggggatcaataaattggaaattgatttctaggatccagaactaaggattagggttcttcatctcgggcaaaaataattgtgtatgttgatgattcattatttatgaagcattttcaggctagttttatcttcttattggtgtatgttgatgatgtcatcttgctcgataacaacttagattagttggaaatattaaaaactaggttaagcaatagattcaagctaaagaatctaggcaacttgaagtacttcttaggactagaagttgcaagatcagaggaaggagttttcatttctcaaagtccttatgcaccagagttattggaagaccttattttttaggttgcaaaccaatgaacattccaatagaagaaaatttgaagctaatgtaggatgacaaagaaaagcttgcacatcccacacttgacggaggaatagtgagaaattacagtacctaattattactgaactagatatttcttttctagtaaacaagttgagcaatttttttcatacaaggaggtcaacaataggtttctgcattttcctaggcgagttatgatttcacgaaaatgtaagaaacaacgcacatatcaaggtccttagcaaaggttgaatacagggccatggctaatacaacatatgaacttattttgttactttttattttgaaagaggtgaagattgaacataagggatcttctttgatgcattgtgacaacaagtcttcccagcacatagaagctaatctagtttttcataagagaaccaagaatattaaaattgattggcaattgattagagaaaacgctcaagaggggagtgataaaaataactcacgtctcaacaaataaatttgctaacattctcaccaaaccattgtttccaacacagttcaaagtgtttataacacacctcgagggaaagtagtaatcaaaagcttagctgtctatttgtttagctaatagttagttaaatttggcacgtttgttagttggtatggtatatgcaagttgtagaatggttagttttctgctataggttgcaattcttgtagtagctactaactaattctatatcagtgtcaatactgatgtaactcatatgcgtatgattggaatctataaaaaaaagttttccaattcaatattactctgaacacatcatttgaatttatattgaatgttatgaaaagataagaaaaaaaatagtacacaagtatagttaacattttctagttttttgtttgtttggcatgagatgcagatcactaaccataccttcacctccacaaggcctggtgaaagaattgatttagttcccaataacataacatttaaaggtggaatcattcttcaaaaggtggatggtccagtctccacaggacatctagagctgaagaacaccaacattgataagaacccatcagtgacttttaactactacaaagaacaggaggacttaaaccgatgtgttggaggtatggagaccattattggtgtcatcaattctaaagcattttccaggtttcagtatccaaacataccagttcaattatatctgaacttaatagagaaagttcctttaaatttgaggcccaaacacgttggtccttctatttccctagaacaattttgcagagacacagtgatgagcatatggcattaccatggaggttgccaagttggcaaagttgttgacaatgaatataaggttcttggtgttgatgctttgagggttattgatggttcaacttttatggcctctcctggaactaatccccaagctactgttatgatgttgggaaggtaattattctttgaactttgttataggaaactacatcactttcctaattgattactcaaatataatttagaataattaacgtatttttcgaattacgaaaactattataatttgtctcatgattattttttactattgtcgaaacgtttcttgtcatttaaaataaataaatttggcagtaataaaaatttggaggatataaaatatgatagtgttcatattttcatatttaggaggtaaaattattaattttctgatataagtctaacaaaagattaatattcaccatggctaatttatatatgataacctttacgaacaatttttgtttagttcaataatttaatatattaatagataatggttgttgcatttgcaggtacatgggaagtagaattctgcatgctagggctttcgggaataaatgatttctagcatgaatgaacccttagtatgatctattctcgattaatatttattcataatataacaattttaccaaaattaagttatggaccctactacaattatttgtttgcaacaataaaattttatgagtagatcatgctaaaatttagaagtgatgatgacatacaattttaaatcggtgatgattactgttggaatgggttgtataaacaactttttatattaattagggaaagcgctgtgtttcaaatttttgtaatcttatattataacgagtgatataatctaaaatattattattaattactataaaagaattaattataaatttgttaattttattatataattatattctattctatcattatttataatttattattttaaataattcttttagataagtatatcaaatatcacttagaagagaaa

SEQ ID NO: 379926 - DNA, 2564 bp, Cannabis indica
ctttaaaaacactatgcatatgccacttgccactgcgttagaccgaagaagaagccaagctaagctgacagagtttatcatatgactgagaaagaaaacccatatagaggttagcccataatatgacagttcgagagttgaaacgacgacgtagtggttagtactagctagtactagtcttggacttagaccttgctacttacgatcgatactgtgttttttttttaattattattattttacatattatattaacaaatcttaataaataaaatcctaaaaaatcagcctgttagaaacgctcctccatagtcgaagcaagcgtaattgaatgggtcattaatggcagtagcagtagtttgagtaaaacctcgggacttattactcacttcttcatccaaattatttatccaaagcgagtccgagcagtaatattcatcccacgctggcggagagggctccgccgccgctattaaaggtgtagaggtaagattgttgcagttatagacaccctcttcaggcaaagaaatttccttccatatatcatccatagagtaacaccctgcaacggcggcggcggcggtttgctgctcatcttcaatatggtttttggcctctgttttcatcttgtcgtgaccacgattatcataggctgaaacgacacgacccccggtgtcgtagaagctctccactccagtggtgctgtcagggaagggtaaggattccacggtcgtaatgttcgatgaggatgaagattgagatggagacgacacatcatgatcaggtggtggcgatgaagaagatgatgatgatgatgaattcgatgttgttgttgtggttgatttcttcttctcttgagcttttttcctcatatgggtcctccagtaattcttaatctcgttgtccgtacgtcccggtaatttccgagcaattctagaccatctgcgtacccattaataataaaatcatcctcacatagaaattaacaaatatatgttgggggtgtggtttcatgatcaagatcaatatataaatatgtaatatcgaacctgtttccccatttggaatgaagctctaagacaaggcgttcctcttgaggagtcatcttgccacgtttaaggccagggtgaaggtaattaacccaacgtaacctgcaactcttgcctgttctgttcaaacctacaaatataaacataacaaacaaaaacaaaaatatgcagcaaaacttggttaaaaatttgctcctttgtataatccgccatctccgaataaccatacctattttattttgtctccctccaccttcaaacctgaaacttttgctatgaaatcccatcttcgatctccgaatagtcccacaaagcagactagtttgaagtcctcttgttctgtccatggacctttcctggcttcttcttgatgaaccattttcttttctatttctcttcttttttggggtaggggtgggaagggtaaggagggggagttctttttgttatgtctctcttactaaactacctttctagtacatatggaagagctaggtgtactcgactaatatttataccactaagattggttatttgatgttactgtttgatgatcatagtataatgattttgaatcttcaccatacatgtggtgtgcgcgtggttgggtttcaaattactttttctaaagagaaaaaacaaaaatggatatgaggtcacccactataaggcaaatataatcgaagttgaagattgatatgatggtgtggctttcaatatgattacccatccttactgttatactatgcaccaatgtgtcactgtacaatttgcatagctttactataacaaaagacacagctttgttgtgactttgagtcgattttttttttaatcttttgtaaggttttcccatttgttaaataaggacccttttgttttattacagcttgtctttcactccatgacacgtgtgggtgagatcattgaaatgttatctagagactagctgtccactaataatttttttttttgatctcattccttatttaatacacaaaatttatattaaattgtagaaatttttacatcaaaaatacaatttatacaatttattacaaaaaaacccacatacggttacattatcatttttacctttcctctttcttttattacatatataccagttgcacatcaatttcatgcacagacacgtgtggcttccctatcaaccatcaatcaactttcaatcacttcccgctcttttttccttttgttttcattggatttttgatttctttttcagttttttttttttttgaaagatcaagtaacctccaaagatcaagtaacctccattgttgaagcataacttcccacaattctcaacatttttttccctctcatttttgttcttccaaaatttttcaactcccactaaagcaatcccataaccgtttccctctttccttttgtttccaatctctatttaaaatggttgtggctcgttcatcctcatctccttcccctgttcagaaaaaaaaaatccaaaaatgggattgaaatctctagcta

SEQ ID NO: 379927 - DNA, 5436 bp, Cannabis indica
cgtacgcttttcttcaaaaaaaagacatcttataaaaatttgagaaatttggaataatttacaatataaaattcaatattcaaatcgtctatttcacacacgtataaaataaaaaagtcacacgtgtaatagattttttgaaccctgttttcgatgtattaattttttctgaatttctcaaaattttgcaagatatcttaaataactacaacatatataaatgtatcccactaaaatgagtgcattggtaatttggtacaacccctaactgtttcggcatctagaagaactttttagtccaatttttttatatcgtttacgttatagttatttaatacatcgtgcaaaattttgagaagttcagaataatttacaatatagaattcaatatccaaactatctatttcttaagtatataaaataaaaaagtcacacgtgcaatatattttttgtaccctatttttaggtgttaaatttttttaaatttcttaaaattttaccaaatatcttaaataactacaacatatatgattataagataaataaaaactcaatttttaatctagataccaaaataaataaaagtgtatcggtatacctttgaggagtgcattctaaatttttctatggagtatatattaaatgagtttgttttagaggctataatttgcttgaatgattaccatttcaggtcatttcacgttggataccactttagctaagcaccatcaatttagagaaatcataacaagtaccttgaatttgaaaataatacatattatctcactttttttttttgttgtattaataacacttatgactatgagtctatctaataaccccacataatagcattttccaccttgtgcttctagtctctctctctctctctttctcattcccattctcaaatgcagtgttattttgagtggtttttcagttttggtcacaaagtttggatctttatttagtggttctagatctgaaaaacagtgtcaattttgctggtgagtgttatgttaataaaagcttaataacctttgtttttcgcttccaatgattttttaacccaatttaaaattagtttattgaacaaaaacaaacagtaaagaacaaaaagaagctcatgacactgtgcttttctttttttcgattttaacttaataaaaaaatgccctttttgactatataacaattaaaaacccaatattcaaaggctcccctgcaaaccaagctcaaatttttatgtcatttttcttattttttctcagagtcttctctctgctttcctcgacatttatcttggaatcttaaagattatttctttttctttttcagttttaaaaatctcatctttattattacccacctgctatttttgtttcagctaagaagggtcatgaagagttagaagaagaagaagtgggttgtttgtttttctcaaatggagggtttaagcttaatctcttgttgtttttttcttctgggttttcttttcttgttaggaaaagctgacccttttgaagataaacaagctttacttgattttgcaaaccaacttcctcattctcgttctcttaattggaatgaaacctctccagtttgtgaccattggactggtgtgttatgtaatgatgacaagactagagttgtagccgttagattacctggagttggatttgacggtcagattccacccaatacactcagtcgtctttcaggtcttcagattttgagtcttagatctaatcgtttaaatgggcatttcccttctgatttcactaatctaaaaaacttgtcttttctttaccttcagttcaacaatttctctgggtcattaccattggatttctcagtttggaaaaacctcacaattattaacctttcacataatggtttcaatggcagtatcccaaactctctctcaaatttaactcagttggctagtttaaatctagctaacaactcactttctggggttattcctaatctcaatcttcctaaacttcaacagttgaatttgtcaaacaataacttgaatggtactttgcctaaatcacttgaaaagtttccaaagtctgttttcattggtaacaacatttcattcccaagctccaccccacctaagatttcacctgttattacaccatctttagtaccattttctaagtccaaaagtagtggtaagaaactaggtgaaacagcattgttgggaattatagtagctggtggtgttttggggcttgtggcttttgcttttctaatacttgttttcttctcaaggaggaagaagaaaagagatgaagaagatgggatttctggtgggaaattgaataagggaaatatgtctcctgagaaagtgatttcaaggagtcaagatgctaataacagattggttttctttgagggttgtaattatgcatttgatttggaagatttgttgagagcttctgctgaagtacttggtaaagggacttttggtactgcttatagagcaatactagaagatgcagctacaatagttgtgaagagattgaaggatgtgaatgttgggaagcgcgaattcgagcaacagatggagcttgttgggagtattaggcatgaaaatgttgttgagcttaaggcttattattattctaaagaagaaaagctcatgctttatgagtattttactcagggaagcctctctgctattttacatggtatgtgttttgtctttcatttctctaaaattgcataatctgtttttgtggttatgaatagcaattcattgctttgtatgagtttgttatgaaatatatagatataggtatagaattttgtgtaattatgaattcataatctgagatttggactaggacaaggattgctttagggtgtgtttggaagttaggatgtaattactctgatgatatttacatatgaattcataatgttttgtccagcaaaatagttagtaattacaacgaaaataataatatttagaatagaaagtttaattacctaattatcgtccgaggcataagaactagagagtataattgaaacctctcaattatcttcaattacataatttctgtgtaattacacggtcaaacaaacatgcaactacatatcataactttctaaacgcttcctaaaagaaacagtggaaaaggcaagtagtaattcataaacatatacaaaccattaaggcttttcttccttcagatttagataagtgttcaagttgtgtttatctgaataaattttagcttgtgatgtgcttagacatatgatactttgtgtttgttcaggtaaaagaggtgaagatagagttcctttagactgggatactcggcttagaatcgctatcggtgctgcaagaggcattgcacgtatacacgcagaaaatggtgggaagcttgttcatggaaacatcaaagcctcaaacatttttctcaatacgcgacagtatggttgtgtttcagatgctggtttagcgagcataatgagttcattagcgccaccaatttctcgtgctgctggttaccgagcaccagaagtaactgacactagaaaagcatcacaatcttctgatgtctacagctttggtgtagttttgctagagattctcactggtaaatcgccaatccatactactgctggtgatgagattattcacttggttaggtgggttcattcagttgtccgagaggaatggactgatgaagtgtttgatatcgagctaatgaggtacccgaacatagaggaagaaatggttgaaatgttacaaattgccatgtcttgtgttgtaaggatgcccgatcaacgccccaaaattggtgatgttgttaagatggtagaaaatgtgcgacggcttgataacgaaagccaaacgcatgttggaaacaatgctgaaagcccgaaaccagagccaagagctggcacagacactgagtaggcatttttttttgcctatttttactatttttttttaacaccatctggtgaaatatcatacttcattttgcctcaaaatgttgttattctccagtaaatgcactaaagtttagttttttttttaccaacatggtccccatttagatagagttgagtcaggtaaatctattggtacatcaggttgctctgagttaaaggtctctttttttctctgtaatttaatgtgttttttgtgttcattactttctctgaaaatgtgggaaaaattccatttgaatgaaaggaagaaattggagggaaatttttgaaccaaaacaaagttgttttcttgctttattttcttattttaaatgagatttttgaaacataagaaaaagaaaagtgcattagtttctggtgagagctttgagagttaggaataaaactactctttttcaaaagctttatcttatattccatttggggtttaaattaaaatgagcatacaaaagaagaaagaaaagtagtaatataatccaaatgttacaccaaattccttgatagagaatttgaatttggtaaattataataaaaacttttggataagtttatagtaaatctcttaaagggatatttcggtaaacctttatttgttttggtatttaagagaattttttagtttaaatttttttttatgatgtagctatttaagactacctgtaaattttcattttttattaaataatttatagtgacaaaaataaaatttacatatattattacatatgcgattatttatcttattatatgcgtaataagtaactgtttaaatcttatttcagcattgtaaactattttaaattatttaaaaaatttacaagtaatcttaaatatttataacgtatgcgattataaaaaaataaaaattaaactaaaaatctcttaaatatcgaaacacgtaatacataaataatttgtcaaaacgtctttttaataggttctactaacatacatttgcaaaactttttgacctttgaaggttctactctacaagtatatttccttttttctacttttgaatatggaaaaaggaatgatgtttgcaaaaatatcattccacccactatgacctttcaactttgtcatgctaataatagtataagatttgtttattttgatggaatatattagaagatgattattctttatagaaaaagttctaaatgagagcatgttggataataagacagggtgatatgagaaccaaccatgtgcttaattttcaactcatacagttataagaagcaatcatcatttaaatatttaagtggaacacatggatgaacttaactatttatgtcctcaatatctttgtaaaataaaatatgcttattatttttctttttcatagtttgataaatatgataaacttatagcatcttcaatagaggactacaaaagtaatggatgcattgctatatttttagcttattctataaatatgactttaataat

SEQ ID NO: 379928 - DNA, 2947 bp, Cannabis indica
tgtggaaagacacaacacacataatacaaatataggtaaaaagaaatagacaaaaaagaggaccatttcatgaaaccattattagcataccttgctagtatcctgaaaagaattaactccaggcaatctgtcctcatcaggaacaaaaacctttttcaagagaatatctccattctgaaccattcgcagacctattttattttctattttggtagctgttaatccaggggcattcttgtttacaataaatctgaagcagagagaacaagtatttaacaatcagctctattaaactcattcaaatcttgcaacaaaactaaaacttaccaaatacagtttgaatacatatacgaaattaaatagcctcaattgactctgcaaaaatcaatccttcaaaggctaacattcttgtgctcaagttatctgaaaatctgaagtccacactcatgaggaatgataatagcgaagtgtggtttgttgggtcatcgccatatcatcccccaccacaaccaaagtgcaaatgtctgtgtctaatagataggtgtgcgtgtcatcgcccaccacaaccaaagtgcaaatgtgtgtgtctaataaatatgtctgtgtcatcggccaccacaaccgaagtgcaaatgtgtgtctaataggtatttggtgccacacaataatcgtaaatgtatgttcaaaattacagtataaaaaggagaaactacgcagctatgttgctcttgtctttaataatctttgtagcttttagcttgaattttcattgtaagactgacttataatacagctatattccaattggacaacaaataaattccatttgtatgttccaaatatataatcaatattgataacaaatatgatgcccacaccagaaaaacaacaagacacttgcaagaagaaaagaatctatgcaacgtttaagcatctcataaatttctgagaaaattaaaagctggcatgtactattcttacgacaacttcaactcatagaaagaagaaccagcataactttgttctacgtacccatttatctgatttgttgttgtgtttcgagcaaaaataatcaacacatcagcaaaagtactgtttcctatccaacgcttttgaccttcaagaacccaacctccttcaacctatttatttcaaccgaaagcaagaatatcataataaataagctacaaattgttgaataaggatagctatgataaagacacactctgcccccctcaactccttttctctccaaaaactaaacattaaggcaaacaaacaaaaaacacaaaaaagaaatataaaagttgagttcacagaccttagttgcagtagttgctaaagaacttgcatcacttccatagccaggttcggtcaaagccttgacattcgaaaagagaaaacaattagtacatccatttaggtctttgtacaaaaacataaatcaaacaagctagcaggaaaggtcatctcacccaacaagctacagtttttagttgggccaaagaaggtaaatatttctccctttgcgcctcagatccacacaagcctataattgacaatgaaagaaggttcaatgcgagttacaccttatcaaaagcacaatatattcacacctcaatgactaccatgtaaataaaagtacacggtggttagaaatctgaccaatggtgagcattgcaagtgaagaatggacaaggacaaaagttgaacaactagcatcaactctagcaatctctgcagtagcaatggcatttgcagtaagagaaagaccaggacaaccataacccttaattgtgccaccagtaacacgcagggcacccagatttggaataatttggaatggaaactctgccttctcccagtactgatgaaacaacaatataacccatatttttcacctagttaataaatgcatatagaattgtcatgtacagttgcattagctaaaaattacctctgccattattggtgctacatctttttccatgcactctcgaactttcatcctcacagatttttcctcatgagtcaaaagatcatcaaagatataataatctgaagctgaaattatggccaattcataaacaaacataaaagtcagtcacctccataaaaaattgaaaaataattttgcaacaacaacagaaaaacttaaatgaaaaaataaaactcagttgagcaaatttaagatgaaggaaaaaaaaacttactacatggaggaaaaacagaagctggagttgcttggggaaaagcgattgagacatccagagctggtaaattaaaataagaggtccttgcgttctcatcagtatcatctgtaaaccatcaataacgattaaaatgaacataaaaaatcaatttcaatgccaaattcatatatagaccacaaacgaatcaaatctaaaccaaatccaaagaaaaacactgaaattaccattgcaattggtatcaatattcagaaaatatatatgtatatgtatataatatataaaataaaacattgaaaaatcctcatataaaaaaaagaatgaaacacagtctaggcttagaggaaaatacctttattcgaagccgaacgaacagtcatggtggccggagaggaaaatgaagtagaaattgtagcagagaggaaaaaagaaaacaaaagaaaatgatcagagaaagaaaagaagctaacggcaatggcagatatatatacatatatatatagacacgttggcacgcaaatctatatagactaatattgtttataatggcttgggtaagctaaggacatcgtacacgacatcatcttatttctcctcttcttcgaatccatcctttcttttttttcccttctttttgatccaaatatagacagtttgtaattaattgggaaactatttatttatttctcatttttttaataaaaaacaattttttcttttgataattacataacaca

SEQ ID NO: 379929 - DNA, 1743 bp, Cannabis indica
tattagaaaataggaattaagaaaaaaaaaaaaagaaaaagaaagaaaagaatctataaggacaaagaaaatttaaacaattttttttttaatttttatttttgagttattttgtagtatttaaataatataaatgatgtggattaataaaaatatgtgactgacagtgaataatcttttgatgtattttcaaataggatatcttcgtggcagctacagatactatcacaacatccgtagaatgggcaatgacagaaattatgaggaatccaaacgttttgaataaagtaaatgaagaactaaagcaagttgtgggattgaacaacaccctagaagagtctcatttgtccaaactaacatacttgaatgcagtttataaggagacattacgaatacatccacctgggccttttttaatacctcgttcttcaagccaatctactattgttggtggttatactatacccaaagggactgcaatttttctcaatgtatggtctatacaaagagatcctagtgtatgggaaaatcctttggaatttctccctgaaaggttcttgatgagtggtattaatggatcaaacaataatgggggtaataataatgaatataacttttcaggtaacacttttgattatattccatttggaacaggaagaagaatatgtccgggagcttctttaggggagaggatgtcgctcattatattggcttctttcttgcactactttcattggaaattacctaatgatactgagcttgaactatctgacaagtttgggcttgctcttaagaaaagagtccctttaatagctattcctacacccaaatattctgatttagagctatacactactatttctaattaaatcttatgtattatatatataaagagatgcaaaatattagtaagcatatggttccgtacggagcatgagtatgtcgaccacaataaaatgtatcgtacttaataaataaaaaatgacgaaagattcaataaatctttatctgtttgtgcaccacctaagcactttttgtttcaaacactttcttttaatgcaaaatagcctccaacacctactagtgtatatatcatcaacaatatatattgtggcgtaactattaatctgtcagcataaaaacttgttataatacttatttgcatcaatttacatacaaagcgtcacaagatgggatgcatttttttttccttttcatcagatggttgcattagttatgctggcactaacctttgtctgatagagaagaaaagttggaagaaagagaaaaaaggaagagaaaagtgaaaagaagagatagaagtgagttgtttggtaaaagaaaatatggcatgggacctatccattttttctttttttgagaaatttacatcagagtgtattggaaatagagttataggagggtgcatgtctgttggaagtgcagaatttaagttccaagttatatgtatatattgtgtaatatataaacgcttaaataaaaaaaatgaatgaattggaaagagaactaacaattgtattgaatgaattgaaattagttataacaatgtgtaattagctacttatagtagctgggattacaaataaactaatttactaacaactgggacaactcattactacataactaatatcctaactaactttttaactaactattcaattcaaataaaccaacactacaacaataatggtttataccaacgccactattaccaacgcc

SEQ ID NO: 379930 - DNA, 3711 bp, Cannabis indica
cttctcaaaccaaaacatatatataaaccaacaaacaagacaatattacgagtacacattaataaacataataataaaactaaaaatggtagctgtagctctctctagcttattaattagccagttccaccaagaacaccctttagctttttaatctgagcaacgtctaagaaagtagtggctgccaccaactcggtgggaagatcgttcttgaacaaagcaaaatcagtgatttgaagacccgggttcggactattgaacccaacaatgaacaatgcttcaccttttcctgaattgagttggaaatgaagaagcccttgtgggaaaaccatcacatcacctttgttaaggtcttgaaaaacacttggttcgctgagcttgacacgaaaccggcacaaagtgttccttctagcacaattaggatctccgagccaccggggtgcgtgtggaacgggataacaccgccaggggccaagtcagcacgtgccatagagattccaaggccatttacacctgggaactgggcgtcaaaggcgggagttaccgcggccttgatgatgttagtggtgtttcccttgacacccaggccatggtagacgaaatcgtctaccgtaaccttggtcttgcaagagtatcctgcagggctttggggacctttgaggtctcctacgcaaaagtcttgaacggctcccaaagaagaggagaaaaggagagaaagtgtgaagaagacgagaacactgttagtagtattcattttcactactattgtttttttattttttttgagagtgattttgatagggaatttggtagtgttatatataggtggggtgatataaaatatctagataatatttattaccgttgtgtgattagtatttggaatatatatgctcatgcatggagagagtcacatgtgtggcaatatattttgaacgttaaatttatatttaaaaccatattgagatgatgagataagattcataagaatgctacatagatatttgtttgccatgcatgtgagtaatgggatatcgttttctcatataccaacaataactctttttttcttttttttcttgcaaggaacaataacactcttttttggtctcaatatgaattttgaaacgctcgatccatcccaacttttaggtgttgtctattttataacagaaaagtttctttaaccttataataaccttaattactttagatatttttgtaaggtatactttttcaaagtaaaaactaaacctagctagctagggcaaccattccaaattatatatacttaattgagtattgttacctctgcatatattttaaagaaatattcaacttcctatgaactctaatatataatactgatttttttcttactgtttcgcgagtatagttaatttaatttaggtatacaaaatcatggtatgattagaaccatcaatatataagtctgtagatagtagccaaatggccaggattaacacaaaaaattcaattatactaaaggaaaaaagaagtttcactaaatacatagagaaaaagagagcgtacaaaaatgttaaagaggatatattttgtggaccatgatgatcacatgggccgggaaggtagatttgaggtcacaacaagacacaaaagacagctcaaaattagccgtagtctaaggtgaacttcgtcttatattatatgctcgagagatatcttctttttgaagattagccataaaattgtgtggacgtctccaattccccattttctagggttgtctatctctttggcccaagctatacaataaaaattaaagtagttttttttttctttttatctactgggtttcaactatattatcttctacaataatttatataacccccaaattatagttgatattaaggtattttttttaatatagagatgaatatcattcaacatggaaaaaataagttcttaaaaggtttggcaaagaaaaatccgcacaaatctcataaagagatgaccaaacaacgacactctacgacaatactctaggagaggggaaatacctacaaaaatggcctaaagccaatgtcacaataaacaaggtgataaacaccaaaattacaccaaaaaaagatttaataccttgtaaagttatatagatatttagatttttgtcatttggaaaatactattagtttgtacaaaaatatttagagtaatgaaacatacttaattcattaaaaaaaacaccaaaattacaacttaagataagaaaactaatataaaaacaaaaaaacaacataaacctgcacaatgtgttgaagttcctacccatggatgaaaaacaaccaagtagaatagagagagaaaggaagaagaagaaagaaagacaaagattattgaaaaaagagtctcattaattaataatgatgtgtgttacagcttatatactagctcattataagagatttaataacataatccataacaaactaacacgagctaatagacacgtgcttaactaactctaacaaccctctaactatattaatagttttcaacacctcccctcaaactcataattgaacgatcttcaattttgagtttgtgcctaaattcagcaaatctttgacttgatatatatagatttagttaatccatatgctaattgttcataggaagagaggtgtttaatatgaatagttttattaagcaccttttctctgaagtacaggacgagctttatgtgttttgttctttggtgaagcacatgattctcagtgagcattatggtacttagattatcacaccatagagtacgaggttgagagagttgtatttgaagttcagagaacagatattgcaaccaagtcagttcagctgtaacactgatagcactcctatattcaacttcaatgcttgatcgagaaatggtctattactttttacattttcaagcatttaaattcaagccaagaaagatagcaaaacttgtagttgaccttctatcatctgaatccgatgcccaatctgcatcacagtaggctataagatcaagagtggctagtttttacagatgcagcccatactttgttgtaccactgatgtagcgaagtatttgtttaacagatccaatgtagacaaaggtttttgcataaattggaaaactttatttacactgaaggaaagttcccttgtgatggtctcatattgcaaggctccaataactgacctatacagttgaacatcttccaatggttccccctagtaagttaataaacgaatattacttgtcattagagtgggtgtaggcttggcattactcatttgggcctttacaagtagatctttagcatacatggctgcatcagtttgtgtcacttcaataccaaggaagcatctgagagagcctagatctttcagagcaaactgtctatttagagttgtgatatagcttccattgtagtgtgaccacttcctgtgatcaatatatcatcaacatagactaatataagtgtaacattggaaatatgttgaataaacagtgagtgaccagatttagatgaagtgaaaccaagagacaacatacagttttgaagcttctcaaaccaagctctaggggcttgtttaaggccatagagagcattgtttaatttgcatactaggtctattttttaaggatctcaaatcctgaggttgcaccatgtacaccttgttggaaattatttt

SEQ ID NO: 379931 - DNA, 3265 bp, Cannabis indica
ttttttcatttccaggttgcccagacccttttatcaaaaaaccttcaaaaaccttgaatgagggattagaaccgagaactatacagacaatagcatttttccacattgatgattccatctcaacatcttccaggtttaggcgagcaacagtttggtcacctatctttaaaggttcagtatattccaatcgagtagagagagtgagtacctgattaggtttgaaattactccaaatatcttaggctgtgttttgaaagtcaagtttctgcattttctctacctagctgtctgtaactggagaatgacggtgaccaaaatcaatcccaattcgcgcactagaaaagtcgatctgaacttgttctcctcgggatttggctgaaccatctcgcaatttcatctctctagattccatttctatctcaacacatggatcattaaattcctccagctaagacggttcaagaatttcttccactatcttcatttaaaactgctcatcttggatcaaagggagatcctccaccaccttcttcttgtcagagatcgatgccggcttcaaagttatcttcctctttcaaaccatgagaagagagagaaaaaaaatcacacgcctgtatattgtataaataatgatttataacaaaataaataaataaaaaaggctaactcgaatgtgttttagtcagataggtatatatacatatatatatttaacgtatcatgactttgaaacaattcgtgatcacatataacaaacattattataccttgtttagaggctcatgctaataacatattataaaatattataatttagagaaaaaatagagaagagatgagaattttcttagtgttttattccaacgagtgatctcctatttatacacatataagagtcaaatattgagaaactaagaaaaaaagaatattgattacaattaatggttataactaaaagatttagacatcgatataattattaatatttataatattttataggttgttatgctatttttatatttttttaatgactttttttttatatactttaaagtagttttttatatatatatattttagagaaatctacaaagcaattcacatagtaattaatgaagtaacataaatcacaatcaaaattcacgtagcaacaacaacaacctaaactgtaaatttgacaaaaaaaattagaaaaatgatatatgaggtaattctcttttttttttttttgcagaaaaatatttcctacaaaaaattcaaaatttatatataaaatgtgattatttaacaacaattgttggtttaacatttttttttcatgtttatatatgtatacaaaatttcaaaagaattaaacagaagcttaactatgataactatctcatcctaaaaataataatttaagcaaaaataacaacgtattttatataattccaagtcttcaatataaccgatataaccgctcaaattttaaagaccacacacgatataattctcaatcttaaatatgcatctcaaatcttcaagaccacacaagatgagcagtgattttcataattatattattggtcaattggtccgatttgagcagtcaattgaatttgattggtccaattcttaattttgaatctgtttaataagtttttcataaaacgaacatatttagagcttaaagaaataagaaataatacgaagcaataaaacgtggttcaggcgttaatgatctttagtctatgagtcaattggattggcctctttggacaagtatttagagattaaaaaatggttagagtagggattactctatttctttcactcctcttgaaagagagaaagagagctttcttaaatttttttgcagagtgtctgtaagtaaaattgttccgcctcctctttaaagaaaaaatgggagtatttataggcgcatatggggtaaagagcataccctttacctacctagggtttcgtactccacacgccacaaaggccagtactgctaaaggacgatttgaccatttgctggtaagaaccttctgtactgtgcaacataaaactgtttgtgcgagtttttgtatgaactaggacacgcgtcacacaaaggtatctcctttgcaaaaatactctttaaccaggtcgttgggcaaaatgcatatttgagggtgtgtacgtgcacaaccatggcctggaacgggatacaaaatttgatcctttgttagaaaaaggtgtaatcgcctatggagtgactttttgcatggcgttgacgtggccaacgtctacgaaacctttatcgcaccctgggtccttcactaaaggaagttactcctaggagccatcatctcccattacctcctagatccatggggtgctctttttcttgataattttgacctattctcatcgctactgtattcttccctccgaccgtgccacgtgccttattcgcaaaaacttggataacatttgtccccaagctttcttgattctttggatcacaggagcttgctatctttgtcggagtgaccattagcatgtcctgaggatttaggttgcggatacacccctacatgagttgtattcttttgagggtactcaagacatttacttctttttgcatgctaatcacacgacatttcaagaagtcttgcttgccctttttcacgtgtggcaaggtgcattcaaacaaaaaaggtggagtgcaattggtggctaaatgacgtgcataaaatcaccttgacatttttgtgggccctaggccgatcatacgagacttctcatgtccctagccattggatctattgcaagcatttgaattgttgatcttttatatgcctattttctttttgaaatacaaactaactttggtggcattctttttactttctttacctagagctccatactttcactacaacctttcttccttttctagacatcctctgcaagtaaggagcgttagagggtttggtctagctattgcttgtcatccgcgtggaactttttctagacatcacaccccttcgattggacaagcaaagttcttcattaggagaagcatttaattttcagtttgattgcaaccgctgcattgactagctttggagctttcaagtaggctttcttgacacatcactcatccctctagaactaacaagtaagtgcattaaccctgtaagcccaagttcttgtctaacctatctttttcatatttagattgattttatcttgatttaagcttgaatataaaaagaacaaaatcaaagat

SEQ ID NO: 379932 - DNA, 4902 bp, Cannabis indica
taacacataatttacattaatattagaagtataatagagacattatctataaaagttggtatatcttacagaatataaaaataaagaataaaaattaaaacaaataaagttaaataagtatacaatataatttcatcaattatttttattttatattcaataacaatttttgactattgtgagacatgggttgattttttttttcttttctaaaaatatattatttttacactccattttttatactgaacactatacatataattacaagtgttcacgaattagtttgtttcgaattttcaatttttttaaaaataaaccagtattatagttttttaaaaattcaaaatttaatcagatcaattaaatgatcaaaccaaaccaaacgaatcaacttaagaacgaattaatttggttcaaactataatttgtatttctaattgttttttttttatagtaattgtaatctttttagtaattctttcacttttaataaatttataatacataaataacaataataaaaaaatattctcattacaatagtaaattaatattaatattctacctaaatttattttcaaattccaacattccgtcaagaaaaaaatatattaagtatataaaataattatatagattgatttagtttgaactgctatcgagaatttttaaacaatgacagaatcagagaattataaacagtctgaattagctaaattattgatactgaatttatttgatttggtgtcaaataatttgatctaaattaattaaagtttggaactacaaattataaattatattttacgtatcaatatagtcaatgctgatgctagttaagataagattcctccattctactccaccccactctaattttactttattttattttttttggacaaaccctccaattctaattttaatcaataaataattgtcatgcaatcccatagatttcataataaatagcgttaaaaatatagtggtggttacgtgaactaataattgttttgttttgttttgcttgtttttatctgaaacatattattattctgccattgatttgttgatctaattgtcgtttttacgatgagtgtgtcgtattcaacttttcattgttctttttgtcttttttattcatagtgaagtatgaaatgcgtttttagttgtagcccattgcaacaagtaaatgtaatgggttaatttatattttaaaaaggaaaaggactagaggagtgactatttatgagccaaatattttggcttataatttatttattttgagtacttgctggtttcattaaatatcaaagaagccaaacaaaattacataatgaaaggtagagaataattatccaatccatgcttttcctgacaccactgaacattctgaagatgatacccgtgaggagccatccgcttttcttgctgtcaagctgttaaccactcgccattttaattcggatgctttcaaacagaggcttcgccaaatgtggtctgagcgttacaccatcaatgttgtggagaaggagcccaactttttcactatggagttcggatgctttggtgatcgtcgaagggttctcattggccaaccgtggcatttcggctacaagcttattgtcatgactccgcttgaagcaggctcgatagtcactgctgatatgctcacttctacacccttttggttacaagtttctggtattcccttcttaaagcgatcccgggctcttgcgcaacgccttggtgaagtgctagggcgttatattgaagaggatactgcctctcttaaggagagttggggcccctatctgcgagtccgtatcgagcttgatgtaacccaacctctcccccgcggcactgggtttcaattcaatggtatggctgcccctgtgtggcttgaattccgctatgaaaaccttcctgacttctgccatttctgtggccggttgagtcatgttgtgaaccactgcccggagtttcttgctaaatgtgactcttcctccgctccgccgccactccgatatgatcaatctttaggtgctaaaatctgagttacctcaaacccattttatattgctaacactcggactcggcttcgacctcatattgctaacccatgtcctttggctcctgcaccattataccgcctcaaccaaccttttgtcatcactgaaagttctttccatgactctccctctgattatggtatgcatcccttgagtcaaccacacactacttcccttcgtttttatatgactacttcttcaccaaatattcttcctcaacaacctcatgaccttaaccaacctaccatccccagccccagccctccaaattcaggatttactactgctatcacatcttcctcaagctttcacatgtcccctcatcaccatatctctcccaacattaacatcaatcactcggctcctgtcaccactgctgaacagcttcaggcttcaattcctaaggcctctttcaccactacggctactgttgtggctacttcttatgataatcaccatgttatccctgtttcccaagccttctcgaccatccttgcggatcttaaccccacacaaccccctcagtttgctattggaactgcctcggcttcaacccccaagactaatctctctcggaaggcaaagctaggtcggcccgaatgccttaatgctgaagagtttcggaaaatgctcaaacgcacacgcaacttagctaaagcccttgatgaaggccaagttgaagaggcgggtgacgctcagcgtgcccgcctagagccatgagtatcatcagttggaatgctcgtggattggggagtaaacgagcattccgttctctctcccttttagtgaagcaataccgcccaacccttttgtatataatggagtctaaactccttgttggtgctttaaataagtttgctttgcatcttaattttcctaacggtttagaagtcccacgtgtcgggcttagtgggggtcttttgttgctctggacacgtgatgtcgatgtaaccttactttcatataatataagtcattttcactgttatcttaaatttcttaattttcctgctttcacttttactgctttttatggtgcaccatctccaataaataaaccccattcatggcagcttctcaatcgtcttggaagcacttctcgcttaactccctggctaatcatgggtgactttaatgattatctatccttgacggataaaatagggggtgacatgtcacgctctccctctgtacatttccaaacttttatagacgattatgagcttcaccctctccatcctcttggcagcccattcacttggactaaccgtcaaaagcaaccatctcacactcaagaaaggcttgattggtgtctttctaatgacgattgggatgcatccgttcccaaccctcgtcttcaacatggtgacttttttggttctgatcatcgacctttaattttatcccttcacttccagggtgctcaagctaaccatgcccctcgtttcatctttgacaagctctggatgtctgagccgggttttgaggattgccttcgacatgcttggtctcaaaccacacttacccaaagtcataaccctttgcttggactcaaagaaaaactgcacaactgttcctcacaacttaaaacatggaagaattcgttgggtcctcctcttcatgctcaaatccgagaagttcaatctaaactcacgaacgtgaactctatccccgcagccatccaacgcactccttgatcggggtagacaccttgagagccagttaaatcgtcttttgcttaaggaggaagagtattggcagcagcgatcacggataacctggctcaagcttggggataggaacactaagtattttcatcgtttcgcttctcagagacgtcgatctaaccaaattaaatctctcaatcgccctgacggttcagtggctaatgacatccactccattgttgcaactattgaatcttattttgctaatctcttccacagtcaataccctgcagaagccatcattgaacatgtgttagcaggtatcacagagaagctcactgttgaagaagtggatctcctccaagcttccttctctattgaggaaataaagcaatccgctttccaactgtccaatgataaagctccagggttagatggattcaatagttctttctttcaaaaaaattggcatgtggttgggcaggatgtcattaatgcagcgcaaggttttctaaatggggatgctgacctctctccgattaacaatacactccttgttcttatccctaaaaaaccaaatcctgaggcgattactgactatcggcctatcagtctttgttctactctctacaaaatcatttctcgggttttggttaatcgcctcaaacccattctcagtcgtataatctccccgactcaaagtgcgttccttcccaatcgcttaatctcagataacatcattattggacaagaggttatgcactctctcgctcatcgtaagacgggtcgtctgggatggatggctatcaaattagatatggccaaggcttttgatcgtgtggaatggccctttattcgccgtgtaatggagaagctcgggtttcctcaaaagttcatctcactgatcatggcttgcgtttccatcgcaaccttctctttctccttaaccaacaagttcttggccatgttctgccttccagaggcattcggcaagtggaccccctttctccctatttgtttttgctgtgctctgaaggcctttcctctctaattcggtgcacagctcaacatccccagccccgaaaacattctctgggaatcaaaattgccagaaccgctcctcccgtttcacatctttttttcgctgatgatagccttct

SEQ ID NO: 379933 - DNA, 6859 bp, Cannabis indica
agagagagagagaggccacttgtcttagacttaccttctctcaaatttattaggaagccttaattatggcggaggaaaaccatgggaacaaaagataattcacaaaacgaaaacatttaacaactgaccctaacgcaattcaaagccgaacaattttcagtaatgagccctgaacaggaataggaagcagataatgtgtcctaactagattcttgatgcaaaatgcatccccacttcctgttgagatcttggaaagacaggcacacaaattccttagtcttataaacccaagttgctagtctacactagttggtcacttgctcccactaattgactttttgtgtttctccattaattaaaatggtctgtgttggacgggtcctttgtttgggttaggccaacacgtaagttatgttctgtaggaagaaggaacttgggaagaaaagagaagtattttacccctagagggaggatactacactcttttgtgttggttaccccaaatccatccaacaagcccctactcttttcacttgtctctcctaagagttcataatcctagagagtgtaataatataataatataacaacttccaacatagaacctattgttcatttgcatgttcccttacccaaatccatccagtaagcccctactactcttattgaatcctctcacttaacagttcattctcctaaagagtgtcagaataaactacttccaatatggagcatattgttcattacttcatttgcatatttccattgtttgaatcagtacatccatccaataattcctattactctagtttcacttttctcccctaaatgttcactctaaagagagtatcagaacaaaataatgaaacaaattccaatatagagactattgcttctttacatctttcctttgtttaaatcggttcaaacacaaccactttatcacactatcatttgccaactatttctctttcaaccaatgtataagcatcatgtgattctgtactaacacaatctgttgattatttttgaacaacatatataaagtaacaaagtttcttaactaaaaccaaaagtaaccaatatgatgctttttcattttgttctgaacaaaaaatcaataccagccaaataatcttctatttccacaacttggcctcaatactatgagataaaaatttctacagcacgggttcatttttattccaacttttaactcatggacacaactagctacaatgtttaaagagcatgagaaaccatcatacctataagtacacaaaatagatttaagtccaaaaaagaaaagctgccgatatagaaaagtattgtagaattaagatcgatataccttgtcaacatcaactaaagggacatcaaactgcaaagatgggtccaaccactcctggttcgataaagatgcctgggattttgaagcgagataaattttaaatataacatatttctttaattgagtaagaaaggaaaatttaattatctgagcaaataaacaaatgaaataattaagttgttcttgaaaggaggagcaaataaaagagagcaactgtgccatttttgttggtcagcagtcaacacgtagaaagatagacacaggctttcctatttttgactactactatgaaaaaaattatgtaggcaaaagttctttaagtttctaagatgttgatcaaaaataagtttatacttctcccaaaacaagaggggaatgaatacacatgaattctaacatataagccttagtacactttttggatgactcaaaatattatgcaaaatggaggatatgtaaaacatatactctcgtaactaaaataattttcataattatctaaagatacatggaacataatgaatagctatgagattacatttccatttgaatccatggcatcatttccacagcaattttttaactctttgtcacattccaagcctggagtccttacagtacaggatccactgcaaccttcattttgaacctcctgttgttatctacagaggtcaaatttctaaatgaaaaggacataaatgaaaaaagtactagccatagattaagttattatctataaatataactatttattctatatatacagatatatgaatataaatatatatcctttatagctcgtatggtaaaaactaataaatgaaccttaatgccaatgtctccttcttgtgagttgcataaattgttcccttcctcacaacaggctttacttgattgagagaaacaagttctgccacttgtagaagtagaatgactacagcaaacatccctcttttcacagaagccctgattatttgggtcatcttcatgaggagggttttcacaatcatctatgtcctggctcatatcaagtgggggttcaaatgcctgccaagtaattaatttgttaaaacaaaaagtaaatattcaaggtatctttgacgataataatttaagaatgtgttcatataacctaagaaggctgagagaagagacaaagtacttcaataacaaaatatcatcacgctataccgatactttagattgaaactaaagcaaaaaatacacaaacaaatgatgaataaggtgactagaaccaacctgaagcatagtaaatatgaaatatgaatttgcagaaatacacctgcaaagataggcagatcaattagaacttgtaacttacttttagcttatgtcaaatttgcatggagactcccctatacatgataaaggtctaaaggttacatcctagtattttgtggcctccaaattaatcagcacaagtaccattacaaacaacgaaagcatagtatgcatcaaaaccaagctcctttccctctagcaaaattccagtggacatttaaattaatcgctgaaatttcctatgccctttagaactgtctttacctgcactgatcaacccaggtagttgtgaccaaaatggggcttgcaaattatgataatctcccaatgaatgctgaccgaaatgtaattggaaactgggttggtagcaatattggtctggtcaatggtaaaattaaaattcttagacatacttcttggtggtgggtatagaaacatgaatctacttttggcaccatggcatcattcaaggctgaacaagctaccctaataccagaatcctaagttgaaataagaggcttcgacagcattatataatttgtacaatatttatagaaatctgatctcctaaaaatcctaacttaacctataatcagccctaatcatctaaagaatactattatctattaagttgaaagacaaatctcacaaatttaggatactaaaacaataaaatacctaatgaactagagagaaaatcacggaaactatgcttcattttctagtagcccaattagttgacgattagtaaattacaaaatattaaaatagaaagaaacacatgatgtagatgtagttaccgtctcaattcttgaaacttcaaaggataatgggataacaaagcctgcaaggtcatgcaacaaaacacatacatgtgcttctttaattagtttcataatagttggtttgttaaaaactaatgaagaggtgaattttttaatcatcagctcgtctgttatcaaagcaacaaacataatatttcactaagaaaacttcatctactaacatatttcttcacaaacttatagattatcggactctagaagcaagatatggtatggattgcagccactaacaaccaaaaaggcaatacttttccaatctactaaaatgtatactaatgtcattatccgtactagaggtggtagtaggccaatgtcaacatgtatgtctaaaagttgtcacattcttacaagtttaattttttttgtttaatgaaattgttcttcctcgctaaacaggatgatttatttttatttaaatggtccaatatcaaattatcaaccctgaaaattccaagtgaaactgagaactaaagagagcaaaaaacatggatagttaaaatacctgttgtggaggtggaagcttcttaaatgatctttcgtatcgtctgacatcctcatctgcagcctctggatagctgtacacggaagaaacactcactatgagataaatacagtggcagctctactctatttgaaagtacatagcttcacctttatcttgagcattttatagtctttattggggaccaaaagagtttctaaagcaaagaaatcaaagaacccaaatgacgtaaaggcgagaaaaaacaaaatctgataaaaagaattcgaggaacaaaatcaatgacataatactatcttttttcttcttttttgaatttttttttgctctggcagttcgactgggaccttccagtggcccaagattttttctttttttagtctgtgggaattcgaacttggaacaatgcctaccagcactttccaacactcctcactaccactagaccaccccttggggttagtggacatagtactatcttaagaccactgctatctccattacagtggctgcagattaccactttgacaatcaatttcccattgaattttccaaagcgtatatctttacaatcaggtcaatcaaatctcatccgcgcacattaagtatttcgatcagaattactcaagaaatcaaaaaatataaatatatcaattaagtttcaggataatcctttagagaaggattttgaagttgcagagctaggcaacaatttaaacaaattctaatctaaaacagagggactgagaatgataaagaacggttagttacttgaggtaagcgctaacgatacgccttagggatttgatttcaagggcttcctcgagctttctctgacgaatttgttcctcgtcttccgtgtgtccttctagagacgacatcagtgtgggttccttctccttgaagcttcaagaagaaggagtgttgtaggagtctgtgtttgttgttgtgtactttgaatggaatcttggcagagaacagtggacgaggatagtgtgtgtgcgctttttcatacgagacctatttatggagccgccgtgcctgggcttcccacctcttattgggcctttttctgaacacgaacattgttaccggctcatatttccacttacccaaaactgaaaactttataattactattttttttcttttttaatttaagtaaatgtgctaaactctcaaaacttcacaacatactagagcaacaaaccctcatttatttattttttttagaaaaaaaattctacaatatacctccttaaaatggatgcactaatacactattatttgttttggtatttaaaaaaaaaaattgttcaaattttttatggttgtatctgttgtaattatttaagatgtttgacaaaattttaagaaattcggaaaaatttaccatgtcaaaaacagggttcaaagagtttgttacacgcgcaacttttttatcttatacacgtgtggaatagacggtttgaatattgatttctatattataaattattctaaatttcttaaaattttacaggatgtctgaaataactataacatacacgactatgaaaaaatttagactaaaatattttatagatgccgaaacagttagggattgcattagtgtacccattttagtggggtacattaccccattttttcattacggttaaatttcaaattactttttttttattactttagaattttgtttacagcttccacttgtctatttacttatggtctggtcacaactgaaaaactctttacaattccatgcttgacacagaaatcagtgaactaatcactatcaaaaaaaatttccattatctaatacaatcttgtgcgaaagtccataacaacatactatattttttgaataccaaagtccaatgcctttttggaagtaactgtatttattggttttgcgtcgacccccttagtgaagtaatcgatagcaacaatagcgtatataactcctcttttctcagttggaagaaagcctactaaattaatttcccaaatgacaaaatgccacagaataacgttggaaccttagaataacgttggcattactcgcatttttgaatgtactccatacaatctttcttcattgttggccaaaaatatccttggcggatgatcttcttggacaggttgggtccaaacgtatgatcttcacaaaaacctctgtgtatctcgtaaattacagcactaattttggttccaactatacacttcagattaggtatcgataaccctcttccatctagaatcatatatctgggggcttggtattgaatctttctgacagttgccctgtcgtctagaagtaccccaaaacttagaaatttgtatatagggcctacccaggaggttgaatgattaataacactaacctcagtgattttgtgcttggaacaacaaggtgagctatgggaactaatccgtacaactcgttttgtggatccgttgctaacttcgtcaatatatctgccatggaattttctcacattttgtttgatattctctggatatctaatttactaccaaataagaatcactgtagagctcaatgttttgggctccaacttccttggctaattgcaagcctgcaatcattgctttatgttctacttcatttgttggaggcagtgaattcaagctagagggaactttggagttgaagtccttgcggagaaactaaaatgattctagctctggaacatttttcgtttgatggtccgtcaacataaacttccaatttttaagttctagacttggttcttctagattattgttaattcttgtacactctacaatgaagtctactaaggccaggcctttaattgaaacccttagttggtaatg

SEQ ID NO: 379934 - DNA, 2282 bp, Cannabis indica
cccaaccccccccccccccccaaaaaaaaaaaaaggttgttatatatttctcgtttagatttgttcacaattgacccctactattttcttactctagttccgccattgcccaagtgagacaagttagagcacataaactggtttgttttagcacaactaatcatgaccaatagaacaggtattgtttcattttttattttttaatatacaaacatgtatattgtatctatacataacaaataattcaaagaataaggatataagagaatgacaatattctgtctaactgacataccatcttgacgaacacatatctctgcaatgtatttgacttcaccgttgatgctgtcattgtaaactctagtttcaatgtcaccctcaacatacactggcgaactgcatttgaccttaaaattttagaaacaacaatagatacatatatgttttaatgtattttaaactttcttcgctaaaagtttaatatacttgagattgagaaatgaaatgagtaggtactttttaacaatcttttgaacagcataagttccgagtggatcattgtgcacggcaatgcggtgccattgtgcaggtcttggcaagcccttttccagacttgttctctgatcaaacatgcctcctgtcccaactgtaaagatggttatagtccggccatttcgcaatatcttctgcacaggagcttgcccaacttttccacaaattattgcctgcattacaatgcaaaacttaaattattcctcaaacgtctaagtgagaagaatggttcttaaataaaaaaagttattgccagacaaatttgaccaagaaaacacaaccaagcaaaacccatgaaagaaattttcattgtttagactttagagaaagaaaaaataattcacttaatggattacacattctacagcaattaaatcacttttatttgttatatcatatggatccaatcaagacccaactacaaaaatacaaaactgaacaccacacttttataaagtataattgaaaactcttatcaaataccttatgtacaccgcggtaaagccaacctttaccaggattcactccctggggctgcattgcagcttctgatctgtcaccaagtaagtcttcatggttctcttcaactacaacattcttcttctcaccctcattttggtcagatgactcagtggaaaaccacaatttcaagcttctttgagcccccgtcgctaaaatcaagtcaataaaaccaataagccaatgcaacaaaaaaaaaagaaaacccaaaaaccaaaggcaagcaatgccaagaaatccacacactaaacacaacatcatcagataaatactacaaagcatgaaatttgtattgttaaactactacgtctgaatcacacactactaaaccatgcaacaagatcatatagctaaaaaaatcatcatcatcaacaacaacaacaacaacaaaaagtgtatgttcatatgctataaagagcagaaatggacttttgtgatcagaaaccaatgagtaaatacaaaaaaaaacccaaaaaccaagacaagcattacaaagaaatccacacactaaacacaacatcatctattcatttgataaatactacaaagcatgaatcaccacacactactaaaccatgcaacaagatcatatagctaaaaacaacaacatcaaaaagtgtttgcctacatgctataaataacaacaattagatttttgtgatcagaagcccaaactctcaaacatacaatatatcaaataaatactagacatgaacataattgaaaaatgagtaccaaatgaggatccgtgcgttgtgggagcagaaattctcaagtacttggtgagtctcccggcaaaagcactcattttgagcagaaacccagaaagaatggcagaatgtgagaatggcgagagaggaggccctagcctaggctggggtacatgaagggttttagagaacatgggtcgtggatatgggtaatcgagtttcgagaacatgggtaatggatctgggtaacccggttccggaactgggcccggcccaatacgagacttgacattttctgttttggaagcttttttcttgagaaaattaagggtaaataccattttggactctgtgttttgcaaaagttacagattggaccctgtgttttgttaaatgacaaaatagaccctgtattttctaaaatagtaaaaataggaccctgagcttaattttcgataactttttttttaatgcaatcaacttgaagacaatgcttaatac

SEQ ID NO: 379935 - DNA, 1412 bp, Cannabis indica
atgtatatgttgctgcatcaatgaatcatagtttaaaaatagatgaaatatattgtgtgaacacattgatataaactagtctagtggtgtgtatgcttaaatgaaagccaatgactttttattggttattgtgttgaaataacctttcgtaaagaaaaaaaaaaaaaaaaaggtaacccccaagaaaatatgattataatcaaacaaaaacataatatatttatatctaaaaatagaatattagtacatgtctttttcatgggacaattgaatgattagtacattgtattttgcatactcaatattccaaaattgaattaaggctttgctggtcattttattgtttattacaaagaaaaacaacaatttattattaatatatattcaaatttgaatcaagcttaggctttttttattattaatatatattcaaatttgcctttttttggggggggatagtattgtaaaatcactatagcatagagtactaaagatatgggagaaaaagacttttctatactatcaaagcccctcaaaaaaaaagttgcacttttcaacaaagggagaatgaatgaagcattatggtgcaaaagaacctttctcaatggctcaatctgcatagtgcatatgatgatgcataactaatacaaattaagtcaaacaattattaccactacaaaatgtaggaaatattctgcaaagttgcatatgaaatgttggcaaagaccatcacattcacaatcacacccttcttctcaacttaataagcttgatgaaaatgaatgtatcaaaccaatatatatttcatttgaactttttatattgtattacatgtacattttgtttccttcttctcaaagaagaataatcgattgtaacaaaagataatgatgtagagcataatatactacacttgctaccaaatttatcacaggtatagacaatactaaatttagcttctttttttttcttccataaattcggttcgattgaattgacttttcacatgacagtttacaactgtttttatttatttatttattttagtaaagcaacaataaattacatttaaattacatttaaacattacaaattttgaatcaaacggccataaatcatccgactgtatagcttgactaggtctgtatagcacaacaaacagaaggatgactaaaacacaagacgtcagttttagttagtgaggaaacattaaaaggtaaaacaaccacagcaaagcagagagagagagagagagaatacaacaaaaaaaactgcaacgaaaatccagaaggcgaaaccacagtgattggtgttataacaaaaaaaaaaaaaccaagagtgattggttttacttagtgagaattgagaaactcgcagcaataaaaggagggtatgactaggtgggggcaatg

SEQ ID NO: 379936 - DNA, 4454 bp, Cannabis indica
aaaatgaatattgcagtcaccagtatctaaagacattgcttctttttttttttttggagataagcaaagacattgcttctaatgaagtatagttgtgtgcatattatgttgttttgctttagtgaaattaacaagtccttgcttgaacaatccaagttagatatgcaaatggtaagatatatacaagaccttggctcttccagttttctttctctatcatttgacattcaattgaattgttcatgtctgtaaagtctatataagaatccattttatttgctgccaaaattaactagtgtttcatcatgccaaagttcgagtatttagaataacagagattatagagaacagtgatttatatggataaaaatggcaaaatgcctttgtattgaatactcaggacttccagagcatggttctcaaagattcacccgctacactttattccaatctaaccaagtgcactgaagccagccacactctaacaaaacccacataacaacttactttactgccggctcactaactaatcctctacactactgaccacagcccctttcctagacctatgggagtatacaatagtgatatggtctatcaaatattaaacttgcacaataccaaacttctcttgttcatacaccaactattgcattggctcacttagatcaccttacgatatgatgaacatactcttaagagttaactgaaaactttctatgtaataaagaaagtttgctcaagacttgtgtagattactctttccatttataaatgtagtcaataattattgcagaatattcaaataatatgttcctgaattagcttcttaagaaacttaatataaagggaagcctctttggctgttagtttgagttcttattggcttactcgtcttgggttatccatttctactattaaaagtgatgcaaagttcataattaattatgatgtactatccttatttttgatactatataacatatgatgttctagctatgaataaaccattctaatagtactttgaatggcctggaaaaatatgagactatcaggttcaattaccatttgtgtctaacctttattttcaatccaactcaatgtttttcttaactcgatcgcttcaacttttggattcagaaaaagtgttttccaacatcctcccatcataatttcaagcaattcaactcaccccaaatttaccctcactctcaaaaaatggcaacatatttacgtttaccttgattatgtcatgtcaacatttggcttgttcaactgctcactcttgtcgacctcaacctgagtcaatatcgacgacaccaaataatgtacccacctattcaactgagtgcattattctgttgccaagttagatcattacaaccatgccatagagccgaacaaagcattcaaacaactcccaactggtcattagttcctatgtcaaaagcttgtttccatccctctacgaacataggtcaatcgcctgacaacatcgccaatcctcccttataccatcatagtttagcgaaagcgcaagttagaaaaatatgtgaacaccttccctactagagactcctcattaactagcaaactccagctttacttgccaagaaaaaacaaggttaaaatccttcatgttgtgaagctcatacctccactcaccttatgattgtcatgcaatatattagtaggcatttacaactaataacaagtttacttgccaaaatgaaatcaccttgtattatggcaaaatgatcattgtatacttattggcctcttgaataatgttgcactgcaccctttgtgttttggcaactttaattataatttataaattttagggaaaaaaagtttgactaaaataggcttcaagctatttcatttgagttgagattagccataagtataatttaattaatgttggtaattttttctttttaaaagaacgaaactatttattaatagagtgtttattatatggtaataatgttagattgagttttgttttgtgacacttttttttgttgatatcaaaatgaaaagtccaagcccaatctttccttttcatcgttcactttctcttctattcttttcccaattgatttcctccttgcagcaactgagttttgtctcaattttcaatcttgttctttttgaaggtgtttgtttctctctttgagaagctacattcagcaatctagggtgagtttctttcttttttcttaacaatttcttctttgtttcagggattacacagattctcaaaattggatcttgatgaagcctttgctagtgtgttatgaacaaatattgacaagatttggcactggtatgtagttttatttcttcttctttgctagtgattgggctatttattattatattagggctatatcagtagtttagatttattttaaggtttgatatcattgaattagtcactagattttgagaacaaaattcattaagactcatattgggactaagaatggtttggtttgtctaaaaggtcttacttttaaactgcataatccataatccattctatagtctctgttctgttgttgaaatggttctgttttgatagaattaggttaagccttgagattagtctcactataggatttcagaggctgagttgtccagttcttagtgactgtgataattgtttaagtgtgtctaatacttatatgttggctagtttagattctttgttagtttagaacaaaattcatcggaatttgggattcattgttaagttagaattgaggatacctccccatatgaagtttctttgatgctactacattgggactaagaatggtttggtttctctaaatgattttgttttgatagaatttgaggattttggaggctgagttgtccagtttttagtggctgtgattattgttaaagtgtgtctaattctcagattgctattggttggctagttcggaatctttgttagtcttgcctataaattctaagatggagtcatatgagagcgtgttgaattttgtctgaactattttagagtgaaaggttgctctaagaagataccgaactgtctcgaaaagtttggaaaattgactaattctttacaacgacgttggattaggaacaatagtgtatacaattcctagctgaaaagatacatgccttgattcatactcagaacccactaaatctattttcctttctttgtttctttctttcaagttttctatgtaaattataagctatatgttttactattctccttccaatacctttttttttatatgcagaaatgaaacatttttggagttgtgtttaggagacatacacaattttctggtttgaaccaaagaaataatatagtactttctttagttctttaccgagacgaaaactgagaaaataggtttcgccgaaacgctgcagcatttgagacaattggattctgttcaactcatattatcattgaaaatggcacaagttttcacttctacagctataacacagttgtctcagatgttctttgtagcagtaatattctttcatacttctgagtacctattagcagttgcctttcacggtagaccgaatgttacactcggatctcttctcataagcaaaggctacatttttgcgatggttttctcgatgttggagtatgttgttgagatccttttagtccccgagttgaaggaacattggtggatttgctacacagggctcgtcatggttgttataggagaaatcatacgtaaaatggcgatcataacagctggttatgccttcacacatcttatcaggactaatcgtgacgagcatcacgaactaattacacacggagtctacagatttgttcgtcatccaggatacaccggttttcttatttggtcagttggtactcaaataatgctttgtaatcctttgtcgacgattggatttgcaattgttgtttggcgattcttttaccgacggattccatacgaagagtatttcttgagacggttctttggctcgcagtatgatgattatgctcgacgagtttgttcaggagtgccatttgtaaagtgattttcaatgagaatttatgcatagctgagttgaaagagctaaaacttcttactttgttaagaaatgccaaactgaatgaagtttattaacataagttagtagaaatggtattatgtttcatcactccaattgcttcaaaaacaaaatatattaattcaagtaaaatcttattttttctcaagttagaatatttagaggtcatatttattttttttagagttaaacgccattaattacaagttgttaatgtaatgagatttaaatattttatgaatggttactatgaatccacatagtaaatgaaattaataatctactttttgggataagttgagaaatacctcttttttgtatcaattaattaaaaataccttcatattttatac

SEQ ID NO: 379937 - DNA, 1860 bp, Cannabis indica
tttaatatataaagatatgcttaaatacatattggtgcggtcagtattaatacatatatgtacatataataaaaatctagatttttatatttgcagaattaatattgttcatgtatatataggaaaatatttcatattctgttattcataacttttggaataataataaaataaaaaaaattaaattaatatatgattgatgatttaaataaaacttatttataatgatatgatatatactcaaattaactttacacgtatttgtttattatgtgacaaaagatcaataaaatgacatatataacatgaataaattatttattttattgtcaattcactttaagatagatatcatgcaccttataacaccttactaaattttaacttggccgtatttaagcaaacaaaaaaaatccacaaatttgggtgtgttgggcagtggggctcaccgaaagagttcgctgtgaatgtggtgaagttgcttgcagtaaggttggggttgcgtattgtttggcgattcgatttttctctatctccaatactaaaagtgattcgacaattgtcatagactggatcaatataggcccgattccaataacatatagttttttaggagattttatttggacagatggttgtccacattttattagttctcttgtaacagttgatttaatttaatgaatttcctgatttctttcaaaaaaatatagaaattgctcaacgtgtacacctacaaatttctcgatttgaccttgtggaattcttttaaatgtcacaattcaactttttttcaaatccaaatgtgagaagggtgtattagattaattagccccaccattactaatgtgtagaaataaaatgatatatttaaaagatgaatgaattactcttctcgttgtcaattaattttaagataaaatatttttcattttatcttaaattctaaaaattattaaacatgatttgttctataagtgtgctaattaagtattatttgtaatatatgtgcacatatactcattattacaaattataatataaatatatgattaatatatggtgcatatcattagattatatattagtgttgtttactgagattttaagtggtgacaatctcaaaaatcctaacttattgctatattgtatttacataatgaattttaattcctttacatgagggtataatgtagtatatataggttagggctcgagttcagatatattcataacttgctagagtgcatgtaaatatgacccactaacggggtaaatacataaaatacattcaatttgaacctataaactgaggggtctctactgctccttattcgagcgggatgttgttgagtaaattccacttataattagtccctttacaacatatccacatcagcatacaacaacaactaaataacaaaaaataatgactcatcctaggtggctttgcctctacaagaccaagaatcagaagttagttacaactgtctttgtaactaacttccaactctgatcagccgactctttattacagtataaataagctacagaaaatgaagaaatacacaactgaacagaaaaagtgagagagaagaggtgtaagccctagttcgaagcttcagctccaagagccagagagaggaggttccaagcaaagagtaatactttcgtggtgaggagttttgaagagaaggaagtacatgcacaaataaaaacgaagttagatcaagttactaaaaagagaaacaaaacagagctgtaaaaaaattgaagaaactgagttgatcgatcttgtgacatgaagctccacaagctgtaaatcaccattgttgatagtggatatcaagctaaatctct

SEQ ID NO: 379938 - DNA, 5980 bp, Cannabis indica
aaaaaaaaaaacaaatatataagattaatttttaacgtaaatatttaagtttaactctcgattattattaaatatttaaatttaatttttgacaataataatacttaagttatatttttgtaacttcgtacctgatcgttaaaaagttaaattatattatcacaagtcattttcttaatgatatattttaattaaattttaaataaaaataaaaaattaataacttaaactaatcaagaattatcaggtcaccattaactcaaaaataaaatttggatattaatactacaaataagagaaatttttgcaaaaataaaagaagacaacaagtgcagtaatttaagggggaaattttgcaatttgtgcttaaaagtccaaaaaaaatttatgaaattatagccaacttattataattatattattaaataatatttcctttattatatgtatgctttccttttactcatccaaagctgacaatgtttatatttatttacattaagaaagaaaagctctgatccattgttgtttctctgtcttagcttctccattttcgattggtttccaccttccttcctttctttctctccttcacaccattaataaacaaaccaaactcagaaacaaaaacaaaaatggggttttttttacttctctgtattgctctgttccaatactcagtctccacaaccaccatagcttcttctgctaaaactaaaaacttcagctttactgagtttaaagaagaaagggaaagacccttcttcacattctcaaacttttcctccattgatggtggagcccttcaactcacaccagataatgagaatcagtacttgggttactacaacaagtctggtcgaatcatgttccacaaaacccagaagctttggttatctgatactgataaaaatattgcttctttcaacaccacttttgttatgaacatttacagaaacaaaatttggaatccaggtgaaggtttagcctttgttatagctccagattttgaagtcccattacaaagccatggaaggtggttgggtctgaccaactcgagtacagatggtctgagacagaattacatggttgccatcgaattcgatacagaaaagcaagaagagttcgacccagatgataatcacattgggttaaatatcaactcagttagatcaaaaaagactgtgtctttaaaaaagtttggatttttattatccccagagaacagtacggactacagagtttggatccagtataatggtaaatcaaaagttatggaagtttatgtggcgaatcgaagcagtttaaggcctaagaacccttttcttagtgagattattaacttgaaagactatgttaaaaaagactcttactttggtttttcagcttctactggaaaccctgggattcagtacaattgtgttttggaatgggaaatgcagattgaggatttatcagtgaaaaaagatagaaaatgggttgtgattgggattgggattggagttgtgggaatggctgttttggcattgtttggattgaaattgggaattgggtatttgagaaagaagaggaaagagcaagatgaggagtctaatgtgcttggtgctttgaaaagattgcctggtatgtctagagagtttagatataaggatctgaaaaaagccactgatgattttgatgagagtatggttcttggtcaaggtggatttggagttgtttatagaggtgttcttcgtgaaaagattgaaagtattgggggttctgctaccattactgaagtagctgttaagaaattcttaagagataacatcaaagggaaagatgatttctgggctgaactcaccattattcatcgacttcgtcataagcatcttgttcgtttagttggtaacttttctttaactctttttccttttaactttttacatttggataatgataatgatgaagttggcaatgttgattgatgttaattagggaaaattctaccaattccttaaaatagatattgtatacccgcttaacttatattgtttgatatatacctatttttatagatgatgtcttcattataccttaagttaaaaaattaggtgctagacttaaatagatggtgagggtatattgggtaacctacttacaaaagtaggtacattttagtgaaatatgatataagggtatttttaattaatggataaaaaaaagtattcctcaacttatctcgatatagtgtatgtaccttatagttatttaagattttttgtaaaattttaaaaaattcggaaaaatttaataggccaaaaatagagttcaaacaatatgttatacgtgattgtttgaacactactttctgtattgtaaagacatcttaaataattataaaatatataaaaacaaataaaagatatatcccatccttttggaaagtgagaggaaaataacataaaacaattactagtcaactataaaatgacattaaccaaacttttagataaatacattgaacttaagataatttggttgtatacaatgatatttttgtctctctattgatccaactagctatttctttatttctagactccacttgcttttgaataatgaagtaaataaacaaattttcattcaaagtctttgatgtaaatacgttgttattgccaaaattctctttttgaaaagttgttacttgtttaggttggtgctacgaaaaagggaagcttcttttggtgtatgactacatgccaaatggaagcttagaaaaacacctatatgaatcttcaaatacccttaattggagacaccgatacaagatactcgccggtgtagcctcggcattgcattacctccacaatgattttgaccaaaaggtggttcaccgcgacctcaaagctagtaatatcttgctagactccggcttcaatgctcgtttgggagatttcgggctagccagagccatagaagatgagaggaactcgtattgtgagcttggagtagctggtgttcctggaaccatgggttatgtggctccagaatgcttccacactggaaaagccactccagaatctgatgtgttcggctttggtgcagttgtgcttgaagttgtgtgtggtaaaagccccggagtgaaaattcagctcggggataatttgcttacattggttgattgggtttggatgctgcatcgtgaaggacgtattcaagaagctgtggacgagaggcttaacgatgactacgaggtagaggaagccaagagacttcttcttcttgggttggcttgctcgaacgtggtcgatggtgagaggccacaaactcaaaccatatgtcagattatcgctgagactctaccaccacctcatgtcccgcctttcaagcctgtctttacatggccatctttaggagtttttacctataactcccttgatagtgcattttccaacaccacatcttctagtaggatataatgttaattggaaagggttcagctcagctcagcacttctcatcctcagataatagtctgtctttcagttcctgagattggtctggtttcttgacaatatcacatggtttggagtccttgagaattttcaatgggagattctaaccttaactctacttgtgctccttgcaatcctgtattttatggcaccatactaaatgtactactattgcttggtttttgaaagtttcaacataggcaaaaatgacatgtaattataaagaaaagtttccattttttccccctttcttttgaacagaacaatactttatcttgatgctttctcacacaattcaagctacaatctgcactataatctcataaactgaagtaagctatgacaatatctgcatcttctatgattatatactacacattaaaaggaagtaaaaatggaaaggtaaaaagaacttagacaacatattgataacttcacataaatttaaatcaagggggcttatgcctaaacagctgcttaaatcagctttgtctctctaaacccagaatcataaacaagattggcataactacaagtacaaaccgatgagcataaattcaatctacaagttcaactccaagcgacactacactacagcaaaaatgaaatttgataatgttatctagtaccttcttttaaaccaaaccaaacttcatttgaaacttcttttgattacagtccagcatatcattcaagctgcaatccagtttcctctgtttcaaagctttgtgccgcgactccaatcttttcttcaagccataccgaaagaaatcgggaaaatcagtgacttcatcaatctgtcttcccatttcctcaaccaaaaacttgattctaggctgtaaagaattctgaatactctttatcagaataggtggatagccagttaccaaagttgctatttgtccatctccaaatccacaactctgaagataagtgaaatttggcctcaaaatcttgtccacatctctacacaaaacttcaggataattcattgccactgactgaagacctgactcagtgagacctattgctctcaaaaattctgcagtaggacgcaatcttttatctacactgtaacccataataaaagggttcttaacaagtaccttcccaataaccccatctctagcaaggccaagaccagcaagaaattcaacaatttcagtcagctttgtctcaatactgtaactaacaagccttggattttgcaaaatcatctttccaagttgtttttcaggaatacccagagcctgaaaaaaggctaaaagtggacataacttctcttcaacactatgggagagtaaattagggaacttggcaatggctgaagcaacttctctgggtttagtaccaagtgtgttgagacattcaacagttggaataagcttctcatgaagaccaagtgtaaggattttaggacactttgaaataacagaaggtatctttctttcttgaattcctacacttttcaagtaagcccaattctcagaagctctctcactttctgctccttcaagacgcttacattttctgaacatttcatttatactcttatcatcaaaacctttatccctaaagaaccacataataccattttgggtgttactcatatccattattactactcctgaaaacaatgccaaatacaaaatcgtttcaatacaatctacaatgcaaaattcaacacccttacacttaacacacaactcttcaaaatcaaaattagtgaagcgaattcaaaataagaagattaaaagaacatttacctttgaatttgatcaacacagtgaaaagggtattcaaagaacagagctttaggagccgttaatcatggtttgttgcagccacggagagttgggaattcatcggagtatataatgagagaaggcttatctatctgttgtggagttttcttatttctaaacaaaaactataaaattataaattatttttaagggctttatattaaggttatttgtcttatcgctccctttactatttcatttgtttctatttaatctttaaaaataaaactttagcacgtgaattaattttacccaagaatattttatcattaatttgaaagtttataaaataatgtaggttaacgctgaaaagtgatcaacaccagctcgctagattgacgagatgaattataaatttaaaaatgtaatatagagagatagacacacaaaatttataatagttcaatccccaagtcgcgatagtaatgaagatacgtttaatttgaattttatttctcacgagaattacaaaaaattggttaagtgtgaggcttgaatttttagagatagaaagtagagagagatgctctgactttatggagacttagaaaaatgtaaaagaaaaataagctagaggagctttcatttggaaaatgtcctattaaaatagtaataaaaaaagtacaaaaaaatatgaaaaaaattactttgggctaatcttggtcattgatgatgatct

SEQ ID NO: 379939 - DNA, 6756 bp, Cannabis indica
atatatctccctaatatgttgaacagcccgagtatcagcagctaatagttgatgctggagctatatcacacctggtcgatctgttaaagaggcataaaaagatgctaactccagagcagttagtggtgttatcaggagggcggctgatgccatcactaatcttgctcatgagaatagcagcatcaaaacccgtgtcaggtttgtttagttcacttagtgtttcttcaaagaaaaaaatattatcaattagtgtccgtgtaaatcaataaatgcttgttttcatatatctgaaatttgtattcaggattgaaggtggcataccacctcttgttgagttgcttgagttttctgatgcaaaggtgcagagagcagctgctgcagccctgcggacccttgcatttaagaatgacgagaacaaaaatcaggtgactagcactaccatttacacatttttgttcacccttttcaattacttcacaattcagttattaacttcgaactgaaattgcagattgtagagtgtaatgcattacctattcttatactaatgctttggtctgaagatgctacaatacattatgaagcggtccgtctcaaatctttttttccttgtcaccctcccctccctttaaatttgttttgggcattctttagccttgttttactagagtaactgagctggtgtggtttggcaggttggtgtaattggaaatttggttcactcatccccaaacattaagaaggaggttctcttagctggtgccttgcaaccagttattggactactcaggtaactatctcaattaatatttaagttttagcaataataggctgctgttgcacattagtattaagttatttgctttaaattaaaaaactcattattggatttttttcccttaataataataggtcttgttgctcggagagccaaagagaagccgctttattactcggtcaatttgctgctgctgattcagagtgcaaggtgagctaccatattgcttttgactgtctgttctctctgtgctatgagtaaattataattttatataagaattatgctttaaatgttgttatttatgaagtcttcatgtataaaggttcatattgtacaaagaggagctgtgcagccactgattgagatgcttcagtcttcagactctcaagttaaggagatgtcagcctttgctctagggaggttggcccaggttattacctttttattttcccatttcccttttgcgttttacatgctagaacaacagctggtaaccataatgtataattgtcagtgtgtctttctcatggaccatgtgcttgtgtatatataaatataaatatatatcagacacttgtgttgacactatcgatcagtcctcttccctttaataattgagtccagtgttttataatctttcctctactatatgatttactataagctcattgataacttttaaatattataaatatttctgtacaaatagcacaagactagtagttttggaaacaaattatacattcgatagaacttttttgttgcttaatagtttatgtttccaggatacgcacaatcaagctggcattgctcataatgggggtatattacctcttcttaagcttcttgattcaaaaaatggatctctgcaacacaatgccgcttttgctttatatggtctcgcagataatgaggtagcttgttattttgatttcttaaaattccgaatttaatgtattgtcatgcatgtcatttaatgcctagagggactaaacttgaagtttattctaggataatgttgcagaattttttaaagctggtggatttcaaaaacttcaagatggagaattcatggttcaagtatgtaaatcttaatttttgatttcttttttattagtttttggttctcattacctttctcacggttttgcttcgtacattgttcgtgtagccaaccaaagattgtgtagcaaagacgttaaaaagactagaggaaaagattaatggacgggtgagttttcttatagttttggttctttctgcttgtgcatatttggcagtggcttttggattcaattagttgataatttattatatttttaatgatattttcctcaaatcataacttaattatcaaatgcaattgatatgatggtgtttttaaactagtttggtgctttgctcttaggtattaagccacctactttatctactacggtctgcggatagaacagtccaaagaagagtggccttagctcttgctcatctttgtgcacccgatgaccgaaagactattttcattgataacaatggtagcatatacttttcttgctgtttactatggtgatcagacatttttttttagatttgtgccaatttaatgtcagaatttatagattttgatgcctttctttttacaatgtgaagcaatccacataatcagtcttgttctttagtttggaagtcctaaatagtactgcagaccctttaataagatgcactcatagtctcatacaaccaagcaaatcattagaaatagttgtaattctccacttatttctgaattgctcttttcttactgcaggcttagacatactaattgggcttcttgagtcagcgatcctgaagcaacagcgtgatgggtctatggccttgcacaagctggctacaaaatcttcctctctttctcctgtggatgcagcgccactatcaccaaccccacaggtattatttttgatgtctagttggttaatttcatgcgtaaaaattggataattggattttcgaacttattcttgtattcacacgatcttatgcttcttttgtttaggtgtatttgggtgagcaatatgttaataaccccaccctttctgatgtcaccttcttagttgaaggtaggaagcttaccatttttagataataaaacaatagtgcgtttttgttatgcagctgattcactcgaagttttgctgaccacaacttgctcacattttatttaattttcttatatcaggtaaacggttttatgctcatagaatatgtctgcttgcttcttcggacacatttcgtgcaatgtttgatggtggttatagggtgagtctttaactaaactctgttttttgctacgctaatggccctgcaaagatttgtttttgctgaaacacatgttttgcaggagagggatgctaatgatatagatattccaaacatcaaatgggatgtttttgagttgatgatgaggtacagtttgctatcatcagtttgaccgattacaagtttttaaaaaatcacccagtttgattcctgatcacgtgtacatattctggttgtgcgtctcagattcatatacacaggttctgtacatgtcgatttagatattgctcaggatgtactcagagccgcggatcagtatcttttggatggtctgaagcgtctgtgtgaatataccattgctcaggtggggctttaataagaattttcttttgaattaacatcacttttattagacctttactggcggcttttgtttttagtttcttaagaatgtttcactgactttcttgtttcgttcctaaaaggatatatctgtagataatgtttcgctcatgtacgacctatcagaggccttcaacgcttcatcattaaaacaagcttgcattcttttcatcttggctcagtatgacaaattgagcatcaaaccatggtatgtatggcagagcctgtgcttgtacatataaaataagtgttcttgagtttacctccaataatgagttgtttaaaatgaaataattgtaggtacgctcgtttgattcaactcatcgtaccagagatgcggagttccttcaccaaagcacttacaaagcctgcccaaactgatgtatggcaggactagatgaaggccaatcagaaattttgattttcatatgacggagggcgaaatgtacataaagattagattgtacacagattagatatgaaaactattttcatcaatgctctacttgatccagttaagtgaaccccccatctcttctttgtgttcgcctagttgggaagataggtgagatgtgattttctgtattgacttttgatcactgattgatgaaaaaaaagctgaaatgtcaagagtagttttatggaacaagaaaatattttaggtgtttactgattagtttaaatctttcactttcttctttatatctgtagatatagttcaattagtttataataagttatcattgcaacaattttttgttcatacaccattttcgtgttcataaacaagtcaagagaaacatcaatagaagggaaaggaaattgcgaaatcatgcaggaaacaatataattaactagtatatgtgcagcacacattttgtaccaagaatacattatatgaagtaagcctttgtaatctagtgggactaattttaaatcaatgtgattgggatccttttttcattcttgtgatttgagataaacaactttttatcttaaaaattgatgggaaatctacaaatcaatcagttaatatattaaatgaaataattgatttcagctaagttgcaatatattcatccttgcatcttttcattgttacaattgctgactcgactagagatcttttagctttcagaaacatttcagtactctcacaacttcaacccgaatcttaattaaaataatgaaaaaaatggagcataaatacaagtttacaaaataaaaaacaagatacatatgggacacggtaagcaaatatctttcttttcttcattaaaattccaaaacgtggcacaaattgaaacaagcgaacttaaaatctattttgcgatacatttaaatgccttgagcactttcttcttaattatctagcaattgtgggagcacaagtagaatcatctttgttcgaccaaccctctttaattccacaggcttggaaaggccttaacctttcaatttcaatctgtagttcttccacagcttctttctctaactgtgaacaatatttcccaaatgtctctatacttacttgaagcctgaaatcaatagtgaacaaaaacctcatttccaatctgtttaattcagatgtgcttactcctcccactttagcatagtatgcgttgttaaagaatctgcaagaaaccaagaaccatgccaaaaatattaataatacatataaatatatattagatatattatgatgatgacaacgaaacttcaagagtattgggaaccaaagggtattcaagatttagtagttaaaaattttcattatttaacttacgcatcatccataaatttcgctgctagcattacactagtgattagcagcctatgaacgttgagagatgttaagtgaatgtctgtgttcttgagaaatctgtccaaatagatgtttgcaacaacaaagcaagacgggctgcagccggagtacttgaagatgcgatcaatgtattggctgatgcttaaactaggcgctcttagaccgtgaaatatggtaagaacatctttagcttgtgttgcctccaattgcaactcgtttatctgtactgatttctcaaggagtgaggaaagaagtgataagacccggggtagtttcataacgcctttgcctaatcctttgagccccaaagaaatgtaaacaacatctgaacctacattactctcggtctcaactgccagagttcccattattaattctgcaaaattaagtattggcataagaaatcttttatttacttactcagtcaaagtacattatacaaacatctaatgcaaataagacttagactcacatgaactttattcatttcaatataaaatcgattctcaaagttgggcatttcagaatgacctagtacaattacttatctctttagattagaaaaatcaaacacgcagggaggcaaattctcagtaagattttggtggcccaatttgcaaatgaaaggctcttttagttttaagctttaattgaacatagtaatacatcttcgttctagaagtacaacttaaagttcacacatctagcattattgtcctatcaatgttttaccatacatggattatggtacattaagagtaaattcctgtgtatagctaagcaaacatgggctaaaagtaaaaacccacttgaattttccattaaagaacacagatcagagtcctacaaaagtaccacacccgaatttggtactaaatctaaaatcaaggaaaaccccataaggcaacaacataataagcagaaagaacccatcaatctaatccgacaactaacacgaaccagaaaccatttcttattcaattccaacacaaacaaaaacccaagatctaaaaaatcagctccgaacgataattttagtagtactaaactagaagaaatcacaagaagcagagtttgaaaagataaaaacgaagaacatacatagatattcttgtaggagaagtctctaaatcccagcaattggtttgtgtttgagcataaaaatactcccaaagacgcaacaagaaagatacagtgaatgtagtgatatgatatcagcgtctaattcaatggacttaggcagtgtttttgctttgcatctacttcctcttcttcttcatctctcttccattacatttttctcggaatagttttgccgcagaaagagaataacatttattattgtttccctctctttctctgttttccctcctcacatggagatggaggcttagacaaacgcggtttctctctcccttcctccctctctctctct

SEQ ID NO: 379940 - DNA, 4606 bp, Cannabis indica
tttttatgtcgatttaagcagttttttttcaatcttctagatttgatgctcaaccctactaaccactcgaagcattacagacaaaatttacccatcacgattggatatcacaactttcaacccgactttccaaattgtgaaacttgtgcttaaccatagttttttttttttcttggttccctttgtttatttaataaaaatcaaataataatttttccatatattttggagggtgaattttattaaaaaggaaaaaaaaaaaacaaagtccatgctcctattattaatcaccgttaactaaatatattggcgcaaagtttggcaccacgttgggacaccatttttttaacacgtgctcctgtattgacatgactacatcattacatattacattcacatctacccattccataccatttcattccctattttctttttctttatcatctctttttcccttacctttttctatttccttctcgcgaatctacaatcaccaccatcgacccattaacaacttctcctaattttccaagaaaaattcacttcctgttttaaggtacccacttttccatttcccatttgctatttttgtgatttttctcttagaaatatagtggagaaagaaaaacgataatctacgttctttgtccttttgatttctagtttggtgggttggatttagatcttaataagtttacgttgtttgacatgcaatgtttgagtttctatgaattggtaaactggaggctaagattctgatgttgggtttctgtttctttttactaactttgtttatattggttttgttttggttgctggacaagtggtgtagaatcaaatatgaaaagattgggattttactgtatctgggtttaaacttgttgatctgaacagctactagtcctcaaaatttcctgtattcattttcagtaggaggccaaaatgtgaataacattctatgcaaatatgattataaattagcaaatttgtcatcttattgtgcatttttgtgttatgttcaaatgtgcctttatcttttattgcctttcggaatttttttacatgattttgacgttgtcaattcagaatatgtagcttcaaaacattagtgcctcatggtcatttctagtgcattatctgtccttagttatcatgcaccttcataacagcataaaagccttgtggcttggtttcagcatttcattatgttcttgaagatgtttggtatgtgtttgtttgcactttggacactttagatatgccttggtgtccaaccatgagttattagtctgtaagttttcctcttagtattagtttgaaaattctatgaagagtttattgactttgtatatctgacttcacatggatatctgcaaagtccatttttgacaagaaggaaatgattttcctgacactgtttttttctcaggttttggaattagtattattggactcaaaatgtcttctccaagtaaaaggagagagatggatgtcatgaagctgtaagtggccctttgctattacccctttattgttgagtgagggatctacattatttatgttaatgcaaatttatctatgtttttaattaatggttgagtaaatggacatatcactaaggtattgaagtgtttcttgagcacccttagtggtgataccatgttttcatatgatgatgctttctctagttattgcaatttgaccctctgtggagcttttagaaggattagattacgttatcattttatacatatcctttgacaaattttgaatgattatgtttctttgcatattggtgtgatggggattcactttttgtataaatacatttatgtatgtatatgcatttgtaaaagtatctgtagtttttgcgtttctagtagtacttttgtttcaataatctttgtattttactttcctgtaaatgttttgccagacattctttacttatgctaatctagtggcaactgctatttcaattattgaatctgatgttattcgtatattgttattcatggaattattgtcgaatgtcaatgcttttcaggatgatgagtgattacactgttgagacaataaatgatggcctcaacgagttcaatgtggaattccatggtccaaaagatagtaatgcttatattcttctcactctcttacattctagttaattaagtttactcagacaagttgtattagagcaaattgaagtaggaatgagtttacttagataactaggtatgcttattacattttcacttcactgctttggtttactgcacatctgaattatcttattaaattatggtggttacaggcctttacgaaggtggattctggaagatacgtgttgagcttcctgatgcttatccttacaaatctccttctattgggtttgttaacaagattttccacccaaatgtggatgagctgtaagcatcccacaattcaacgacagcttattttcatgtctagttgaaataaagttggaatgctaatgatcattaaatgctatgaaaatctttcaaagcatgcaacaatagcagtataaattataataactgcatttatttaactacctggaagatggtttagatgttcacttattttgaatcttttgtctattgaactgactgctgccgcctaccaataattgcagatctggttctgtctgcttagatgtcattaaccagtcatggagtccaatgttcggtacttgccattctgtcttagtgaattttagaatatggaggcacaagttctttaattttatcctgcgaatctttcagaacaagttctttaattttatcttttatcattttctcattttttggattgacatgggttcttgttttttttttccccatcacagatcttcttaatgtttttgaagtcttccttccacaactcttgctttatccgaatccttcagacccgctcaacggtgatgctgcatcattgatgatgaaggatcggaagctatatgaccagaaagtaaaaggtgaaaatttaacgtgtaattagcccaccctttatttttggtactcttgaaacatggtatcaaacaatctatcccatattttaaattcttcaatctgatcataacaatggcattggtgctttggagatggattctgtttgtgaaagttgttgtcgagatccagagaagacggtcaagctagtcattaatatattttattattcattaaagaatctctggtattgaaaataaaaaaaaaaaataacctcatggtgataattatggctgtaagatactctagctgtgaaaccatgttacagttactcatatagaactaggtttctcagtagaagtcttgttcaaatgtggtaccaagtccaaggctgtgatagcatgaataaactcattggtctcttaaagactgattagttgttgaaattgtctgatcacagtaagttccacccgccctctctctctcttgtgcataatttcatatgtttatatatgattcatttgtgttacagagtactgcgagcgatatgcgaaaagggagcatatagccaacatgacacctgaagaggagagtgatgaagagcacacctctgatgaagaaactgatccaagtgatgatgatgatgatattgctgggcatgcagacccttaatttacgtaaaggggtaatatctttgttcaagccctccatttacagaagcagcagcatcacaaatacacattacatgtctactatttagttgctatactatttgtagactaaatttgatttccttgtaaaaaaaatcagtaactgtgttagaggctaataatgccttaatatttcaaatgttgtaacagacacaatgggaaatagagggatagaaaggaaccgctgaatatttgtcattgcctttcatattctgttagatttcttattcttttgcttagcttaatcatatattttatgtttctcttcaagtgaacccacctgtttttggacagagacattgatctcaaggaacttttctaacatttacaagagtttttttatcttggaaaacattgagctaaatgtcattaaacttttgatttgtaaaaaattctgaacttgaatatgtgagaatgaatttcaagtcaatagttgtgttgtcctaaagcaaagttagaccttaagtcaagataagttcagggatggtttgtctggatggtgtagtgtgagaagcctattactttcaaggcattgatacgaataatggtttgggtggaatcctagacaacgtgctcgaaatggaaagttccccatggaggacaacttgctccaaatggaaagttcctcgttgaggacaacatgctccaggcggaaagttcttctcgaaggcaacgacgaatgtctgacacaatataatgatttgttccttctattcaattgtcagatgtttttcatgaaaaatgaggataaacgtaggatcatgattccactactctgattgtaacgtcttactagtttaggtgcgctacaatatttttcttaattgttgtgtacacctttgcaataaaagagtttattgaaaaatgtgttaatttaaacttttaaataaactataattttgggatcttgttaaaagtttacaa

SEQ ID NO: 379941 - DNA, 7606 bp, Cannabis indica
tttttttttttttggtagatttagtagatcattttttttttggtggtttcagcaatggtttggagtatggtgttagtatttttcataacaattttgaagtgtttttctttattctttggtaaagtttgggattttatcaaactgggttttcatagtttttttgttgtatgtgaagaaatattcttgcatgaattcatctttttcttttattttaaaatatttatttttgttctcctgattaatgggttttgtttagattcttgatttggtttttaattatttagtatcagattggttctggttttgcttttgaattgttcttgttataatgtcaattgattttagaaaattttgaatccatggaatctctatagtttacacagctcttattctatgaagttaatcagtatatgctaatccatatgaataattttaaaacacatgctaatctatatgaataattctaaaacacatactttatttttttatttcttattaagaacattgctcctttttgggacactattttgttttttcttcttaatgagtcaaagttgggtaccaatttcaacggttagttttctggatttcttatttttgtagattatatgtgtagcatgtgtcataattgtggtgtggaactgaacaagccaaaggaggcaaggaaaatagaagagaatgtgaacggtttagaaattaccacgcaaggctccattacgtcttgcaaatgttgtgaggttaagcatgagcaaggaattgagacagatagtagaagaaacagttcttatgtagaaccaatgatcagtccaatggcttctttgtctagcagcgatcggtctgtatctagttgcagtaagttcctttcggtttgctattgccatcttactaaagttcaattgtttcacagcttattatgggttctattgttttatacttttatttatcttctgtttttttaggtgagatttcggttgatatgaacttacacgataggtatgtgtctttgcttctttgaattcggaattatgtttatcatctgtatcacttttgggtgttttattcatatgtacttatactacttgtagggctattcaagaaaatggaagttatagatcatattcacatatagaaagcaatggtaagactctaccaaagagtaatggccatgaagaaaaagataatggtgttgaagcaacaaacaactccgttgatgaagaaactgaggattcaaattcctttgaagatgatgttaatgcccagatttgggatccccctgaaccagaaaatcaagaagatgatttggtgggcagtgtggctttcaatgacgacgatgatgaatgtggagatggcacgccttggggaaagccaagttctttgagcccttcaagcagtgacagaagtgggaattataagtttgaggaaaaacagagagctatggaagaggtgaagaatggaaagtttaaggctcttgtttctcaacttcttaaattggtagatgttgccccctgtggacaagatggtgagaattgggttgatatagttacttctttgtcatggcaagctgctcaatttctaaaacctgatgccattgttggtacaattgatccaaatgattatgcgaaagtgaaatgcatcccaactggtgctcgcagtgaaaggtaacagagttaggctgtttgtaattttaatgctcttcagattttctttcctcagtttaagatcagttaattgtttcgcatattttctctctgtattttaataatgttcattctctcagttaaatgtattttcaaagtatgtttcaagcctgaaatttttgatgttgcagccaactaattcaagggttggtcttcaagaagcatgcagcacacaagcacatgccgactaaatacaaaaatccgaggttgctgttagtccagggtgctcttggccaatcctccagtggattgtcatcatttagtactatggatcaggtaatttatcttaaacatcatttttgatcatgtgaagattatgcttcttactgatcttatgatttggttcaaacaggaaaaggattacctgaattctgtgattgaggttttagcctcgtgtcatccaaatgtgattttagtggagaagtctgtttctcgtgatatccaagagtacactctgaaaaatggaatgacacttgtctttgatatgaagctccatcggctagatagaattgctcgttgtacaggttcgccaattttatcgttagatatgatggcaagtcaaaagctaaaacattgtgactcttttcacattgaaaaatttgttgaggaacatgctggttctaatgagggaggaaagaagccaagcaaaacattgatgtttattgagggctgtcctactcgtctgggttgtacggttagtattcttttctttgtttaaacaagaattgcttatagataatttagttatttattgctctagcatgcttagccagtaataatttcaacagggattcacattgctttggtgaattgattttttaacgtcctaacattgtgaagtgaagtaattgttttttgcatgatatgaccttacagattttgctgaaaggagcaaagagtgatgaattgaagaaggttaaatgtgtggttcactgtgcggttattatggcgtatcatttgatacttgagacttccttccttgttgatcagaaagcaatgttttttacattatcgtctgctgaagaggcaaatgtactgtccagggatcaagaacccactaatctagacattgatgcatcctctcctcggcttgaggcttctgctgaaagtaagtcacatgatattccaatatccagtggctttaatgatggagatttctacaactccaacactgagtcagacggaaattccctgttttatgaaccatatagtcctgcgatactgtctggcttttcctctctttcagcttcttttaagaaggctgttggcgaaaatttccctcttgcatcttcttcttaccagtcactttcttcataccttggtttccctgaaagtgagtcgaacgataattgtatcaaatctgtttctggtttaacatctcctaaggatcttgatcattatgaggctgaagataagagcagttctgatgaagagaagtctccaaatgttgaacagtctgattcttctaatgaaagctcggaggcatctcaagaattgaaaaatggtgactatgatgaggtgcaaaccaaggatggcatcaatggaatgttggattcccagagtattttggttttaatgtctaagcggaatgccttaagaggaactgtatgtgagcaaagccatttttctcatatcatgttctacaagaattttgatgttccacttggacagttcctggttgataatttacttactcaggtatttttttgaagaacattttatcattgtttcatctcttctgtcactaacttctgtaattccctatttcataacacatgggttagattatttgaatttgaatgccactcatgaaaactatatgatgcagagaactcagtgcgatgtttgtggtgaactgccacaagctcacgtatactactacgcacatcataagaagcagttgaccataaaggtccagcggcttcatcctgaaaagactttacgtggggaagccgaaggaaaaatttggatgtggagtcgttgtggcaagtgcaaacatggagatggagtaactaaatctacgaaaagagttttgatctccactgctgctagtaaattgtcacttggaaagtttttggagctcgggttttcacaacactcctcatcccatagattatctagctgtggccattcatttcatagggactttatctacttcttcgggtatgtattctctgtgaactttggcatatattattggacagcttgggattgtatttattgaacaaattagaattgtattagcaaatagtttactgtttcagatattagcaccagaattgtatgtgattcataattagtttcctaaaaaaaaaaatatttaaattcttcatcattcatttgtgctttcaattggtttctgttttagatagtgaccttatcaaataagttcaacatgtcacaggttaggtcccatggttgcattatttaggtattctccagttgccatttataccgtggctgtgccacctcagaagttgcagctcagccatacaattaagcaagatgttcttagggatgaaattgagaatgtaaatttcattttatttctatctttgtttgttatgatgcttttaatttttcctctattcattaagttgatcttttaatttcttaaaggtgtatacgaaagggatattgctgtttacagaggtttcaaactcattaaaggaactcaaatcccaatttgagggcttgtctttggatctccaaggttctataaaagaattctccgatattgaggatatgttaaagcaggaaagatcagaatttgaggtcagcacctaaatatgttcagggaacttttgtgaaaagtttggatttggcatgactataatgttgcatttagtcgtaaacgctttcatacattggaatcgtgtttttcttgaggagctttggtttcccatgatttgttgtgcagtttgtttagttttttaaggttatttattttgttaatagaaactaaactcatgttaatttctttagttcttttccttaaattccgtgtatgctagaactacttttttcgggtattctgtaagacttacacttaatatgtaatttaaacaggaaaatattcagaaaattttctcaaagaatgggaattcagaccagactgctcatagacttctcagtttgaatcgattactgtgggaacttctggtatcatcctgcatttgggataggcgcatgaattccctactctctcgtgatatcgtcgtcattgctaattctagtgtcgatgggaaaaaaattcaaggacaagagagcaacggtgttgcaccagaagtgaaggtggatactgagatgactatcgaaggaggtgaactaaatttgaagttagatgcctctgcagatgtagatgactcttcaaccaatgaaattccgattgaaggtccttttgacgaatctagatctagcgatccaggtgaagtgtctcttgttcatgaaggtattgatatccccattgagggtgagttaagcccgaaagaattgtccagagaagattctgttgtgatacctgacaactatcattctgaggattctgaggcagataacgaaccagattctgatcgcctacaagtgaagagatcaaaaacaaatttcccaaatgttagcagttatgattctgtagctgatttgaatttactgaagaaaaatgtttcagagacttcacttttgcatcactcagaaaattcaaagggatggttctggtcaccatttgctgagataattggtttagaaatgagggaccttcaaagactatactttcagaaattcgaatctgtcagtagctatactagggaaaatatacccgaagcatatcaactgatatctgaagaaggacgaagactgcacattcctcttgggacagatattgtttcagattacgagggcgaactctctagtataatcgcttgtgcattggcattgttgaaagagggtgatgttagtatgaaatctctcgagagttcgtacagtcttcctcatttttcttcaattacttcctcacgttggtcttcaaacacttccactgattctgattcagtccacttaacaccaagtgtttcactagatgagtctcgcttctcgagttttgatggattgaatttgctggagtcacttgtacctcctggaactgtcaatccggtggttcatctcggttttgaaaaatcacttggaaagagtcgatatacagttgtatgtccctacgccaaccagtttcgtgatctcagaaacttgtgttgtcaatctgaggttgactatattacttctcttagccgctgcaagcactgggatgctaagggtgggaagagcaacgcttttttcgcgaaaactcttgatgacaggttgattataaaagaaatcaggaaaattgaatttgaatcgtttatgaagtttgctgaggattacttcaagtacatgaaggcttcctttgaagtggggaaccaaacttgcttagctaaagttcttgggatttatcaggttcattctttgattttcttctatcttcaaccatttcactgttgtcgtttttatttagatcactaacacttgaaaatctatttcaacaggttgttgaaagaccaaacaaaggcgggaaagaggtgaggcatgatctcatggtgatggagaatctcacctttggccggaattttactcgccaatatgaccttaaaggcgctctccatgctcggctcaatacaaaatcaaaagatcccggtgatgttcttttggatcagaactttgttaatgacatgaattcttctccactatatgttagtagcacagcaaagcgtctcttgatacgagctgtttggaacgacacagctttcctcaatgtgagtacttaaatttttctgtttcgggttacattttcactcaataatttcacattttcatgaaagatatttctgtttctgtacgcgcagtcaataaatgtcatggattactcattattagtggtagtagacactcaacgacgagagctagtctgcggtatcatcgattatctcagacagtacacatgggacaagcagttagagacatgggtgaaatcttcacttgttccaaaaaacttgcttccaaccgtcgtctctccaatagagtacaagaggagattcaggaaattcatgtctactcatttcttgagtgtcccagataactggtgctcgggcaattcctccggcaactttgaactcgatcgtgtcagagaatgattctttctcaccatccaaatggttaggtgacacaaacatggttttttcctccttaccccaattcgttttctttaacttcttgcctaagaattagattctctggttcggtttacaatcgattcgccaatactgtaaatagtctacgatttcatatgagtcagctatcctatatatcctgccctgttattctgcaaatttttagagaatttctggggatagagagtcattcatctaaagtacaaaatgtgcagccaagtttaattttttttggtattgttgcctttatatttatttatgtatagccttttgagaatatcagagttgctctgataaatagtatcaatgaaaagtttttagctcatcattctttcttgtacatgaaaagaaaagttgttaatggatatatttggtgccattatataaatgctatatcaattttttatcttccccttttcttagttactgggtttttttgctaagatttttttactacaacttgaagtagtatttatggagaacattaaaaagaaatatgcttggatttagatgagatgaaatgagaagcaaggaaataaggtcgtgtgtttggttgttgggaggaatgaaaatataagaataggaatgttgataactctatgaaaatagagttatttatatctttttggacattaaattagccttgttctcaag

SEQ ID NO: 379942 - DNA, 6383 bp, Cannabis indica
cataggggtcctatggtgtcggttatttttacccctatagcgtcacccggaacagcgtcggtagcgaattttggcaaaactgacgctgaaagcccttaaaaaccgcctctaaagcccaattttgtagtagtgagttattagtttttattttttaataaaacattatttaaatattaaattttacattaaagttttgtaattgtgtattagagaacaatactaaaatttgatataaatttattataaaactattttttaattattttttgtgacaaatatagcacaaattttacattttctattgaagatggtgttagaaattacaatggatcagactattaatatcttacagcgtaactaagaaaagaaacaattaatacattaattctaggcttttagaagctgttttatttataattttttataaatatcttttttgatttttaatttcttaaacgtttacttttattttacgtttggtaacattttttaattagttttctgttttttgattagaaaagtgaaaatattttccaaaaatatattctataaaactcttttcacttttcaatttattaatttagaatcaaaatttatttttttttttaataagagaaaattttttattcaaaaacaaagcaaagatataaccaaaacactaaccatggccgcaactaacaatacctactagccctctataatgcttaatatgtacttatcttttttgttacatttagccttgttaatgttcatcattctagctttgacaacaattttaatttccctgctgatagtcataacagacatacaaaacaaataaaaacgcatcagtttttattacaccaaatcatacaaaatcctgctgcatagacaacattagtaacataaaacttcagatcaggttttgtctttgaactccaatcaatcaactcctcgaagcctcttggccattgaaaacagcccaaccacttttagatttctgctacaacttttttggtatagatacagtccatgaacacatgtttgtgatgctctgtttctctctctctctcaccggacataagcttgaggaaatattcatgaacttgctcaagtgatcctgagttaagagatggttgttaaaggcgtaccaatagatgaatctaaacttcgaaagtttgttccaaactactctagcataatcagctttggtcgccacaatcaaggagttatagaatgtactttccttgaattttcccttgttgatagcaagcttcaaggtaccttcatctgtcaaacttttaagctataagatctttttgaaataccaaatcatatcctacttaatatgaatttcccataagtcttggtccttcaggtaaatggtattaatccatttaacccgaaggttatcttgctcgctggaaactgaccaaaggtactttgccatcacagctaaattccatttcttgccttctcgaaacccatttccacctaagctcttaggaaggcacgccttctcccaggatgtgaggtggagtttgcttctattctcattaactccctaaacaaagtacttgcaacacttctctattgcttttgtaattttttgaggcaaaatgaagagactcatgaaaaagttttggataccgaagaggacagaatgaattagttgagctctactagcaaaagacaagtttttacttgcccaacaattaggcttcttattaagtttatctaggataacaccacagtccgaagccttccacttggttggcctgaggtgcactcctaaatacttaaggggaaatgaaccttcatccattctaacaacatccataatctttcttttacaatcatccttgatgccgccaaagtagatatgcgactttgacttattctctttgagccctgttatttgacaaaacatcttaaaggcatcaaacatgtctttcacaaatttctcattccccttacagaacattataagatcattagcaaagcataggttagttagcctcaaattcttgcataaaggatggaattcgaaccttttttgttagaactctaagctagtaactgagtcaaatactccaaaatcaaggcaaataagagaggagatataaggtcaccttgtcggaggcctttctcccctttgaatgaaccttggagccttccatttagcagaagattgtattttctgcctctcaaacacgtaagaatccaatgaatgaacttcgaggggaagcacaaactgtttaagaaatcttctataaatttccaatccacagtatcataggccttgctcaaatcaattttcataacacaacgagtcaaaatattcttcttattataacctttcaagagatactgaaagattaaaatattgtgaaggagaagcctgttcttgataaaagctccttaattcaactgaacaagccacgacaggactttaaccatacgtgagaaaatcatctttgaaatacacttgtacagtgtattgcaacaggctatcggcctatagtcatttgtatccttcgaattatcatttttgggaataagggaatgactgtttcattcaacaagttaggtaaaataccctcctcaaagaataacaacatcactttagaaattacttccccaatttgattccaaaggctcttgaaaaaacctgaaccaaagccatccaaacgaggacgttttgacgaatgaatcccaaacatagctttcttgacattattcttattgaacagtcttataattttgaattgctgctcaatatctagcttatatccaagctaaatgcaatcatttcttatcctcctagttgatgtgcttttcctcccataaatcctttcaaatggtttagaaaatgctcaactacttttggataatcatcaaccacttcatcattccgagtgtaagttgtaatcctattttccattcttctttttttttttcatgaaatcatggaaatagctagtgttctcctcaccccttcttagcaaggtaactttactttgttgcttaagaaagctgatgtacctgttcagacccgtggcatactccaggtagcaggttttttcttcctgctgcactaagatattagtaggatcattagcaagattctcttgagttttattgtagacatccttcttccttttataatcaaaagctacatctccaacctcttatctataaaacttctttaaagtatgtttgacttttagaagtttcagcataacactttgtaaacctctcgaaccagtcccccgattctagctgtttaacataatgtcactacaccctttgaattgagtcagtagttacagatctagcttgatcccaacattacccaattcatggttttttacaatataaaagcaatggtcttagacactttcccatttgaagcatgcttcagctttgggaaaggtgttaaacaatttctcattcacaaaaactctatcaagcttcgaaaaaattctattaccaatgtcacgcttattggacaaagtgaaatgagctcccgaacatctaaactcttcctcttgaccgttacaagctaatcttgtttctcaatctttttagccgagacttgccttctcccaatcctatcttaaaagctgaacatggagttaaagtctctaaaataatccaaggctttctgacatgaccaatacctgccaatttatcccaaaggaccttcctatccataagcatattgctgccatatacatcagtaacataaaattcctccttaactcctgtcactttcattttgcaatgaacaagttgactatcttccatcaacacctcaacttttacaaatttagattgccaaatcaataaaatacgataagaaattatattactagagtaataatcctaattaggaaaattattcattatcatatcttttaccttctcatgctttatattcattcaaacaacgccccaaatcccaccctattctccctacaaacttctagaatcgactttttcttctcctttttattcattaccctcacttcaatcccaatatattgcaaacatccataaaaaaaaagtaatttgattttgtcaccagcaccctaccaccattgtcttcaagaactacataccctttgttggtagcagccactttagaaacctctctcgtctgtttgaaacccctccttttaggtgttatccaattttcctcattagcattacacaaattatggtctttaacaactccctctttacacacagttgttttatcttctgtcaaactctccacattaagctttagattagtcttaacactctcctcttccttttcttcctccttcttatcagatacttctgctgtcttatcagccagattaacctcagcaatattatccacaatctcctctatttttccttctttaatccccttcttcttccacactacaccttttcctttgttgcaatttgctactatgtgtcccaagaagtcacaagtcgcacaccttgaggggagccattcttattccacactctgttctacaagttgtttcctttcattaatgaaagatatggttttaggaggttggtcggatatttccatatccactaacatcctagcatacttcaccatagttctactaaaagtaaccttgtccacaatgattgggtttccaattgtactcacatgagcactaaggttatccttccccaatattgcagtccaagacaattcaatcgaatctaaattggtatcaatttcacagtacaaatagaatccatatcagtggaccatggcctaagcacaataggtttcttaacaaagtgaataactactgtcttcattatgagaactctagtttctttatctctaaaactcaccaaagtgaaccccgagtgcatactaacaatcttctcaatccccaagttaccccgaactctcttgataaacccctcaaacaccctaaaaggaggatttgctcccaaaacaatgcaaacaatagagttttcccagtaagttggttctgtttctacttcatctatgtcaagtttagcaactacttgatccccaatcttcattgattcagtaaaattcaaatgggtcgaaggagtcctaacctggtttgatttgaatttggtccatatttctttagtaatgactctctctgccttctctcatggcgaagaaaagcaggtagtgtcgaagttaaggatttctgtttcaatcgataggaaagatgatgatgatctcccttcgatccaagatgtagttgcaaatcaacttctgatggagacttttcacgatccgtgcaaaactctagaagcagatctagcaaaaatggggataggagatagtgagatcaaagagacacctaaatcagtgagctgggcgaatgaagtagagagaccaaacttctacgcttctgctaaagaaaattaaaaaaaaaaatttaaaaaaacactttcataatttagtcaaataatcttttctcttaattaatattttgcactctgatcccaatatggaccttgagacccagactccagccctaaccgcagttccagactcagaccacggctccggccctggccctagatccggacctggactcgacttagtaaaattaaaaaataaaagttatagaatacatttttattttctatttttaaaatttaaaaaataaaagtgattataaaacacatttttattttctaataataaaattttaaaaatataacttttattctcatttttgtgattagaaaattaaaaaaataaaagtattattaaaagtctcttcaatatgttagaaagaaaaaacatgacaaaagtacattaaagactaataggaaatcaacatgaggagagataaaaacatgacaacaaatgatatatgtagaaatagtattaagcaaggatggacccactagtactaatgtaaaggttatagtcctactaacaaaaatattaacttttaaaaaattaaatgtaaattttttaatttaatacttatagactaaaatagtagaaaaacctccgcaaaattaaataaatctaataagagtgattgtaatataggtataaatatttttttaattataaataagccgtcacaaagtaaaaattctaagtccatcactggtagtgagaatatgatgatagaatagtgtgagagagtaaaaaaaatggtgcgagattaaaagagaaaatggtgggaggaagaaagtaatatagaaaagaagaaataaatgataagtgggaagaagtaatagtggtcgagttagaaaggagagacaagggagttgtttggcttcataacttaaaaactgttttgagtttttaaaaacagaaactagtttttaaaaacaaataagggtcgtttggcaaaattttttaaaaatgagttaaagaa

SEQ ID NO: 379943 - DNA, 1713 bp, Cannabis indica
aaagagagaaagaaattgcatatccaattcaacatttgcacatataaaccatgggaatcatatagtttccaacttacgtatcataagacaatgtaggcacaccgctccaccagccacctacacaaatttcatgtatacttaagagaacaataaccaaaagggataagcagacacaatccgtagttagattttacatgtaagagattggtaatcagagtacccataacaaacactctccttccctttgacacgttatgaacttataactaataactgtaaactaggcatccattaactttgattgaaaggagagtcacatttgtgtagtaatgtggaacatacccatcacaaaacttgtcaccttcctggaaactgacccaggatccgcactgttatcgacttcgaatatgggaatccaggttgatccttttacccaagcctacagaaagaattgaaggcaattgtagtgaaaccaagaatgcaaacacccagaaaacatacaggaatgccatgattccaccttggaacatacagtattttcataagattttaaaaatgccaataagaactaaaaaaaatgagaatgagactagagatagtaaattagtaatgtacagtaatttgattctttttcaaactgcaactgaaacatcaagaccagtaagttctaacttcataaaatttcaatcttaaagaactacatcacattttatttgtttaaaggagaaaatgtatagatagaaatcatagaaagttagttaccctttggcgttctgtagaaggacgaacatcgagtaaggtttgttagagagttgaattgcatagccagcttcttttggtgtcaataatttcaccttttcatctcttacctttaattaaaagcaatgaaagtttagaaaaggaaaaattatattgcatttatgccatttccatttacaaaaacttagttcatcaaagtaatcaggaataattaccaaagcttcccatctcttcctggcagcagccatatccttcacttgttttaactcgtaatcttcattttcagcttgcattcgaaccccaaccctcttcttgaaaaaccaaaacaaaagcatacataaatcaaaaatggcagctctgtttagtagtagagaaaattccacatgcaatcaaatacccagatataatcttaaattaaattaataaaacgaacaaccattaaagggtaagtttgattaaagatgagagcttgcatacaaaatggcgggttctatacgaagttgtgagttgtattgaggaggaagatgaagatagctcccaagtggtttggcacagtgttgttttggaggaaagatgagaaattttttggttatggaaatgaggggaaagagtgttaagagaaggaagccccagagcttccattggtagtaagaaccggcaacaaaagcttctggtgtatcaaaagttcgaagaaaatgcttatccaaacaccatagttgtgttctgtgccggatactttgctgaaatgaccttcttaaccctatagattaaaatcatttctttggaaaatgcccaccaaatccaattataattgaaaaatgttgtagccccccatattatatataaatatatatatatctattctatataaaatatacttatataactgaaatttatgggtgactttttattttatttaataaaataataaaatattatttatataaaataaaa

SEQ ID NO: 379944 - DNA, 6693 bp, Cannabis indica
ctggcattcttttggtcccttgctgcaagcatccacatgttcaggatttaatcataatgttgaagaaattgtcaaaacaggattggaatattataccgttagactaattatgcaacgcattgaataaataaaatacgtgggatcacataccatgaatagggaagcaggaccaagaggtgacaaatgtgcagaatcaacaacaattggctcattgaatacataggacttcaacacttcggttgatgttgtttgaacatagccaaaatcctgacagaagaaaatgatagtcaagtcacttccaacagacaaatcacaaacgtaagaataatttccaggattataaaaacttcaatgttcaccaaaaaagaggatgcagttcagttaaaaggaaacaattagacaatgctatcaaagagactaccattcctctcttacaaccactacttatacaggccacagcaatgacaagtgaatttctaaatgcaagagaaaagtgactgatagtccaagaagaaaaggaaattttgaatcttatatttccaaccatatatcaaaactacctagcaaataaatatagatgctaaaaaatatgccaaccaaaaatgtccaacaatatgataggatcttacaatgacttcatcaagcaactcatacacgagtacaaaatttctccttagagaatcttcattgagaactccaaggtaatctttgatgacacgggcaattctttgtaaaagctcgaagacaaaagaaggggacaaattgattcttgttgttgcaacaaacaataatcccacaacctttacatgaaagtagttgacaccatccacattctatcaattgcacatgaaaaaacaaattagtacagcttatcaaacttgtatacaaagagatccttcaatcaaacacagaaaataccacaaggaagtaattatagctggaaaattatcaacaaaatttatacttttttgcaaagaaataaaattagtatagataaatagtttttttgataaagtggaaaataaaatatgtctcaataattatctatgaatatgccatatgttacatctattgatgatctatcatcataagactacttgatgcagtagctctgccttatgtttattctggttttattgttgactcatgacatagtgaacagtcatttttgcttatttcttttaagcttataatttattccaataagtgtaccgcaaaacaatatgttttgctcacaaagaatatcctgtacaaatcctattttcagaatagggaatagcagattttctagaacgaaatgtccctttagtattctattcattgtatgaaaatccctcggcagaagaaatattgcagattcttccggagctcccagcccaccaaaattgacttactacgtcacgactacagtcacaacaagcagaacatccctaaaatgggcattaaagaaaagcagcgagtagatacaagtaggtctttctcttcatagtttctggatagaagaggtttcccacaatattgcctgagttctatcaattggtatcagagttcagatcctaaaatgtaaggttgaaaggtcagaataaaggtgaagcttaagataagaaagtaaagataatgagcaaagaatagttgaaattatcatatttggagaaatacatggtgtcggcttaaaaaatgcgcaagttcggagaagctcaaagagacgtggttaatccaagggccgactagtcaacaacttggtggcagctctagtaggaggtgcaacagcaacccaagtcgaattgaaggtggcaaaaaatccatagggcacgatgatggtagacggtggaggtagcgcaatgatggcagatggtggaggtggcgcgctgatgcaaacaatggagggatatcgacgcagttagagatgagtgctcgtgtgcatgggttgcggcgctaaaagcaacaatttacgagtcaagcctaagtgaaggtgggaacaatttacagggagcacgatgatggcagacgatggaggcggcatcacaatggcaaacagtggaggtagcgcaatgatggcagatggtggaggcagcgcgatgatgggagacaatggagggatatcgacgcaattaagaatgagtgtttgtgtgcatgagttggggacgctaaaagcaacaagtcacgagccaagcctaaatgaaggtggcgaacaatttacagggagcaagatgatggcagacgatggaggcagcatgacaatggcgaaaagtggagtgatattgacgcaagtagggatgagtttttgtctgcataggttaaggacactaggagcaacaacaaagataactttcacgcaatacatgccaacaacaatggaggcgaaagttgataaaaaaacaaaacaatggaggcaaaaattgataaaaatcaaaacaatggaggcgaagggtgatgtggtagtcaaatcgacagctagatatgcctgggttaaataggtcaaacccaaattcttggagttttagggtaaaaaatatttcactctaaatcaacttacaaatgctcaaaaatgggaggttgatatagtttgttttgaatgagatgcactttcttggtctcactggctacatcacaaaagtttatttcgaagttggcctgagttgaagttgctaatggtgcaacaatatcgatcatcaaaggagggaaacatgttgcaaagattgtttgctcttaagcaaaatagtacggtgcctgagtatataaagacgatttgagtcacctttgaataacaattttgatgagtccctgagaacaaagttggtttgagttgaagttactcatggagcaacgatttcaaacattaaaagaagaaaactttttttttgttttcaaagaagactcgtgatagagttattggaggtccttcaaatttttttaaacatttaaatgtatgacaacagagttgtattgggaatgaatgagtgcataaagaagtatctacaagagtctgtggtggccattggccaatgtaataattattcaactttagcgaagttggtttattctttattgtaaccaattccacttccaaggatggtttgcaaagcaattattaaggattttattaaataacttctaaaggcaaatgggtttgatatggtatttgtggtggtggatatactgagcaaatatagccactttacgactcttaaattccttagagaggatgttagaatgcatgggcattaaaatccaccattttacactgaagcaacgtttttcttcagcctactttggactgaactattcatgttgcaaggcatgaagttgaagtgtagcattgaagtgtagcatttcattatatctgcaatgagacgggcaaacagaagtgttgaatcgttgtatagaaacatatttgagttgttctacaaacaacaaaccaaagaagtgggtagggtggctgccctgctgtgaatattggaatgacactacatttaatgtttccataaaaatgacgcctttcaaagcattatatggttgagcacctccaagagtggtgcgagatgttctacagcagtatcttcacaacatcaacatttattggagtgggatcaactattggatgggactcatgggagaatacattttgcttacacttaaactctttggtatagaggctttggctagaagagttgatgagaagttggctcctagaatttatggcccacgtaagggaattagtaaggtgggggaagtagcagtaagctagaattcttggaagtagcttaaatccaccctttttcaagtttcacagctaaagaaagcacttggaagttggatttagtagttcagcccaagaaattgatggaacaataatgctctcaatgcaaacgagaatgaagacaacaacaatagaggtggaaggtttgattaaaagtcaaggcttatcaaagcttgaagcaacatgggagtcttttgaggttatgaagttccacttttctaactcaagcttaaggacaaggttcgaaatcagggtgggacctatgtgaggtgcaaaaggaaccaactaactaagttgttagtgttagtggctgagtgttttgtaattgttgtaagattgttagtttgtaggatatggttgttagttagttgggtaagttgagtatagaatgattgaaaccagattacagaggtagttttggacaaagtggagattggcgatctttatttagctactgtgtttttgtatgctttagtctctaatttggagactaggatttcagaaataaagaagaggtttttcatgatattggctgagttctatcaatgatctatcactataagacaactccggtcacagctagcagaacatgcttaaaatgagcattaaagaaaagcagagggtagttagataacaattattttgaagcttcaatccgacaatcaacagcaactgagagaaaccaaagttaaatacgctgacataaaaatcaagattataaatttttcacaatttttgttaaatgatcaacgaggaacagattctacagccgtcgcatgaataaactcttcaacctttcagtaagataatacctacaaagacagggggagcttcctcttggccatcttctttccaaaacttcactttccggaagaatatctccgcggtttctttctgtacttcacctcgatctacattcatgagaagaaaaaaaaatacatatcatttcctaaaattttatttataagaaaattaaaaaagagggagagtgcccaattaattgcagcaacacttggatcgtgagaatagtttattagcatttaaagttaatccgtaaataatttttgctagaatgaatcaatcatatgccaaacagcaacaatattagaatgcaaattacctatgtatatacaacgtatctttgagctgtttaaaacgaaaacgaaaattaagaactggatctgagtcgacttaagagtggactcatccgagttggtaaggttaattgatctggggactaataattgcgttattatatagatccaaccaaaaaccttatccgacaactatcgtgattaacgtaagaattatcgaaaaatagatcgagaaaatttgagagtgagagcgagagaaggactcacagtcgcgaaagacgatgttatcgccgcgctgagatagcacgaagaactgcgagatcatggctacggctacttcggatctggtcttttgctggaactgtcgaactcttttccagtttccacacttataagaaattgtcttttcttctcaaaaatcaatatatccatctatctatctatatgaaggggaagtaggcataactctaaaatctctttaaaattagtttttttttttttggccttaattcttttagactaattagcaatttttcttcatatactaaatcataccttgaacttttttagtcgttaaaaattcctcttaaattattgagattgttaaatttaaagacttttgtctaatttaattcaattttactatttcagtgattgtttatgtactaaaacatactccccatactttcatatctaccaaattatacccctcaaactttgatatgtactaaattatgccccctgaactttcattcatgttataatttttttactaaaattagacaaaaatccttaaatttaacaatcttaatagttcaggggaaatttttaacggtcaaaaaattcagggggcatgatttagtacatgtcaaagttcgtgaagaaaaattactaattaaccattcttttattttttttatttttttaattttaactagtaaacgattcgcacttcgcagcaattattttaaaattttctcatataatttttttctttgtattttctctaataattttacataatcacttagaaaaatatttttttagataattataaaatatcttttgtaaatttttctttgaaataataaaaatataaaaatatgaataaaaataaaaataggaataaaaacaagaataataataaaattaaatttaaaataataaaaaaatacataaaaaaaaaattaaaatacttttagttcattcctccctcttaaaataaaataatcattttataaaaataataaaaaagcattatatttgaataccttaaaatgcaactaaataaaataatagaataaaaattgtttcattgacattccatttcattccttccaatcaaactgctgttaggttttatgccctaaataaaactccatttcaatgtaatctattttattcaacatcaataaagaaacagaagtatttttcattcatttgtgtatgttttggttcactttatcaattgcttgtctatttgatttataaattcatcttaaacccttttcacatacttgatcatgtttattgtgctgtcatcacattggaaagtaaacatgactatgtgaataaagtttcctagatttatcagacacagggttttactgatatgataatctacaacaagagtttacttgtatttggagaaatactatgttctttccagaacattggttaaagtaaagctcaggttggatgcatggagtatgcatcggaagggaccgatattgaactttgacttagatttaattaaacttaccgtaaatctattcaagtcaatatcgccaagttgatcctagatcaaatgatcttaatcctgttatgattggctcaatc

SEQ ID NO: 379945 - DNA, 4295 bp, Cannabis indica
acgtggctcgctacgtaactctctatctagtatatacatacattgacgattaaattttagttcctcgttcgttgtataacgtaaaaattttatttctaatttttcggttttctattttgaatctcatatgcattactacattaatataataatttagatcgaatttatgtatgaaattaaaatttagaaaatcatggagattgaagtttttttttttttttagataaccaagtttcacacttgatatgttttgtgaatttaaagtccatattttacatgttttcaatgcatgaaatatatataaatctcttaatttttgcatttatattcttttagaattgaaatcatgcattttggttgttggaaatggtttttccgtccaggttggagttggatccgcacaacccgtgtaccaaagaaacgggtcaaatgacccagctgctaaagaagatgaagacctcatacgacatgtcattttttaggacaaaaaaaatctagaaaaattctgaaaatttattattttaattaattttgaaattttattttattttcttaatattgtttattacttttttcatcttttttttttaaattatttatttgttatttttctcttctcaaataattatcaatgacaccatgtgttcttagtcatgcctttcagtttgacaaatgcacgagcaacatttcaagctctcatgaataaggtatttcacgattttttgaagcgctttgtgttagtattttttgatgacattctcgtctacagtccctctttagaagaccatgtgactcatcttggtatggttttggagcgcctaaaaaagccttcttctctaaccgaaagaaatgtatttttgtccaaccccaagtggagtatctcggtcatgtgatctcggcttacggggttgatacagatcgtagaagagaacatatccacggatttcatcgaacgacttcctctttccaatagttatgactccatcttgttagttgtgaatcgcctcaccaaatatggtcattttatccccttttgccaccccttttacagcacctacagtagtagcagtgtttgtagaagagattgcgaagctccatggcatttctcagttgatcatcttggatagagacaagacatttctcagtttggaaggaattatttcagttgtaaggaacaactccgaagtatagtgtaatctatggacaaaccaaagtggttaacaatatgatacctaaaagagtgctaagcaccactgaccctctcatctgataaagttactactagataataacattctcattacaaacatattgcttaataaacaaataagcaactttacttagttctccaaaaaaaaaaaaaaaaactttttacatgatctacaaccatgtccactataataagtgctagttcttcagtccatttcaatcttaactctcacatctttgtttggcttactagagctagcaacataatcacctgctaaacaatgagaacttgactcatgttaattaatatggtagccaagaaaattacaatattattagtcacatgaactgagttcaatactactatagttgttcacattcacaactaacctttacaccattgaagaccttcacatacaacgcggcggacaatgtgaacttgaaatgcaatttcagttccatcaagaagctcgaaaatgcagacatcgccaacttctattttattgtcattcacaaatttgtgccaaccacaacagagtctagaaatagaatactcatgtcttagaatgcttgttctaagttgcacagaccaatttttaccatttggaacacaaagaacagcatcgccttgatccttaaggtatctataagcaaatttttgtggtacattctgctcaaaaaatgacagaggagatataattagatatttataatcaactactctacaacttacaagtattgtgaaaagtaatgtagatcatatagtgagtacttacaaaaaactcagctttaacatatgatggttgcataacagccttgaaaaaaggtctttcagattcaaaggaaactcttgcaagaattatatttttttctagccaaagatatgtaagggctatttctacctttgaattctagcaacagatgaaaataaagtgtatgagaaaacatgtaagtcatgaaaaaaaaatagagcaatattaggtaattaccagtaggacttgttgttctttttctcttgttctgaggccgagaacaaggtaaatatgaagatttctcccttgttttggcaccggaggaaggcgaaaaatgatacgagatttcgacacaatcatcttcaacagcttccttcttaggaacttggaattgtaagtcaatgttatcataaggataatctatctcagcagtactagtatcacatatgacaacataaaactcagaataccccacatatttaaaaattaacatgctgcctctttttatggagtaatgctttgcaaattctggccaacccttctctaaccaaatacttccctccttttctttcagcttcatattccattttgaaccgcatggaagcctgacaagcaccgattcggataaagttttccaatatttccttataaatttgcgaggaattcgctgcaagacaaaaagttaaacagactcaaatctctagtgaaatatactctcaatcaaaggttaagcaaatatgggattggtattacaaaaaaaggacttcccagttaccactaaaccagtaaagtcatcagaaatgcatacattgcatgtgttatgtgttatgtgtagtgtaagcaatatctttaggatcatataagtctaaaacaaacacactcctataggtctaccataccattcttgctggtgtagaagaagcacatataaacagattcaaattactagtaacagatatacaagcaattgtaaaaacaggaacagtacttgaacaagatcagttagtagagaatagtacaaactaaacaagaatccaaataatcaatttaatataaaacagtagggaagaatgacaccagagttttagtagattgagctatgatcaatgtgattcatactcaatagtcaataccaccatgaatcgtgaagaagttttattgatgatctttgatgacaattacagaaagaaagatagagattcaagccactaaacaatgtaacaaaattacatatcaatctcacatggggggagctatttcaagaatagacaatccccttttacatccctccgttctctcaaatattggctcgatcactatgtgatttctctctgtgtaacaagacaagcccccacccgaaatggcaggggatagagtactatttatagaggttaattgaggttgttacttaatgaaaactttattactggcttagaattataaggagtaatgttatgtgtttagtaagagaaaagaaagagatgaataatgcttacaagcatgtttgcttgaagagtctcttcaagaataatcttgaaaaagtggggagttcttgatgaaaatagttgctgctggctactgtctcccataggaccacgagacatggttgatcaacttcaaaagattgaaaaattactgatgagtagtagctgagagaaaattgcaagtcaaatcaacccatgaatgaatactaatctaaataaaaccaaaaccaagaaacaaaattaaaatctttaataatgctaaaattaacatacccttttgttaagattttacgattttgtatgcaaaagataaaaagatagaacctgtatgtagtattgtagttttggttacaatatttggggcagcaagctcatttcttctatggaattaaaagaaagcactatgacgtattatctaaagggaaacaagaaataagtcgtttttggtgatgatgagatataagaaacgtagtcaaataaactttatatggaagagagcccctgtttgtttactcattctatgctatgtcagtgtgttgttttatagaagaatctagtgcaccaattctctcttatgtcagtcttttgtgtaagagattcctgctgggatttgatacctgtaaataactccgctgtgctaccccatcctatttttcacgatttttccatgctgggctataaaaacaataaaaataaaaaataaaaaataattagataagacatcattttttttttaataaaatatttgcattaaaacgttcaaagaatattgtttttacatttttacggttttccaaaaaataatacgaaaaaacaacaaaaaataacatagatataacaaaaaattaac

SEQ ID NO: 379946 - DNA, 1748 bp, Cannabis indica
aaaaaaaaaaacaataaaacaaaaactagaactaaaggagatgcgaagcagttaaatactactaataaaaatgatccatgatccatcggctaataagctccaacttttaaacatgtataacatcagttacactatcttctacttctttcctgtcttcgagttccagacaaatgcgttgtgttagggacacaaaaacttgcactcaatgatgacataatttttaacaacataaatagtgtgatttcattttgaggaaaacataaatggtttttaaaacatgtcacatcatcgagtgtcgattttgcgagtcccaaacattactctctaataatttaagggcgtgtttgcttacctataaataatgaaaataattgtaagaaggaaagggtttaaagagaaatgggaagggcgaggactatgaattgagcaatctcctatcaatttgtataattacgtgggatttcagtaaactagtttctcaaatgtgaatgtctaatagatagacaatggaaacaattccgtgatttgcattaacacccgcaacaatataattcatgatcattactgttctaatagaatgcgatgcgatgttcctcaaacaacgtgctctgtatatcttagctttgcaagaaaactgaatacggtctcattactaaaataattacgatattaaattttgaaggtaaactaaaatgcaacaaaaaaaaaatatttttcatggaagttaatcggtaaccaaaccaagttttcaattctccataagacttaagataaccaatacaaatttcgaaacaagccccctactgattactgaccttagaagagatagtgatgccacgttcacgctcgagactgatggagtccatagctcgctcgtgagggatatcggcaccacactggcggagcagcctgtccatgagcgtggtcttcccgtggtcgacgtgagcaatcaccgccacattgcggattcgagtcgggtctagccagctggttggcaagggggatgcggcgcttgtagccggagcggccgagaaggtccgtgacaaagaggcgccgggcggggattggaggatgtaaggtttgacagcggccgatggagaagagcgagcggaggcggagattgatttgcgggcggatgaccagagagatcgaatcaacggacccgccatcttcttactcagttgaagattggcgagttctgacccaagcgacgaactcaggactcagtagtcagtgtgtgggttagggttttaacgttgttttctaactgcgaaggtttatgtcccacaaaagggaaagtaattaataatgttacatacgtaatacgtaaattatagctgtaaaaaaatggtctttttccaaagtttttacctgcagttggttctaagctatttttattccattacttatttttcaataattgtcgtttcacttgtttagtgtcatagtagaagaagatgtcacgaccttatttccatccagcattaatatttcaaatcgactacttggatttctatttcatcccttcaatttgttggacaactgtggcttaattaatatgtccataaaacactaagagcatgtttgttgcgttctcaattttcagtttttaaaattgtatttttaaaagtaaaaataaaaaataattttttgtcattttaaaatttaatagtattttgtacaaattttttaaagcttgtttttaaattttttcttactaaaaaaaattaatattttaacacctatac

SEQ ID NO: 379947 - DNA, 1331 bp, Cannabis indica
ttttttttaaatggtacaaaataataattcaatttttatcattttttcacgtaaacaatctgaagtcattttctctatcaccaacagataaaaaaatatatataatatataatcagttaagtcataataatactttcggatcaaaatattattaagttttcgtgagaaaaattgaaatatatatagtagcctttttgtacttgttcactcactgtcgtttactagactaatctctcaagctgtcgtcgttttacagatcattttgtcggattttaattaattataggtaattgataaggtttcaaattatgtgaatgtaatgtgatacattatcaagttcatgccagataatgtagactgttaaattattaatttgttgtcgtttgagaaagggcaacattatttagcaaaatccttaaaggggaatctaatagtgtagaagggagaccataacaaaatcaatcctaatgttttgggttacttcttaatccccaatgaaaaaggcttaaagtttttgaaaaatatcatttatttcctatatatcaaaattcccttttttttcttttaaaaaatattatataataaaagaatacatatattaattaaaaatacttttatattatattttattcaaatatatctacttttatgagtgagttgtttaatatactatcactttttatttaaatttaacatttaattacattaatttaaaaaatttaatgaagacatcatccataaaaatcaaaagtaaaaattaaaacaaataatttaagataaatatatatacagtgtaattttttctgaataaatactgaacctcgcggtaaagccgaaaatagaagtccaataaaaattagactcaagattcaaccatgtcaccagttaattatttttcaattttactaaattaatcttggcttttctgaaggttacagaacctactagacaacttagatttgatagagtttaagaagattttgatggtttgatcacaattctcaagactattattattgttattattttctgataaatagtgtagaacttgtttgttatttttgtggagggccggcccttactttataattgggttggcccaaaccttggtctcttatttctaaaaatagcattattttgatattttttagaaaaatatgaattttagggccaaccttatttaagattggtgtgcgaaatgaatgtttcattctcctacataaattttgggagatttttcaatatacataaatgtgataataactacacaaataacaaactgttataaatattaataattatgtggatgtccaaatcttttatttattacc

SEQ ID NO: 379948 - DNA, 2790 bp, Cannabis indica
ttcttgacaagttcaaagatatcaaaccattaagctcaatgatttctcttggaatttctccaaccaacttgttgctcgataaatcgataacctttacaagtccaagagtacttttgtacttagacaaagttcctttccaagtcaagaaaatttgttcaccatagtttgtcattgtgtttttgaaagcataagtctttgttctaacatggacagtattaagaccttcattttgtttcattgatgtaaagtcaccaatacaatttggtatacttccaaaaatgttatttagagaaagatccaacacttgaagatgtttcaagtgacaaagatttggtggcatgtttttatcaaaatgattggatctcaagcttagaataataagctttttaagactttttccaatccacaaaggtatgtgtcccacaaatctattttctcccatgtcaagagcttccaattctctacaattactcattgatgaaggcaatcttccagaaaaattgttgctactcaaatgtaatgatcgaatcgaagataagctaccgattgaattagggatttttccggataacttattgtttgatagatcaagatattctatgtccttgagttttgacaaacaatttggaacatttccaatcaattgattatccgagatatctagaacatttaagtaatgataagtgacattacataatgaattcaaactcgaaaatctatttttggaaagaaataatgttctcactttgaatagaaaacttggtattggaccatgaaaaagatttgagctcaaatcaacatcatcaagtttcatttttgatgaataggcttcttctattgttccactaatttggttgttggaaagattggcaaaagataattgagtagtgagattccaaaaccaattaggaatagattgtgaaattcctgagttggaaatgtctatttgccaaagactattttgagtttttaaccactttggaaattgagaccctaacttacaattaccaagcccaagaatttgtaagttgaagggaggaatccaattagaagagacattgaattgaaggagtttatttgatgataaatccaagtgataaagctttgagagttttgtgaaatgagcttcatcaattacaccatcaaatgagttcacagataggtccaaaatctccaaattgatcatattgccaatacttcttggtacaaggccatacaattgatttgattgaagccacaactctctcaaagataaaagttgtgtgtttttgacaataaacttggttatgtcacctttgagagtattgaaggtaagatcaattgattctaaggaagtcaaattcccaaaatcatttggaattgaattttctaattggttaaaactaaagtcaagatatgagagtgaaaccatgtttccaaaaccatagggaatgtcaccttttaagaaattactactaagggaaaggtattcaagagaaatcatgtttgcaaaagtgtttggaatagtactttcaatttgattagaagaaagatcaaggtatgttaaagccggtgtcaagttcccgaaatcttgtggaagaaaacttaacttgttaccggtaagatcaagatgaagaagattaggcatgaagctatacaaccattggtgtgtagagaaagagagataatttaaagaaagatcaagaaaggaaagggaggttgaagagttcaaaatggaaagaaatggaggtgttggggtttgaagactacagccacttagtttcaaatatgttaagtgagaaagtttgtttattggttgcatccaatttttggcttcacttaagtttgaaccacttaaatcaagatgtcttaaagaagaaagagtagaaagccaatccaagtttgttataaccatttgattagagctaagatcaagaaattgtaaactagaaaggtttccaaattgagatggaatttttccactcatgaaattggaagaaagatcaaggtacaataatttggtgaaattggcaataaaacttgggaaaggaatactcaattcagtgtgactaaggcgaaaatatctcaaatttcgcaactcaagcaatgaagaactaaggtatttacctgaaagaggcaaggtgtagtattcatcactttcgccaaaagttgaaggagaaatgtcaagtttgatgacatggccggatttgttgtgacaactgattccgatccaatcgcaacactctcttttctcttcttcacttccccaagaagagagaagaggattagtagcatgtagactatgtttaaacttgagaagtgcttctctttcaacttgtttgcacttgatcatcacacttgatcctctaacctctcttgagtttgatgagaaaagaaaaatcaccaaaaagataacaatttgagtaagtagtagtctatccatatttttagtggcaagaaatgaagatgagagcataaagtttccaacaccaaatgtgataataaataataaataaaatatgataataagtgtatatgtcgactatgtgaatggactatatgatatgaagactttgagaatgtggtaattgactatcgtttagtggaaacaatgacatgcatgacaatgattggttgtcaataatcaaagaagatttggagaatgaagttgacaataatatttaagtgtttgcaattgagtaaattattattcaatgtatcaattttctaatctaaacatttatatataaattgatattatttatagttgtttttttttttttgagttgatagaataacttcagtttatat

SEQ ID NO: 379949 - DNA, 4521 bp, Cannabis indica
attactatattgttatataattaattacatatagtttacaattattctttgatcaattatttgagaaaaaaaagtcatctctttctctcaagccacaaaaactcaatttagaaatggataaataacatacacaactaataattaagtttgttcattaatttacataatttttttataatttattgaaatacaatccaattatgtaacttaaattttatttattattttattctttataaaatatatattaatgtaataagtaaaaattatatgttcaatatttaaaaaaatatataatataatgatgaatctaccaaagaacacagattcatatagctaataattatgtttgtttattagtttgtacatctaatatttttaggtttatcaagattcaatttaattatttaatgaatgtttaattttgccaattaaactggtccaataaattttaacaattgaaccgattcaataaatcatttaattgaatcaaccctatctattagacaggtatatatattggattagtttaaatttatccaatatattttcaatatattttgaacttattatattaaaatctcaaatgaagatgatgaaccatataaacattaatttactttgtgtttgaacgaatttgtagagagaattagtgcccaaatatatgcatcaattttatatacacaataatattaattgaattatatttaagctaacatttatgtaatcaacatgttaatttaaatatcttaatttcttgaatatatttgaagttttaataattgactaacaaaatataagtgcattgcacttacttttcttgtatatatataaatagaatactttttaataaatattacctataaatagttatatatattcttaaaaaaaaagacatcatcaacaataataatactagaaacagaacacaagaacaataacctttaaaaaatgtccaaaatttcattaaccttgtgataaatccaacacagctaaatacctaacctcagtctacttctactctacaagaaactcataagctttcttatgctcaaccatgtcatccagaagacatttaaaaaatctgacattagtatccagtggccgctgacatagtctcttgtcaattatgttgagatgattgcgtttaaagaaatttgccaagtctttcagctccattcatcttctgcagcagcaagcaacattaacttgatcgtagtgggatgatgataagaagcagcttcagcccaacatggccggccggattgttaaaaccaatttgaaacgttgaagtcccttagcttcctaagatgtctttccatatcttgtctagtttttgtccactcttctctctctatcactgtggtagggtcatctctttcatcctggaagtgagtgagtaaataagaaataaaacaactgaattggaccagacaaagcttgataaaaataaacctctgcaagtatatatttggagattagagttgtttaccgaaggaactattttgaaggaatttccattatcacgtataacaagaaggtcgttttttctatctctgttccttccttccgggattgtgacctatcaaacacatgaaagccttccattaatgaactaaccacaaccttggaaagtacagcaatagaaacaagtaacaatcaaagaggcagcaagtaaatgtaaaattttaaggccagaattatatttatattgtggtgcctcattgcattattcgtctcaacactcaaatgtgtgaactcaaaagtaaagtacaaaattctctcaccaaaacttttgctctggtaattgattttgttttggagtctataacatatatctcctcaaaatccagcacaaattctggatcacctaaccttcggtttctgtagtgctttgtcaaataaacctgcacattaaatgcatcccgagttatgatgtgccttaaaaagaaaagtgagccaaatggacagtaaatttctaagtgttatcagtttctgcataagaaaacttcttcaactagctatgctactaacgtgcacaaatcaattatatgtttgtgtaggaaatttagctctgaaacatattaatctctataattcctgcttcaagatcatacttaaacaaataaatgttaaatcaaaacaaataaatcaagaacaaaaaaccagcaaacacattaaaccagaaaaataacacaaatgaatctagatagctttcaaacacaacaacacacgaaatttatactagttccgatcttaagttcaatgtgaacttggtcatattccaatttgaaaacattgccaccaatttttattgataatgagaaatagagatatcaatctcaagagctacaaggatataatcacagcaagtcatccatggtgtaatccatcaacactcattaactcagtaacctgagccaacataaccaacaatgttgctcaatacaatttcccaatctcaactctctctcaatttctcactctaacttctctctctactgtgttgtgtctctcttttatattcttgttattctcatgaaaatgagaggaactctttatataggccaaaggatctaatatgcaagctatccttgttgacagttaagttagttaaagactaactaactaaccaaatgttggttgggggtttaaggaataataccacagtttgtaatgtgtagtttaacaatgattgaaataacaaaacagaacagaacttttgactactggttccacatacatttcaggtacaagactacagcttgtatattaaacctttattgtgtactgccatatcatacacttagtaatgtgtaatgcctataaaaaatcactcttgtacttttttcatatactcaaaatagaagaagtctaagtttttccggagagagaaaacaggagggtttcgtgaggtgatcttggcttatctctgggtctttgagtttgtatagagtgctcactgtgttcttggaagggtgatcgtaggtgtacttaattcttgattggtggcttgtaatttgaactaaaaattttacatcacaggaaactaagtatacataagtctgaactgaactatgccatgaagttgaagaaaaaaaggaatataagcataccttgaggatctctctatcactcttatataatggatctctaggtgcatcaattggtggttctgtaacattgtagcatccataatcactcttagcacaccgaatatactacagttttgaaacatgttcaggagatatgtcaaacatataacaaaggttatagaaaaaacaagctaatggaaacataactaaatgagtaaatgggcaaccattaaaatgtagtaccttctgaggcattggagcaagaaccctgggaacagcataaacatctgtgtccggaggagtaacatacatctatacaaatgtaacccgtgttaagaaatcataaaagaaaacatttttaacaaaaataatataaagagagatttttttttatacctctctgaaatcatagacatcgttatctgggtctggaggttttcgaatgaagaaatcacaatggaaaaggctaatcttgtggaactcatcctcgttaatcctgtaatctaccaccatctccgaatcccaaccttgagtagagacaaagctcttgctatgcaccatggaaatgtcttcgtccgctccaacaacgatggtggccgatgctgcggtggctccagttaatgtgtcgtactctatgtcgaagtccttcttgttgtcaacctcttcaagttcctcatcgtccatgtcatagtcgtcggggcctccaccgtcggcgtcaccctcatcggcgcgaacgacgaaggaattgttgtttggcgaccgagataaggggttaagtttgagcttgaggggcggcgaagaatagaagaagttagaggtagttgctgctgttgttgctgtagcggtgaggggcctaagagaaaatagtggaggagaaaggagcagagtgactgctcccatggcttcttcgggttcgggcaatcgctgtgaaagagctttatctgtttgtttaagggaaagatagtttcgtatatgtttttctggaaaacgacagagagagcttaacaacgacaacagattaaaacaatatataatacgacattgaacgacgaaaagagatggatgacaataggaaatgagcattgctataaggcatcagtggtgcctagcagcttcttcgcgtaacgattggctagcgatactcctaaaagctactatattaaattatagggtaaatagcggcaaaacccccaatactttcgttttagtttcattaaaccccacaacccaaatttctgcaggtaaacccccaatactcgggttctgttagcaatttaacacttccgtccaaatttaggtatgggaaatttgaaattatatgcatattagggattaaaattggtatcctaatctaaaactatacataatttgtaaaatgggataacttttacttaaacccaattttaccccccctcatttctaaact

SEQ ID NO: 379950 - DNA, 1507 bp, Cannabis indica
tattgtgactaaaaaatctgtggttaaatcatatatttttagtcacaatacttgttgtgactaaaactaaattagtgaccacttgtaattaaatactatgttttagctagtcacatgtaatatttaaaaagttgtcactaaaagtagcagttttttgtagtgataggaaaaaagtgatacttctactctctataaatattatgtataactttttattgatcgtatttgtaggttccatttttcgaaaacattgatgaagatcatgtttatgaaacaatatacaaaattctaaagccagttgtgtattcagagagaagttatatcattcgaaaggaagagcctattgatatgatgctcttcatcacacaaggtatgatttggagttttggaagtggtaccactcaaatgaatcgtcttcaaaaaggtgatcattttggaaaggaactaatagaatggaaattcgagtcgtcatcgtatgatgattttccaatctctacaactaatctcaaagcccacaacaaagttgaagcttttgctcttatggaaagcgacttgaatattttactaagcaaatattggcttaagttctaccataaaatatatgttataaataagaaactgatgcctgtgggcttgaagactattgcagtcaatgctataatacaaaatattaaatgctccattgatatgaaaaagaaaaaaggaaagaaatcaaataagttaaatcatcatgaagtatcagttgagataaatcgatgcccgccgtgtctgttgcaatgtgggtttggtccgcacggatgttgctccatttctaggtgtgaaggaagctcttagttgaaactgattgctcaaatattgttttatgccattcatagtttagttgtgttgttttcttcttttggcattgttatgatcatgattagagatttacattcttctttaaggaatgttttcatttgttatgttaaacggtctgttaacactcttgttcattggctttctcgtgtgtcgtgttcattctctgttgccttttggttgatgattgttctcattaatgaagttcaatctttcttttttgtttttctttaaaaaaaactagtgatggagggtttgtactctgtgtttttgtgtatttgttcgataggccatattgtaggttgataacaattcttgtaataatttattaatggtttgttttaaaaaaaaattgtgtttttccatataccatttttttaaaaaaaaaactgtaattaaaatgtgactataacaacttgcaataacagattttttttttgaaaaaatcttagttcattgattaaagaagtaacatgggattcacaggggacaatccctccccttgccaaatagtcagatccgcatccaatcctagccttgttggccagatcatccacaactacaaagttacaaacttcacacaagttatatcaacctcttaatggtaaagagtgttaattccatttttggcatatttaattgataaaaatat

SEQ ID NO: 379951 - DNA, 2027 bp, Cannabis indica
aaatttatacgtgtataaaattttgtcacaattacagttaaaaagggattgaaattactcaattttacatgaccaaaaataaaccattatttaactctataaaaaaaaaatgtgaatcctaatattttactcataagaaattctattccacaaaaaaatattataaatagatactccatcatatatatatttttagggatagatattgaaaaaaacaggtggattagtggtgagcaaataatattattattaagaaaaatgataataaccttctgattccttcctcgttggtaccagcatttggaacaggttcacgggttccggttctcaaattgagacgtgaaactggctttttcagtaatttcttaccaagttcctccagattacgtaaattttctggggtagccttatccaccgaagctaaatctccatgaagtgtgtcatcctatatacaattaatcaattatattcatatcatatatcataaaatagaatgaccataattaataatgatatgtatatacctcgatgcggaggacctcatcttgagaacgaaaggcttcgaaaacaagagtgttatggtaatcaaccatgtcagagctggcctccatgaaaacatcagtgatgggagtagagccctggtgtgctatccacgacagaggtccccacttggcacatgatttagcatcgtacttcttctcacctctgttcgaaccagtccctactgatacaagcagaaatcgaaaattttctgatgcgaatgtcgtgtagttgggatctttcttaaggataattttagtcacttcactaatcgcaaccagagactgcatgcaatatacgtttcatttcattaatatatcaaataaattgttgattataaaaattattaattaattgaattaattattacggggttattagcgcagacgccaccgtcaatgagatcaaatcgttcagattttccattttcatcggtgtttgtgaaatgatgagcaggaaggtaagttggggctgcagatgtgcctatgcaaatgtctgaaagatgtgcatccatcactttatgatcatccaccgtctgtatatatatatatatatatatatatatatggtagacaatttttaataattaattttacaaaaattaattatattaaatatatatatataatttatatatacatagggacggacccacatatagggttagcgtccaccctatctaaaaaataaaaatgttaaatgtaaaagtaagtgttgtaaaaattatcaattccactttttattttattaaataacaaatccaatcatgaattttcaaaaattatataattttaactctatttgatttacattctataaagtttttaaaattgaaaaaaatccttcaaagaatgtttgcataaaatataaaaagtccttttaaaaaaatagaatttgtggtttcttcaaaagtacattttaaaagttattttaaaaattaaaataatttacatattttctaatttagttaccgaatatttttttttaataatatctaaataatttgaaaaacatttttcattaaaaaaaaattttcatataataattatccaatataataattatccaaaggtaaaaataaatcaaaaaaatttatacttattatttatagaactagtcaaacagggccaaaataataatttgagctcaactttggtcaactttttttttataaccatcacacatattaataaaaatttaaccaatttagtaataacacttctatgttaagttattatcaaaaattaagcttaaaatactatatttatttttgtatcattttaaaatataattattagaaggtcaattaaataacttttattaaatacaaatctaaaatattatctaccctaagtcggtgaatgtacatatatataaattatgataaatactattttagactctgtgttttacaaaaattacagattggaccttgtgttttgttaaatgacaaaatagaccctgaatttttcaaaatagtaaaaata

SEQ ID NO: 379952 - DNA, 2922 bp, Cannabis indica
ttttaagtgcttacccttgttgtgcacaagcagaactttggaacctaatggctaatgtaactctcattagtccacttttagaggagactattttatattaaaggcattgaaaactacatgattaagaaagattcttcaaagtcaatagttcaagttttatcgtgagatctttcacaatcaacttccataattgcttatttttgaacacatctaagctttcattagccagtacaatttttttcagaagaccctttagcttcatcatagaaaattggtataattcctttataaatgtcgttttcttatccaacaattcatgatatgtgcagtgacttcatttatttggtataaaattaacatacctgataatgctggtgcgttaccattggccaatggcgtcaatggcatcattggcgaagggcccaacacaggaagaaagggttggggattttcacttggggctggagagatatgaggagccatgaatgcttttatttcaccaagtgaaccgccctggcatttgctaaaaccttcatagtaattggtttggtcaggaagtaaaatctaattcaatatttgactaaatgcaacacataaacactaactcaaactcttccaaagtaacaacagagcatataaaaaaactagtggcaactgtcttcaaaataaaataattttacgaaaacccagttgataatttcaaaataatcacagaaaaatgagatagccccaagataagatagtaaattgaaaagagaaagaagcaaaagcactcacagaaaaacaacagtagagtaaattgaagaacgagaccagaagataacaccacaccttctctcatggttgcattgtcttgagtaatcagaatccaaatgtgtcaaatataatgaaaaaaagaatcaataaactatatgagtaagttcgtggtagctgcattaagacaaatcattttggagcaatgcgtgagaaaatggcaaagactgggagaaagagagaaaatagttgttaatgttgaatgagacatgagtgtgaaatggctaaaggagaaaattactgaaaattaggcagaaaatcctactaataaattaagggggacaaaaaaagaaagaaagaaagaacgaaaggaagaagctttttttaggggctacaacttagtataccagtagtaagtgaagtcactctattctttcttgcaacttcacagttacacacgtgttatagaagcaaaacacgtgtgataatctcggttggagatgagagatatgttcacgtgctttagcttgagagcacatcagattctttaaaatatttttttaaaaaaaaattaaagtagaaatactctaccccaaatatttttacatcacttaaaaaaacaatattttattttcttatttttttttaagaaattatcactactattgaaaatagaggtcatttacaacaacagtaaaaataagatgagagatttcacccatccaacagacattttcatccaactctaaagtatatttggtcagtctatgagcagcttgattagcatgcctacgaacatgtataacaataactctaaaaaaaagagaataaaagacagcgaacatctaaaattagatctaaaaaattaaataaatctacaaatgtggatgaaagagccattgagactcagagcaacagtttcaacatgtgtaattggaagttggagttagtgagcccaattgatgctgtgaaaaagagctttcgcttccatctcatcacttctgaaacagccttgtatcagtttagaaaaagcagctaagacttatcccaaatggtcccgtactattgcaccaacgcctagtgtctttgtctccatattaactgttgcgtcaacaatcatttttaagccttcgtggtcgcctccatagaacctgatcgttgtcgctgctatttcttactgtggcagcagcatgaacagctggtattttgttgctggaagtggaaattgcagcagcagttgaacgatttcttgctgctacgtttccatatatttgttaacataagcagcaatggttgtgccatcccgattcttttcaccatggtagactctatttcattcagttcaaattgcccacataatacatataattagctccaaatcctcctttgagtgtaaagatgaaagatggaaaatgtaatcactcatgttcatttgttgagcaaaatgatagtcaatggtgaacttagtgtgtttccaaaccttctttgcattttgacatgtaaacaaagcatgcccaattgatttccaagcatgtgtatacaaagaacaagttgttgaatctatgattttccttcgacgaagagcggcagccactggaagtgcttcttgaatgactctccaagaaaatattttaacttttggaggtagatgtaatgcccaaaaaattttccaccatgtgagttgattatttgatgtcaaagaatcatctaccttggccaactcatctgctaaatggaaccccgacttaaccgtgtgagccgatcttgtgtttggaagatacttaaggggatagacaaaatcctgtcagaagaaaaataagagtctaacatgtttttgtcccattctctagtctctttaatgagatttgcaactattaaagatggcggcattgagtatgaaagtggctgaaaattgtgatgtccatgtatccatgggtctgaagcacaattcaccgtaactttatttccaattttatatcgcagtcccttgattagaagctcacgtccccaacaaatacttgctattttattttcttatttctatattatttttaatactttttattataaattattccaatactaaacatattaaaataatattatattactatttaatttatattaaataattatttttgttactttaaaataaaataatataaaaaa

SEQ ID NO: 379953 - DNA, 3518 bp, Cannabis indica
tatactatgctatgtttgttgtagttgatgtgtttggttggtggtggtgggaataagaatagagaatacccactaaaaatatacatatatatcactttggccactatatataataatatttaagcatatatagtatagtatactctcttgtgtgtatgatggtatagtagaatttgatgctgatttagatgatacacaaagctccacctccattattattattataatatcatattattctctttggcatttcattattatctaacacataataatttcttcagctctctctttcttcctcttgggaatatatatatgatgatgatgataatataggacaagcatgttatgttgtagtactagtagtaagtaattacacaaaatgatatgtagaaagtgatattaaagaagagtacactaatagaaagtgggctactattgttgtgtttgtgtttttgataaggaataaggtaaggtggtttgtcttagaaatatgagacaacacaacccaatccatttcaatttccacttctaaattggatcattcacacacttctatttcttttttcttttttaagggtatactatatatatatcaattctcattaatggttaaatctgaataaactcatcaacaccactaacaaacttttattcatttttaattaaggtgtaatggttttgataatttaacactatatagatatacatagtaaaatcaaatcaccatcaataaatgaaaataaatatataaatatggtaaaaaaaatgggatacaagcaaaatcacttggtaaagtaatgatcaaatttaattaacaaaaaatgaaatgaattaacaataataatgtctcaaagtttataatattaggtgggtgggtataaggggatacaataataataagaagaagaaaaaaagaaaaaattatataatacttttgtgattattatgggttgagatgcatcatgataataataataataataataattataaagtagtatttatgtttgaattaattattgagatcttctggagtcaatcccatctgttttaggacatctttgcactgaggaagaggtgtcttcttaaggaaaccaagagggttggcttgtcgaacattggatgctataccattgttggtggtgaggctgatccgagcactcaacttctggtaaggctcagagttgatctccgagcactcgggatcactactcttcaccagctcaattgcacaaatatcatcctcatgctctccactcaccggaattctgtatgttccggttgcatctgtaactgcctccgcgctgtatatcactttccccttttcgctctcgctacactccaacctcactcttgcatctgttctcgtgcatgcaaataaataaaaaataatattatcgtctaactgaaagacatgcttaatacttataatattaaaaaaaaaaactcgtttattgtacctttcaggtaaacgctggctttggtgacaaattgagcgcgacatgtatcgcaatagactttgccttccacaataagattaggctccacacattcacccaaacccaaaagacccaacaaacacaaagctgaagcaaacatcattaaacacttattgttctccattcttaatcttaattaattctatctcttatctcttttaatgattaatgaattaattaattatgttttgcttcaaataattatcaccacttcacatctttttatatatatataaatgacaaaaatgttagttatttttgtggggttgagatttgttttccatgttaatatgtggttgcttacattttggatctaaaatgttaattaagatgatgaatctgtcatacacgtaatatatagttatgactaattcaaataccctttaaaactacttattcaacctacctatatatacattccatttatttaaaataaaaagaaaaagaaaaggaaataaaatataataaatatattaattagatggttggattggaattggatgaatggatggtgtcatattaattaattaaacatatactttaattattatatttaatattttaaatacgatccacatgctaattaaagtatattcactatcaaatatctaattcacattatctatagtactatactcaacaaaaagagcaatatattgtgaccatatataacattatattcttcatcaagtgtcaaaagtttaaatttccttgaaaatgtattatttgttctaattgacatcaaataaaattaatgggaatgagaaatttttaaaacttttatccaatgagttttttttattcattttaattgcttaattcaataatcatataattgttggtgttattttcttatccattgatatgaatgtcgagttatatgtgtggaaaattatagaaggggagggtagaatagattaactttatattgtttgatgaattagaaggtactaagaaacatatattatattatccattattacttatttacttttgagaagaaaaaagtaaagtatacttttagaatgatagttttgctaggtcataatgcttctcacttctttgactcttttcaccctatttaacaaataaaagataaacataggcttgggattgagtgtgaggtcgtgctgagccagggttggagttagtggtttttggaggagttgggatcgaagtttgggtcaaactaaggtttggctaggtcgtgggagttctggattgtagtttggggtctgaggttcatgtcaaagctagggttgaatcgagattcgaggtctaagttcgaaatctgaatctaaatctgaagtttgaattgtagaaaaatttaggaatcaggattagtgttgcacatgggtttggagtcttggttgcactagtattaggggtccgagttgcactagagtttagggtctgggttcagattggggtttgaagtctaaatccaagttcgaagtcagaattatcgcaaaatttgtaagagtctagcttggcaatttgattggagatttataaataatttcaataatttcattcatatgttaatcatgtaaaaatcaatactctttcaaagagaattcaaccattaatctaaactccattacattttcattcttgatttgaaaatttatctactttatttattattagagagcatatatgcaccccatacataacattaattaaagaggaatgataagataataatatactattgagaattgctaaaaagtattactggtacctagcactctttttagtgttatactgctattagtataattaagtagcaggtcctatataacttaaggggtaaataccattttggatcctatgttttacaaaagttaccgattagactctgtgttttattatatgacaaaatgggctatgtattttctaaaatagtaaaaataagaccctgagtttaatttttgacaacttttttttaatataatgaaattttattttgacaaaaaataaattcagggtcttgtttgtaccattttagaaaat

SEQ ID NO: 379954 - DNA, 1233 bp, Cannabis indica
atatatatatatataaatggcatgcgcatattcaatatctgtatatatagacattatttaacttactataactactacattatgtatatgtattcaaacatatctacactttacctacttaaaatacattaattaaactagctaaataattttaaaatataataagctttaaaattatcataagagaagctgcattgtttgccttagggtaataattattatttattaagcaccagtagccacccaatatcttataagactaaatatttaattacatttataacgatatctaaaaaaatagtaaaatgcattttaccatttatcttctaagaattttgaacttgagatcttgagagaaagttttttttttcacatatattatatatggggaaaattattagattttagttgtacattcattggttattgttatttatggttttgatctcttcttccttcaatctttacataagatttataatcattatgaatatatttatttgttttgggaacaacaataccaaaaaaaaaatgatgagaaaatagagaaataataaattagtgtaggtatagagatgtctaaacaaattaaatgtagagattttgacagagacgtttctcccaccaagcattataacttctgtgcagttttggtccttttagacaaattaactagtaaacttctgttgccatgcatacatagattatacattattatataaatataaatatatatatatgtaataagagtatatatactcacaatatagtggtggtgtcatattatgtgttgaaaattgaaatgggctactaagagcattgctattacccattttttatattatttttaaattaaaatatgggagacttaatattaaattgtgattatatattggatttgtgatgaggaagggcagttatgaaggacatgtggtgagtatatgattatgtctcagtgagagtaccatggtcacggtctctcctcctaactcctaaagtaccaaaaatgtcggtagcatcattattagttattaccaatacaattttctttcttttcttttcttttctgaggaaaacataaattttattaggaagaacgtaagatcatcatggggtccaccccccaaagaaaaaaaacaacagcagattgtcaaatttaacagcacaccattatttgacaagtagtgagaatgagtcccatgttgtatccaatattgctctctctctctctct

SEQ ID NO: 379955 - DNA, 4724 bp, Cannabis indica
ttttaatttttttttttattttttattttagagaaattattgcaaatgagagacgacatgctcttgctgaggagtaaacatatcctttttaattttatgcatagatcatgtcaatttttgattagaaatgagatccgacggtggagaatgagggtacatactagctatcaagaaccttagaaaattacaaaataaaatacaaaccctatcagtgagagaaacgaaatgaaattgtgaccgtcggatcatcacccacttacgttatcgtcttagccgctcctttaataagaccgaatgggtttctttagcgccgtctgtctgagtgctcttctcactctctctaatcttatcagcctcgttcctctacctaaaccctagccaaggtaaaaaccctaaagtttcttcttctctatcccgttctctgatcttcgattttaatggcatttgcttcgtttcttgttcttgataagtttgttagggtttccggtctctgatttatttggataaagaatatttggattgggtcagggttttcgtttcgacgcttttgttttaatattgaggtttatatcatttgattctatcaagattttgtttactgcggcttagaaatggagaaatttattggggtttgatgtctttgtatgtaactatgtgtttatcagtttatatagtccagagaagcttttttgtcgctttacaagtgagatgattaagtgcaattagagacatcttcatttttatttatttatttacaaagtaattgtacactgaatagattcatctaccagtatttgggtaagatttgattcttgtcatctttgtctttggaaatgcaagtttaaagaagtattcatgaaattgtggaaccattacaggccttattccaatcgtatagaataaagattattctcaggatggatggaagttaaatattaccaacttaagtggacttgtaatgtcattgttgtctcgttgaaatactgaaataatgattatgccttggaaggatgttaaagaatataataacttggcttaaatgttagtagtaggcttgtaatgttatgattatcttcttttttttggggggtttatgccctattaattgctgcatttgagccttttcatatggattttttcttgaacttgttagaagtttatttgcttggtattttcttttgaattaacttactgtgcaatattctttatcttaaggagtcatataatatttaccttatccttttctgctatacagatgaatgtggataagcttaagaagatggctggtgccgttcgcaccggtgggaaaggtagcgtgagaaggtatatttctttttgcttttaaactatggactatcaatatccatttagttatctctttgctaagttaataaagccagattttaatttgttaataaaattgcagaatgatttgacatgtattattgataggagaatttaacaggttaggacaggttctgaggtttctgacagagacatttgtttaatttgttcactattattactattattattttatttattattacttctcttgtttactaatattaattgtacgcttaaatcaaaatgcacattttattaatgcaatggtttggtgtgttagattaacggaatagtgttaggtttctgcaagtattatctttgagatgtaaaaaggtagaagatttatattttttttctcaaataaggcgagtttatttaaagttttcttctttcatagaaagaagaaggccgtacacaagactactaccacagatgacaaaaggcttcagagcactctgaagagaataggggtgaacgctattcccgcaattgaagaagtcaacatctttaaggatgatgttgtcattcagttcattaaccccaaaggtgcagttaactctatttctctcagatgtgcattttatatctacattttaattctctttggtggggattaacatttttcttaatgtttcagttcaagcatctattgctgccaacacttgggttgttagtggatctcctcagacaaagagtatggctcttgtcctttaaatatttcatgtttttttggatcatgagttatttttgcgagttagctaatattattttaaattaaaggaagcgtcttttgtgtttccaactagtgatatgtttctctttgttttactctgatctaacatcttaatttttctgtttcagaattgcaggatattcttcctagcatcctcaaccaattgggtacactcttgctaactacttacaaccttcaatgcaatttggtattttttaatgattatgctgactaaaattttacttataatttttttcaggaccagataacttggataacctgaagaaactagcagaacagttccagaagcaggcacctggtgccgctggtgctggcgatgcaacagcacaagaagatgacgatgatgatgttccagagctagttcctgggcagacttttgaagcagccgcagaagagaaggctcctgcatcttagagaggattaatggggattttgtgccatttttatataattaaaatgttgctaaaattctagtttttttgtttttacctttttttttgtttattgcatcccaatttgagtcacctaaatgctttctctgattccttgtgatacacactgttagtagttactcttcccttttttggcatgtttatcttgatgcttcaagtgatacgctgtgcctgaggtagttactcatattatggtctaaatcaaccctttttatttccttcccgccaatagtacaatgagttgaaggtgttgcacaactgctaatcttgttatttagagccatgcctgtaatcttatgatgtgcttctttatttaatgagtcagataaattggataatcctttgaaatgagaacgtttgctagacttgttaaaagttattcttttaaaaccaatagggtccttggtttttttccctcggtcgtgacgttttgatttgttcacttcaaaccgtgcatgacgtttcccaaaagtcaagccaatattgagtaaaaatgtatatcacgggcaagagaggaattaaggctgaatgaagaaaatgtgtgaagagtgtttaatgttgttttctcatgctcacaaggcttttttatttagagggaagtgatagtgttatatgtttactactataatagactgtaattattgcatattcatcataatttggtggtgttagtaccctcaaacatttcttggcgcccttcggggttgtttggctgaacttttagtagtcattgctggacttacgaaactcaaatcattttgaagcgagtttccaatgagttccaacttttaagaagccgaactgaaccaattcgacttttaagaagccgaaccaactgaagtttgtttttgaataaccaagtttcaactagagagaattgggcgctgccctcaaccacttttgcttgtccatcaatttgactattctgttgtaattgtttgtccagcaataacaaattatactgagatatttgtatgccaatgctaatttgtttcgttgtatattagaaataatcattttagttgggttgtttatcttatatctagttagaagtaactaagcaatgtttggctccctaaattcagtcccaaattcaaattcctccacccccaacataaaaaaaataccagccataagaaaggtttagccccctaaccgacacattttgtagtccgtcgtttttaatggtttcccctttcaaactaaaaggtcaccaaagagtccagctttccaaggcggcccaacgaagaagaaatggtgctgatgctactaccaaacaaagctctctcattctcccaaccaattgctactcttacttttatgcctaaacgacgtcgtattcaccgtcgttgtcgttttatctcagagctcgaagaaattcgagtctgtaccaaccgaacttgccgaagacagggttcccttctaaccctagaaatcctcaccggtattgctccgcccaccgtcaccgtcaagtcatgcggatgcttgggccgctgcggcgctggtccaaacctagtctctttgcctagcgccgtcgtggtcagccattgtggtactgccaatcgctcggctgaggtcctggccgctctctgcggatcttcatgggactctgacgccgcgaagaagagcctcgaagcccttgccttgagaaagaaggcggagcttgagtttgataagggcaacttttctcaggcggagttgctactttctcaggtaaattgctttgtctattgtttttgatatctatattttactgtaatgggttaaaattggcataaatttattatattgaatgtgtatgtggcaaatttatttataaccagaaaacttctatatactccaattttaataatttttatattatataaaagtaagtaattcgtgagataaatatttttaaatttaactacagttgaaaataaatatttaattttaatttttagcggtaataatacttaagttatatttttagtattctgtaagtacttgactattaaatgaccaatcagaaattaatcaaagattgccatatggcaatttacttaacatttaacaagtacttatatagttttaaaaatatacttaggtattattaccgacaaaatttaaatttaaatatttatttacaactgcgagttaaacttaagtatttataccacaaattattttat

SEQ ID NO: 379956 - DNA, 5804 bp, Cannabis indica
taaaaaccataatcacaattgtgcaactacatctgattttacaaaacattcccataaaatgagtgcatttgttgcatttttttttttatctattttgatatttgagattcattttttaatttattttttttataattatttaagatattttataaaattttaaaaaatttaacacagtaaaaatagtgttcaaaaaatatattgcacgaataacttttattttatatgcatataaaataaattattttttttaaaaatgaaataaatactactttttatattataaaatatttttgaaaatctcaaaataacataacgtagaccattttaaaataataagagtaatgtgcgatataatttaaatttaattttttagcaataataatacaaattatatttctagaatttcatagttacctaaccgtaatttgaagtatttataaaaattttataattataacaaaatattattaccgctaacaataaaacttaagtatttatatgaaatttagatatggaaatagataaaagatgaataaataaataaataaataaatagtaataaaatttctaaagcaggtttacaaacaaaggagataacagacaccttctagttctctctcttccatggcttctgcaatttcttttgctcgctttccaatccgtacaacaaccaactccatactactatctccttcttcttcttcttctctccgctttcctcgcttcttcccgccattctcacactcacaccatcctcgtttccccacctttttctgctcagctaagaagaccactgcattcgctttcgtatctgcctccgacgccattatcaacgaatcaaactcaaaactcgatgattccgactccgatgcaaatcctccttctcctccgcagcagcagccatcgccgagcgttgtaacgtggagccttctctttaggcttttactgaaacacaagctaaggttggctctgttgctgcttactcttgttggctgcactacttgtactctctcaatgcccttgttttcaggtgagcctgaattgaattgaattgtttctgtactgtactgtattgtattgtattggtttgtttgtttcttagttaataattgctgatgtttgaattgaattttgtgcagggcgtttctttgaagttttgattggtgcaaaccctgagccgttgtggagtttgctaagcaaagttggggttctttatgcgttggaacctattttaactgttatatttattgtaaatatgaactttatttgggagaaggttatgtctacactaagagcacagatttttggaagggtattgattcagaaggtatgtttggatttactttagttattgtatatgaattcttattttaatgtttgacaaatgagcattaattatttaaagttaatagtgatattttgtaatttgtaattatatatttaggggacttaagaattggagatggtaattgagatttgagacattatctggttgagcaaattactccgatttacactcaattacaattacacagtagcttggaattccaaacgcaccgttaatcttcttattttgttagcaattcaacaattgtcttagcagtgtgtgtgggtggcacaaactggttgtttcaaatgttaggatcaagatgtgtattggttaagatatgataaagtataatagcataaagatttaacataataaataagctggtgttcatatctagaatttgattgtgaagtttgtcatgggataaacattattctttgattaaaactgggcatgaaagttactttgcacttgatattttagttaattgattctcttttttcaatgtgcagatcgagttttttgaccgctataaggtatgcccatcagcttaatttgattttcatgctcttttggttgaagggtcttggctgttttttttctctctcttctaattattcatctcttgaaattatgactgtatgattgacttggattttacatttatataggttggtgaactcacaggtctgttaacttctgatctgggctctcttaagaatgttgtgagtgaaaatgtttcaagggaccgtggactccgggcatttactgaggcaagaaactctacaccaaagacaagtgagctttactttgcctacgattgagcatccacacacatgcagttctttttaatgggtttggctcagtttttattagtgtggcaccaaactttccctgaattttgcttcagaaatgcattttgtttttgtcgaatcaaattacatagcaggctagttatgattttttcacattattaaaaccacatcatatcattttcaggatattattcatgttgtatcttcaccagttttctctttgatttatgatcatgttgtgattgttctccttttccttctcttgtaggttattggaacaatttgcatactgtttgctttggctcctcaactagcaccaattcttgctgttttgatgcttgttgtatcggttttagttggtaagttatcttcatttttaaattgtagtcagtataattagttgaataattgttttattactcccattatttctgttggtgtaatctaatttgctttggaagtaggtaggacttaactttggttatgcatgtgttttgggcatttggtacataattggcctaacttgtgatgttctattgatgtttttctttataatattatctgcaattgccattttgatatttttatgttcttaaatcactggctgctgattcttagcacaaacttacctgtttcatggtttctatcatgttgctgattatgataactttgtaaagctgtgtacaagcgatcaactgtgcctgtttttaaagctcatgggttggcccaagcatccatttctgattgtgtgacagaaacattttctgcaattcgtactgtaagtggatatggtgttctttaaatagctgtttagtgtcattatgtggcggaaaatttaggccaatcattctgtttcgagtcaatcttgaatataagggtatcctacttttgttgtaggtaagatccttcggtggtgaaaagcaccaaatgcggatgtttggtaaccaggtaaggtaaaattagcatattgattatgcagatgcaaaagcttgctcctgccctcatcattttatcatgaagttttgcaggtcctggcttttcagaggagtggaataaagcttgggactttcaaatctgtcaatgaagctttaaccagagtcgctgtttctatttctctatttgcactctattgccttggaggaagcaaagtgaaggcggtaggaagttgtagcctttaataaatcttccaaattgtttttaactgactcatccctcattctcatcattcatctttatgattagattaattaaatattttgttctttctggattgttgttttgactagcgtaatttttattcagcttctgactttagctaagaaacacaaaaatgtgtacttctatttgtaaatagattaattaattagattactttatgtataaaataacccctaacttgtgctaataaaaatgttcgatcttaatgacatttagtttcaagttcagtacttctatttgtaaatagattcatatagtttatctgcctccaatatgtatattttaatctttgttattttgttacatttttcacttgcagggtgaactatcgattggaattgtggcctcttttattggatacacattcacactaacatttgctgtaagtcaatatctgtattaaataattttgggtgattctttttttgttattttaaagtaagttgtctttcaggttcaaggcctggtcaacacatttggtgatctccgtggaagttttgcagctatagagagaatcaattcagttttatctggggtagaaattgacgaagctttagcttatggtttagaaagggaaatacgggaaacaaagttgaatgatgaaaactataaattgttcattgatgatagttcaagtgagaaaaatctatctgtaaatatgcattatatgtcaaatcttaaatcagctactgatattggcagcttagcactgtctggtgatgtttgtctcgaaggtatttgtaatagttcttttagtttcatctaagtttgctaaaaatgactgccttattcacattccagaccgttactacaataactttttcttaaaatgttgcagatgtgtatttttcttatcctttaagacctgacgtgggaattctaaatggtctcaacttaactctgaagtgtggaacagttactgctttagttggctcaagtggtgcagggaaaagtacaatagtgcagttattggctcgtttctatgaggttctttctttctactttcagtttcaaaatgaaggtttaatgtggttgtcatagcctaaagaatttttatgcataatgttttgcagccaacccagggccgcatcacagttgcaggggaggatgtccgaacatttgacaagagggaatgggctcgtgttgtttctatagttaatcaagtacaaaatatatccttcaactgttgttgttgctgttgttccaagttgttagaataattctctcttttaacatttagttgatgatgtgatgccttttgtggatgctaaacaatacaggatcctatcctcttttcggtgtctgttggggaaaatattgcatacgggcttccaaatgaaattgtttccaaggatgatgtgataaaggcagcaaaagctgccaatgctcatgacttcattatttccctcccacaggttaaaaaactttggcgtttttcatctgccatcgtgtgtcttcctgtttacttaatttttttttatgctagtagggttatgacacactagtaggtgagcgtggaggcctacttagcgggggtcagagacaggtatgacaatgaagttaaagagagtgagtgaagtaagaagaagtgttcatgacatattttttttttcttgaaatgatctgcagagagttgctattgcgagagctctgcttaaaaacgcaccaatcttgatactcgacgaggcaagtattttgctatcatatcaaacacctaaattttaactgaatagatgaaaggaaataatcacaagctccacccagtattcctgtgtcccattttagactgactaattttaatttgttcttgggcacaggcaacgagtgcattagacgcagttagcgagcgcctagttcaggaggctctaaaccacttgatgaagggcaggacgacattggtaatagctcatcggttaagcaccgtccagaacgctcatatgattgccctttgctctgagggccgtattgtagaacttgggacacactttgagttattggctaaaaaaggtcaatatgctcaattagttggaacccaaaggctagcatttgaatagtaatattcaatatttgctggtatgtttagtccattccaggtacatgtgagttttaactatcaaaaatcataaaagttttatttaatgctataaatttggagatgttagttcagtactgattcatttttcattggattaattaacaggtccaattatacaagttttacagctcatttcaatggtggcttgggttgttgggggaaataattgagctttacttcataacattattgagctttacttcataataaaaggttgtagtaaatagtaattgcactacatattatatatatcccaaccttgaataatttatctcacaagtaataatcaattataagtttcactagtgtgtaagtaagctttgtatttattattattattgtt

SEQ ID NO: 379957 - DNA, 2551 bp, Cannabis indica
tatataactaaaaattataaaaataatatgtgtatgtatatgggctgggggctaaggccaccttacacttgaatgtacctctgcccctgatccaatatataattggatggaatttgaatacagtctattacattgatttgtgtagttatcaatacttcaattagaacaataacgaagtccatatttataagtaaatttattttatcaaatgattgtataagaatctaagttcacattacacaaaagtgaaaactctctacgttttaagaacaatatatgaaagtaattgacaaataatgataataaagttaatgtatatatttattaagatttttgaagaacacaattgatacaacaacatatatagcattgtctaatgtctgtattatatcctcataaaaaattaaagaatgcttcaattttgagaaacgacaattttataattttgacacacaataatcacaagcaaataataagtctatatataaatgtatagaattgaaaaggaatggtttagagagtgagttggtccatgtgaggataggtgtaaggtcttccgtacgtaaccacttggggttagctcaagtggccataagtgggtgtgtgagtgttggaggtcctgggttcgagttccagataaaacatattgtaatatataaacgcttaaaataaaaaaaaaggtcatccgtacgtacttacttataagaccaacaccaaactccatccatcaattctatatcctctcacttttaacatgtcaaataattattacattcttatattacaacacaccaaacattttttgttttattttcttcactactacacctaccttttcttatttaatatttgaagaaggatattgtgtatttaagtatattgtatctatatttgctttgctacaatatatattttgttgggtctctttttttactttgtgatcatgctcctattttagcttgattctcacattagtataattcatgatctaaaacatcaagagaagaccacgagtaagattgcaagatagtccacaacgattcaagatcttctctaatgaaaatgaaatgttaagtgcgaacttattatatataatgatttagaattggcatcactgaatcatcatcagtattgaaccaaacactaaagctaatccctcaaaagcaaaggttcttaagcaacgcaaaattgcacaacttaaagttgtgcatcattagtttgtttactagcgtcgatttcttttatgacacccttgttcaaatttagcttcggttctgtacgaacactatatttcggttcaattcaatagcatcaatttttatcataaccggcactaataaatgacattaaaactcattttttggtagtgataatcaaccaatattacaattgtttttgattcttcacttagagttgtaaaaaaataaatgatgaataaagatacttttttgcgaaaaattatttaaaataaataaaagaattattgcacaattaatagattaattaggtttatcattttttatgtgaatcataatttagctaattcctaatttttctaacaaaaacatgagtctaaaacaaaagtgtgaattattgtgtagttagttttaaattaaataataaggagatgggatgatgtgttgtgactttgtgagtgaaaatgttaccaaaacgacaagaagcataagtgaaataatgtggacctaataattagtaagatcatatgagacaattaatgtgaaacacacctacactcttctaggtgaactgaatgtaaaaattaatttagaggtgttatgacagaacgagttacattttgtatatctgtttgtattagaaattattttaagttagttatgctaaaaatattgttaaaaattgagttcatgattttatttatactattttaaaaaatacaaaatctattttgttatttaataaaataaatggttcaatcgataatttttataaaatacaagatctaaaataatattaacactatattttatatattttgtattttttttttcaaatcttatgatgttttttaattagtggattgtaaaaactaactattaatataatcttgtagtattaactagctataccttgtaataattattgaattaatgtacatataaatagtattttatatagatatattatgataagataactatatatataccaatagatttaatcttgtttttgtgaaaaaacatatatagtacatcttgttatttactatatatgttttgttttaatgcacactttatttgatatactttagtttaattttaatgattaaaatccctctattaataaaatcattaaacaaaagtgcatatacctaatcaaatttgacaaaatctactcccaatataaaattagtcatgttttattttttaaacaaatgcatattgtcctcaatattttatttttaacatgtttttgtcttatatattaacgtagatttttgttaactatatttaaacctaaattgtgataaatttgcatagaaaactgttgaccgagattttcggcaactatt

SEQ ID NO: 379958 - DNA, 2638 bp, Cannabis indica
tttcttattgttttcgtgttgttcctataaaaaatcgtaaaaatgcaaaaaaaaattaaacgtaagaatataattttttataaaaaaatagtatcttatgtaattattccttacttatattcatatcctaattatgttttgattcttttgtttatattcatatcctaattatgttttgattcttttgtggcctattataattctcctctctcatttataatttttaaattatgaaaataaagacaaatatgaatttaatctcttaatattattgtccctttagtgtttggaaaaaaattctctcccgaactataacaactattatgatgagtattgttgtaaaaatacccaataattaattaccttttggattcatcacaataaaaaaaatctctccaataattgatatttgtcaaaatttgctattttaatgttgtttaatagatgacatgattgaacgctaaacctatacatggtcttatttatcatgttatctctgatactcaaactgcttttatactcagtcgtctcatttctgataatgtgataagtgttgcattatttaaagcgcaaacgaaaagggaaaaaaagttttatggccttaaagctctatatgagcaaagtctacgaccgtgtggagtgggattatttacggactgttacgactcgtatgggttttgctgaaaaatagatttctcttgtgatgcattgtggctcatctgtttagctactctgttattcacggaagtcatgttatgggacctatcttaccctctcgtggtatcaggaaaggcgatcctctttctacttatctttttattatttacgcggaaggtttttcgtctttgattcagaagtttgaagctaatcgtatcttgcaaggttgtcgtgtggcacggagggctccttcaattactcatatgctattcattgatgatagttatttgttttgtcaagcctcattgggacttgctgaaagtgttcttactctgcttaattctttcgagctagcttcaagccaaaaagtgaatgtttccaagtctttggtgttttttagtgcgaacattgaagcctctcttcgggtccaaatttgtactacacttagcatggctgaagttcttgatggaagcctcaacttaggccttccaaatattattggtggattaaaaatgcaatccttggcttcattaaaataaaatcatcaattggatcaatagttgggacggtaaattcctctctcgtgctggtaaggagatcctccttgagatagtggtgcaatcactcccaacatatgttatgagtgtgtttctcttacctttatgaacttgtcattgagacagaaatagctcatttttggtggaaaagaacttctagtaaaggaaagggtatcatttggatgtcttgggatcgcatggttgttcacaaacaagtcggtggtatgggattctgtattttgcatgattttaatcttgttatgctagccaagcaaggttggagattactgtgtaatccatcttctctggtgggtcaattttataaagctcgttatttttctatagtgactttttgacagcaaagctaggatgtaatcctagttttgtttggcgcaatatttggagtgcacaagaattagtgagaatgagagctagacgtactattggatcgggtattcatgtcaatattcttgatcaaataccttcgacgatttttggttctggtttggtgaatctacaggtgcattctctgttaagtttgcttataaaatgctacaaaaccacaaacaagctcgaatggggaatgataattttggttttcggcataaactatggcagcttaagataccacccaaggttaaaaatttcattggagagtagtttctggttgtttattaacttgtttacaacttgtttcaaagcatgttgatatttcaccagcgtgtcctatttgtgctacccacttggaatctatatcacatgctcttcttacatgctcttctgtcaagacttgctagtgtaagctcggtttgaatatatataactttattgtgactatagtcggcaattggttggatggcatttttgatcgatttgatattaattttgtgtgtcaagttggtacagtcagctaagcaatttagaaagccaaaaatagcaaagtttggaagaaaaaaatctcctttatcgatgaggttcttgctcagcttttacaactcttgattaatggcagaaagctcaggataactatactgtctatcttcattatctcttgggattaatggagatggcgctgagcattggattaaaccaggtacaaataaaattaagattgatgttgatgctaccttgtttcaaggggaacagagctatggcatagctctggtattgtagcaagggatgaatctggtaaactcttagaagctaaagttgtttatcacggtggatgttatcctgctaaaactatcgaagctatgggcgtaaaagaggctcacagttgggctaagagtaggtcttcgcaagaagtagagattgagactgatagtatggttgcagttcaagcgattcgtaataatcaatctatgtcatttgtgttagataaattaacaattaacccaagatctatttgtatataacatagaaca

SEQ ID NO: 379959 - DNA, 5434 bp, Cannabis indica
catttctattgaaaaattaacttggtatcggagccaaaatcggccttcaccatgtctactggaaactctcatactcccttgtccctatcaatcccaaccaaagtaaccttggtgcagtgactggaaatggtagcagccccaacacctattctcacaactttacttagccattcaataccttgaaccaacccttttccctcaagctagatcgcaacaactatacattgtggaaaacaatggtgtcgaccatcattcgagggcacagactcgatggcttcatcaatggtagtcgtccctgcccaccagaactcataccagcaccaacctccactgaagaaaacccagccgttactctaaaccctgactatgagcactggatcgttagtgaccagctgctcatgggatggatttacagttctatgaccgaatctgtggctattgaggtcatgggatgcgcctcatctactaccctctggagtgccttggaaaatctgtttgaagcccattctcgagccaagatggatgacactcgaaccttgatacaaacaacaagaaaaggagctactcccatggtgaatatctcaagcagaaaaagatgtggtcagacagtcttgcattagctggggacccttatcctgaagcccatctcatctcaaatgttacctctggtttggatgctcaataccttgctattgttgtacaaattgaagctagaactaacatttcatggcaggaagctcaagagatgttgctgagttttgacagcaaactcgaaaggttgcatgctgtaggaggaaataaaagtaatggaacatcaggaggagtcaacacagggccatctgccaatcttgcagctgctaatcttcttgggaaaccaaccaacaactcaaatcgaggaaggggaagctatggcggctattctagaaatcgtagtggctcatcacacaccagaggaggataccagggtcgaggaagaggtagatcgaatagttcgaaaccaacctgccaagtatgtggcaggtatggtcactttgttgagatatgctacaataggtacgatgaatcctatatgggtcatgatccaaaaacccagcaagctcagcaaggtggaagtggccacagtgccttcatagcctcacctgaaatagttgatagtgatcaatggtatgctgacagtggagccaacaaccatgtcacttcatcatcaagcaatgtcaatcagaaaatggagtatggtggtaagaatcacttaactgttggagatggtagtcaagtaactatctctcacattggcagtagcaaactgcaaacaaactctacagatgacttggttttaaaagaattgttgcttgttcctaaaattgcaaaaaatttaattagtgtgtctaaactaactgctgataacaatgtgttcattgaatttcactccaatttttgttttgtgaaggacaaagcaacaaagaaggtgctactctaagggacacttaagaatgggttgtaccagcttcaaccatcaataccaaaatcgaatatccaccactccatcaactctgtcaaaagtaatcaaaaccagcatactttgtacactggtgtttcagtttttcataaagaaagtgtagctcaatctactgttaatgaacatttgatttcagtaaatgatatgtggcatagaagacttggacatccttctagtaaggtgttaaatcaagtcttgaaagttgttaatgttaatcctccaatcaatgaaaatgttcaattctgtgatgcttgccaatatgggaaatcccatgctcttccctttaaaaactctactaaccatgcctccaaagtgttggatctggtgcacacagatctttggggccctgcccctgtcatgtcgaataccaactacagattctatatccattttgttgatgatttcagcagatatgtttggatatatcctctaagatctaaatctgatggacttactgcattcacacacttaaagcacttgtagaaaatcaatttgaaacaaccattaagactcttagaactgattggggaggagaataccaatctttcactgacattacattagagcatggcatcaatttcactcatccttgccctcacacctctgctcaaaatggtagagcagagagaaagtataggcacatagttgaaatgggattaacccttttggctcaagctcatatgccacttagatattgggttgatgctttccaaacagcagtgtacctaatcaataggttacccacacctgtgctaaaccagaaatcacccctcgaaacactgctcaacaaaaaaccagactactccttcttgaaagtgtttggggcagcttgctttccttgcataagaccctatcaaacacacaagtttcagttccattcactgaaatatgtcaaccttggctatagtcagtcacacaaaggctacaaatgcctaagttcaacaggaagagtttacatctcacgaaatgttgttttcaacgagaaggaatttccttttaaaaaatggctttctaaacaatcatgttcctgaaaaacaaaccatcattcaaaattctcaatggtcacagctcccaaatctgcacttctctaactctgaaatcactcaaccacctgctgatcctactcctactggtacagattcacattcacaaagttctcctggagcagcacctgctgataatacacctgaggttagtgaacacattgatactggcagtttgcacactgataattttgatattttacatgcaccagatcatgaaccagaaaggcaacaacaagaacctgctgcaccagcaactacacagcaacttgcaccaactcatcccatggtaactcgtgacaaggctggaattttcaaacccaaagcttatcttggtcaagccaaatggaatctcaacttagctgaaccaagttgtatcgaagaggcactaaaatcgaaggaatggaatgatgtaatggatagagaaatcattgcactaaaaagaaacaaaacttgggtgttagtgcctaggctgccaggatacaatcttattgggaacaaatgggtgtatgggaagaagtggactgcagatggaacccttgagagactcaaagcaaggctggtggcaaaaggattccatcagaggtctggaatcgacttcagcgaaaccttcagccctgtaattaaatctgccacaattcgagttgtcttaactcttgctgtgtcaagaaacttggaagtcaagcagttggatgtcaacaacgctttcctaaatggaacattggaagaagatgtctacatggtgcagccaccaggatttgaagacaaagaaaagccagactatgtatgtaagttgaacaagtctctgtatgggttaaagcaggctccccgtgcctggttcgacagactgaaacacacactaaacagctggaatttcaagaacttgaagacagacaactctttgttcttctactcaacaggacaagtaatcatacttgtattaatctatgtggacgacattatcgtgactggcaacaactttgcagaagtgaacaagtttattcaagaactgaacagagcttttgccctaaaggatctcggacagcttcacttttttcttggcatagaggtgcatcaggatgaaacaggaatgtacctgactcaggctaaatacatcagtgatttgttgagaaaatatgatatgctgaacacaaaaccatgtccaacacctatgattgcaggtaaacctctgtcgaaaagtgatggtgaaccaatgactgatccctctgtttacagaagcctaataggagcacttcagtacttgtgtcacacaaggcctgatattgcgtttgctgtgaacaaactaagtcagttcctccaaactcccacttcaagccactggtctggtgccaagagaatattaagatatctaaaagggactgtctatcatggtctgcacattggatacaatgaaaggttgacacttgaaggatactctaggcctgttgtccagatgataggaggtcggttgctggctactgtgtatatcttggtgacactttaattgcatggtcatctaaaaagcaagagttgtttcgaggtcaagcactgaatccgaatatagggctttggcacatgtctcagctgagataacttgggttcaatccttgctcacagaattgaaattcaagttaccaagcataccagtcacatggagtgacaatcaaagtgcaaaggcacttgcctccaaccctgtttaccacgcgagaaccaagcatatcgaaatcgacatccactttgttcgtgacaaagtaatgaacaaagaactcgacatttgttatgtaccttcctcagaccaggtggctgactgcttgacaaaaagtctcacacattcccgtttctggtttctaattgataaactcggaatcaaagaattgccccttcgtttgaggggtggtgttagaaaccatgtatgagcaccaccttgccttctggtgtgcctcagtgtagcagagtataattctcatagctggcagaggttgttattgtgtaatcattgttaagagaatattctctttttctgttatgccttgtattctgcgtatgccacctggcaccattgtatttgctcccattgtattggaaaagtctatttaatgaattcctctctcaaattgagctgagaaatcctttctgcatttctattgaaaaattaacttacggggaatgagattctttgccaaatgtgcttttttatcatcaagacgtcaaagccaagcaaggaaggtcaccaagtagtgtagaaaccatctacccgaatactgccatctttatgtcccaaaagatggtagtggtcggccacatcaattggtgaagagtttctttggccaaagtacatttccaatattaaggtaccaaaaactagcgacaaaagtcaccaaaaggtgtgtaacacccatggcagacaactgccatctttgtgtcccaaaagataacagtgctcttgataaagactcaaattaatagactttaagcctttatttgtgtacatataattaatttaaattaaatatttcttttattaatggtaaatttattttagctgaaaaaatttaatttattttaatttttgtgttatttttcaaatttaagcaaaatggtataaataaatggtagagtatcaaacccaataagtaaagagagatcaagaagtgtatacactgaaggcccatggattcacgcctaacccatctttctaattaaagttttatcatgggtcatttcttctaaagcctaatgtccaagcccatttcattaatcctctttactattattaaattgggccaagtatgactaagtcaatagatgaaattacattctatacacttttatatattaaaagttgtttttatttttaccctcttttttaaagtct

SEQ ID NO: 379960 - DNA, 3062 bp, Cannabis indica
aataataaataaataaacttaaacacagaaaagggttcctgcagaaaaacaggggtgtgcataaatgttaaaaataatacaagtattatatgtactcttcatacagaaggattcattagaagattttattacgagttaaagaagaagacgcaatttttaaaacagaacaattattaggctaaaaagacagttattattattattgtcaaatgtcataaatcttaagactgaaaaagcaaaaaaaaaaatggaaaaaatgggattatgagaagttatcgaggcacgtctattgtgcatggtaataacggatactaaataactcaatgacaatggtaatggtaaagacggctgtgaaaaaggctgcaactgcaaaacactctgcaataacccatttggcaaagttgagggtttttgatcgaaattgccttatttccatttaatttatttattttggtttctaaaaatctaaaaaagaaactcttttgtgtcttgtcccagacccatctttgctattttttacccttcttatttttcttcaaaattttatttatttatttatttttttagctgttggagaagagtgttgcagggactgagtgcgtgcagggggaagaagcgaaaagcacgatggtatgtatacctcagaccgcacgtgaccgctgcgtaggaaagagggttaaatatttttgtgtgtgtgagaaaaagagggaaaaggacgaataagccctgactttgagaataactatctcttcttattaccctcaatgtaatttcaatttcctatcatttcactaaaaataaaaattaataaaaattaatttgtatgtacagctatttccttttcaacgtttgtctttctctaacagattctttaagaatgaaaacaattttggtgattgattcgaaatattagatggattttttactacaattacagtctgtaaaattaacgtaatagtttttgttctattgctcactttgtggtacaaaattacaaataccatatgtttgacttatttactcatgaaaaagaggaagatatgattattttgacagatggatgggtttattgtgtagaaaatataatttttgagttaagttgtggatgtggggtgggcattaactaaagcccatgaataatgggccatgtaataatgattgggtcatcttcagaaatagtgaaagaaacaacttaaagaaggaaattagaataatccaatttcaagtgagaaaaaaaagggaatggaatgaatgaaacttttgtaaatgaaaatgatatgatccaaattgtaaaacatagaaattatatttaattattatgggccttctgttctgtgtgagtgcacactctcgctgtcattttaattgcaaatctttggtctgacgcgtcctttcaccctgtgtctccacgtaagatacaacttttttcttattcataaaccaaaaccaaatgtaacgtgttcatttcaaatctataaatgaactttcattaaaatacaaaatataaatctatatatgaacttctaaggtcgaataagattgtaaggcataatagataagattattgtgtggtagctctttatatgttaagagttacgtttctgttatagaagtccgttaggtgtcagttagttgttattgttggaactactctaactaatttttccttctcctcttcttgatttgttagtgagctattgctcttgtatatatacttgttctctctaacaatggtgtaataaatccagtctttcttcaatttatttttttttctttctttctttctttcttctcagcaatggctaagaactttcacatggtatcagagcaagattttccaccattaatggctaacgttgttactagccacgggaagagagttgtcaccggtgatagctctagtcagaaccaacatgattcatcacaccaaactcaaggtcttcaacgcgccagaaggggagacactaatgattcaactctagtttacttcaatcatagcctctcgatcaagttgaatgatcataagtcataacttcttactgtagaaacagcaagtattggcagcaattcgtggtaatcgcctgcaacactacattcagggccatgatcctccatcaaagtacgtcagtgaagaagattaaacgagacaaatctacaatcatgcgtatcttgacggggaagctcaagactagctaccggtgtcttggctcttatcgtcaacgactccaagtctgctaactcgaatggttggatgtgaatccgcaagtcagatttgatctactttggagaagcacttcactttacatgttttagccaagattctcaagttttagacaaagtcgtagaatctcaagaaaggctccatgtcactaaatgattatcttctcaaagttaaagaaactatcgatcttcttgcctcgattagagatgttctcactctaagagatcatgttcgtgctattttcaagggcctcccgagtgaatatgaacatttgtcatatccacaaacacgcatcttgaacaatatactgttgcaaaaattgaagctctcttgctggcctccgaatcacgaatagattagacagatcgtgaagttgatctcagtgtaaatcttgccactatggatcttgatccagcattggaagctaatttggcaaacttcgatcaaggaggatataaacagcaaccttataatcgattccctggttctggcaatcaacattttgatagaggtaacaattatggccatttgaacaataacaatacttttggctatcctacttttactcctactcgtggtaatttcaattttgataggggtagtcgatttcctgtaactaacaacaaactttagtgtcagctttgccttaaacttggacatactgtctaaagttgtttctatagatttgacaaaaaaattctaggccctcctccatctggaaacaccaatgctgcagcacctcaggcaaatgttgtcactaactccactgagtgggacatgaactggtatcctgactcaggggcaaccaatcattgcacctcagtgttggaaattattttac

SEQ ID NO: 379961 - DNA, 4259 bp, Cannabis indica
aatattgtacataagtagttttgaaattattttttcaacaaaagatgatcatgggccaatagagtggccaactatatatgggccacaagcccaaaaaacttaatacgtaccttcatcaacggtcttgatcaaccgctggttttagagcatgatgataacactaagcaaaaaggatcatcttctccgaccaaatgtccagtttctgtccacaacgatttcttcaactcctacattgttcttcttcctcctttcaccactgaaaaagttcaaaacttttctctatgactacttgtattcattcattttgtaaagctcccacctttatttttcctcctacttctttgggctcatcctcatttttctcaaaaccccaccaagcaaaaccattggggaagaacaaggattcccatattctgggacaaagaggattgttgtgtaagaaaatcaaaagagggactccctgtggagcacttcttccagttgatccatgggctcccaccattgattcacagagcatagcttcacagttgtttgcagcttctctattcccttacattggttttctctattttctcaccaaatctaagtctgccccaaagctcactttgtttggattctacttcttgctcacctttgttggggctactagtaagttttctcatattactttttagctcagtttagttggatgattataattctctttcttctttctgatgtgaaaagactatgtttttctctatttaaaatttaagcttttatcagattgtgtggagattcagatacccttttgattattaatctatttagtgtcaaaacagttaccataacttctttctttgatccctcaaaacgtctttggaatagttcttgttcttatctttctccaattttcatatacatgtataaatatagggatatttgtggggtaatttctcaaagttttgaatttataaccgatataatctcaatgattttcttagcgacataagtacaatgttagtaaaactatactttttcatctaatttcgttagtacagattccatcagtgtcttacacataagacaagttagacttagattctaaatcacggggtctggacgtagtatcagttacttctaaattttcttttaacaagttgaaaaattaagtctggttacaaatttaagacactagcgaagtttgttttggactaaattatagttgtactaacattagttacttatataccgctaaaaaaagttatgccttaaatattcaaaactatatgtgaatatataatttatcttgaactttactgacatttttaactttgatctttggtgtcctgaatccattgaacagttcctgctggaatttatggtaagttctcacagttttagagttctctaattcaattactttattatgctttcatacattttgcatagatggactaactatgtttactctcctttgagacagcaaaagtgcactatggaacttctttgtctaatgtggactggttacatggtggagctgaatctcttctaactctgaccaatatattcattgtgattggattaagagaagctctgaggaaagctaaagatacacaagaagatacaccaagtactgtatcaaggttaaaggaggagaagaaaactcaactttaagtggttttaatgtatgtatgtaatttggtcttgtgttcatgtcttcttgtcacaatagctttaactattttgtcttgtcttcttcaactttctcaaataagcttaattttccaatatttctgacataagcttatattgtgatatgggatgaatccattgcaagaattggggtgatggggttggtatgttaaattgtagaagcttgtatgttgttcaatctcatgtgtgctgtaaaatgatttcattttcaggtgtaaatatacagattgaattgatatctgaattagaatgcccttttctggtattttctagcatttttatttgagtgtttatacttttctagaaactctgctttaaaattgaacttcaaaggaagaacctttgaaacttgttagtctcaacatacacctatttagtacgaaaaaggcacttaatgaattttacaaactattaatcttaaactacacacttaattcaacaggtaaatatagctacctaattgagctgcaatatttgttttgttttgttttcttttcgaaaacatttaaattgaatcaagagtaaagtccaggagtgtcaatgggaaattcgggtcattgttcattggatcaagtgagaaattcatttctggaataggagaattggttactgaattgttggctgagataatctcggtatgatcagattcagaccgttgttgttgaacgttatgaaaagctgtaggactgtttatctggaacggcgaaatctggtagtagtttgattcaggagttgctggagatataaatgattgagagaagcctcccaagaaagtttcattgtctaacatcaaaggtgtaaagctatcttcattcttcacattcatacatccaaatgaacttgaaggaaaagagaagggagattccatcacttctctgtgtcccaattcatctgttattaccctcaagttagattgaaacttggggttgaattgttcaaactgttgctgttgaggaatcatgttttgattgttcggtttctgatctttcttttcaggtgatttaggtggctgaaccgagttactcgcctgtgaacaactgtgtgttcctctgtatgtaatctcgaaaaggaaaggatcttcatctgttctttgcacttgctttgtggcccaacaactctgtgtgttgcgaaaagtacatcggtagtagcttctgcaaaataaaggtaacatttttatgttagaattttgagctaatcacttggggcagatttcttccccatcccttcaatagcttagataatctcagagaccacgtgtcaattatagggaacttatatctcatcctctctttattgggtcatcggtatacaccttgagggttctcatcccattaaggatgacaccaccaccacaagctagccttccaaatggccaagcataattcctctcatcagggactgtggtgggattcgaacccttgacccaaacaagaaagaatgccaataaagacatttctaccactacaccacacaacacgtgggtactattatactattattagttgatggtttttgcctactttttttggacaatatggtttgtatatgacaatgactgtttacctaggatacttggctcctaggatgtccttttgtccatactttctccaactatagccatcatcttgaggtccctccaaaccattttcagagctaactctcacttgttctgtccatctaggcaatgtctttctgcaaaaccgaaatccataaatagtgagacacacaatcataagtagtcaaacaatcatgaaaagagtagaagttcaattcaattcaattcaccttttcttagagctatcatgatgatgatccttgaatggcctatcaaagttttcactctgaggactttcattattcgaaatgggagactcgggcaaacttacactagtcgccaccctaagaggctgctgctgctgctgctgatgttgctgaccgccaccccatttaagaatcgaaagagccttttcatacgaagataatatcctctgcactagaaattctctattctccggcaaagcttgagaacatatattttgcttaagctgtttcgctaattccatcccttgaacgagctcgctgataagtatcttctgctcccagctccaattaccctccattgttcttttactcaaaattgtaatcaaatgaattcaacaaaaaccaacccaatacagctcttcttttcttatctcaaaacttgttacttttcattactaattaaaacactattcctcacaatatggagagtgagttgtaattggaaatttgtgaagaagatgtatttaaagggtggtatgtttgagtttgaaatggtggggtttgtttaatttgagatttgaagtaagaaagtttgaagtttgactaagaaaccgagttattcagctctgactagtctttggtcattgagaaccaatagaaagaaagagtttttatttgagtgagtgaagaaagtctatgctgaccaattcctcttcttctattactactctcacttatttgttggttcaattactctcaaaagttcattttttttttgttttatataataatttatttaattt

SEQ ID NO: 379962 - DNA, 8752 bp, Cannabis indica
aatttggataaaaaagttgtccaagatataaattgccaatagaactataattatattttttgaaaatgcataattatatattacttaatatatatacttattgtaattttttttactcatcagtgagtttaaattttgatggtttcaacaagtgtaagagtcttgtgctcagttatattattaattaatgatcatatcgtgttcatccagtaatgtatgctgttcttttttattaaatagttccagatcaggttcaataataattttaagcattgattcaaataattagagtatcttaattattcattgctatttgtctaagttttttttttattttatttattagagattgggaaaaaaatgataaattgataatcagttgaatatttttttttaacattcaataacgactttcacttgaaaatacaattacagtcaattatttctatatttgatcctttaagaaatcattttgataattttgttgaaaattttgcagtaggccggtgaaaaaaaaattattgaagagttaattaatcaaacatattcgtttatagtggttattctataattcttcaacacttataaaaagtgatgtataatttataatttagagttcaattaatgttattttaataaaattttgaaaaagaaaatgcaagaaaaaaaaatggtatctcattattttcttggtagagatcagaataaataggtaggtagtggatatatggtctacaataaatgctaaaaaagtactactggtgtcatatctatataaatataatttaaaataataattttaaaaaatatcattaactaatcataaagcatctcttataaaaagtgttaagcattactaattttcaatagcaaaactcatactattttattattatttttgcagcataaaatcagccaaggctaaccctagctaccaaatctaaagtaactgtatactactaattattcttaattatgcttataaaattatgtaaaatttagtataagtaataattaaaatatgtaaatttaaactgaatgtatcatatatgtttaaataatgtaactataaacaaattaaaataatataaatatatatgatcgggtaattatgtagggaataggcagagtacactacactactttaaacatttatttaaatggtaatatgctatttatacgggtgaatacttacaagtaaatggtttgaaggtaaaatattgtcatttctattttgtgtttgatttttgtaagtgagaatgtgaaaaaggaaaactatgacattctttaatcatattatacacatgatatgacaatagggaggaattttttttttagagaaacattaacaaggaattcaaaggaagtgcactttccctaatatgtcctcctaaagtctaaaagggagaaaattataatagtcaaaaagatgtaaggtataaacctaattttttattggcaatgaattgaatagtcatataaaaagaagaaacgaatttgaattagggacacacgcgtataactaaataatttgatgtacttatcatccttctaagtcttttaatcatgtctcttttttttttgttgataagtagaaccttttttaattaaaaccaagccaaatttgtaaccacaaaggggcatttctcttaacaaatcagcgttgttaacctttgtagctctagcccaattggctaaagcatcaacaacttggttctcaaactcttttgcttgtatgaataattgatgggattaaagtgctctttgattagggtctatttggcaagttagaaacagtaaagatacactgatttatttttccaataggataccgttgccttaggtgtctttagtgcatcttctcctttcatgggagttgatagtgtggtttcttctctcaaaatggacacaagtaaatgggctggcaattttgtacataatttttttatttacctaatgaggtttcaataattctttttatttcatggcctttttatacctactattgacaagctcagttaaaatttgaaaattcgaggttgtacacagttaaaagtgggtaatggttattggttgtttgtcaacttgatttgggacatactttcacttctaatagttttttcggttggtggaagaaattatgaggcctcaatattccacataaggtgaagatgtttatttggaaagcttcttcaagatggatttttactaaaattaatttgtctcatcatggtctccgtactgatgacctttgccctatttgcgagaatcaagtgaaaaacaactcaccatgcgtttgttttctttatgagtgtacgtaggaagttgttgttaggttttttgtcctaaatataagtattcaatgtaatgtcattacttattcagtaagaaaaatagaaaatcttttataactttgtcaattacttgattcacacattaatttcttttttacctaattatatgtttaatatttaaattctattaaattcaaaacatataattattcacaattattatgatatcatcataatattggaaaataagtgtgattatatgattcaaatattcaagtcatgagatttatcagtacaataaaattatttgaatcagataaaaagttttatatcgaatttgactgatattgacagtagaacatatatcataatctatcgttatatctattcttagccaataatatcacttagtatattataaatcaatttgatatgaatcctgacataattaagctttgagttaattatgttatttgagttctttgacttgttcgttactagattaccctacagactagcctatacttatattttaggaactcagtagcataattgtgggagtgtcagtaatagatatggacatctatgacttctattatgtttaagtaaaacaataattttctttgagcttggttgaagcatttaatgacagagcgctcatttcaaatttaaattagtttactaaaatatcattatatgaacttaatgttttaagaataaaatggtaactttaatcccttttaattataggcaatctatagagggtcattgattgatatgatagaaataatgaataatttatagcgtatctagattatgtataaagagtattctatgaaattaggagtgtgattctgggtctttattgagtcatgaggaattaataagttagattttttctaaaaatttcagatctacttattaggacattgattttataagctcacgattcccgcaatatctacgataatgcttaatagtaggttactataattgattcatttaaaattcacattattaattttatcaattttaggaattttccacaaagttgttgaattttagaataaatagagaataaagagttaattattaattaagatattttgttgtcataattaataaataacatttaaattgtgtttttatttaataattatttagatataattatttaattaaaactagtgcttaaatataaaaaaaattattaaatatgtagaaatgaaaagataacatggtttttagtctgtcgatcccgcttttagccaacgacagtgattcttaattaattttgtgtccttgaatagggaaataagaccagtattcataggggctacttacataagaattgtttcccttaatatataaaagataaaataggaaattaacttgtttttataattacaatgaggaaattaggaaatctaggttgattgactttattctctgaaagtacaaattaatctcgcaaaagtaaagattgcttcgcgacatgcaaatttggagatagtatcgatcacttctgaaatttccaattcacatttcctagctggtacatgcgagtttatcacacgatagagatggtcaaatgttcaagaatgactctactctgacatcctgctatggacgtataacttggatctttatattaatatttattggctgctaggagtaaaaccatccacccatgttcaaaaatgaatgacatgtgtcgtccagttaggtgtcaggtcatagtgtaaaaattaagataacctttacccctcaagtctgcacgggacctttctgatcgtacgtgaacttcattcagctaggaagctatccgaatgggtgacgcgtatcttggttgttgaagttgattcgatgtgacttgattgagagtctcttcagtgtctggggcattaaatgcctcttgaaagctgtacctcaactcatgcactgacaattgagtgataccgcatgcgtgacgtttgtacttcataatgagtacttaacgttcactattggggggacaacccaaattttgaatattaaatgaattaacttttgtttatagatgcctataaaagaggttcaacctttcacggaaatcttttagccactttcatttctaaagaaccagagtagattttttttgtatttactctcaaatctttgaagaaaggttggtagaaaatccattgatgttaccctccaagcagataaaaaggcttcaaaccatgagtaagttacatttccctctactttatgcaatattcattgaatgtacgcttttttattagatttcttgctgcaaatttatctgttcctgactgatcataggatagatgaaattagggcttgtaactttgactaacatttgattataacctctattactttaattgcgtgtcaattttaattactcgaagtcattaatttttagtcgttcatggaattctaaagatttccaggcatctttcgaggttttgaacttctgggtttgggaattctattttcgaatgaaatctcatctttttgtctttgatcttgcctggtcggcatataaagcctatttttcaactttccatctgcccaactcttattttcttgtctcccatctttttgtagacgaactctagtgatttctagggatgcaagcatgatatcgactaggacttactccaactcttctacaaagatcttcctcgactccgtgtaagttcattttcatccagtgataacctttcaaattctagctttgaagacttggaagtgagtaccaagcacacaccgtctttgtgcctgaggtacaacatcaccagcacctcgatcaaatatgtaaagatgggcacgggtgcttcattcaggagttaatgaaatgttagaggcattatctgcctgtttctaggacctatagggtctaacccagggttgctgacactctgcccaaagtcttccacgctctacctactaagagagttgttgttgctaagtttgttgtaactgttgcaaggcacactactgaatttaagcctccacccaagcgtagaatgatggtgccgacaaagtatacaattaagaaagcttcagagactgatccacactttacttggctatttgttgcagatggcgtggagcaagctagacattcgactaaggaaggagagattacagatggggaatttgaagtccaagaggtggaggaccaaggaaaggtctgttctactacccctcccaaggttgagggagaaggtgagaaagaagaggaggaaggttaggtgcttccttttggttgcttcaatgaggacagagagactgtctttgatgatggtgaagtcttggtagctaggcgggactatgttgaagaggaatacatcgagacctgacctataaacaacaagggttccaggagtgcttggtgggttccctcctgatttacaaaagattgattaatctctacgaggatggtcttcttgggaaggtcaaggttttcctttctagtcctaggcagctggcaataaatcctggggatgaattttatgcgtggttgggactagatgctaagtaggatgcaatgttgccattacatccatactttaaggagattacaaattattaccacatcagtctaacacagttgactcctaagagcataaagtacctgtaacccccgttcgtgatgtatgcttatcaaggatggggtcaactagcccaccacaccaattagctgtttgacttaagtgcaactccaaggaaaatacatttaggtatttatacttctcctaaatcgaagagaattggttgttggtaccacggacaccgacatgtccaaagttagtggctttgaggaggattactatttttttcaagaacatggggaccaaccatatcagatttcagcacattccatcctacttctgacccccttcactctggaacttaggagtagagcccagaagatactccaactatttgtagagacttgaaacatctcacttttagccacttatattagaggatatgctgcaagcttgtgtaatggattttaactccctagaaagtgatttagcgtatcacttatctgttttgtgtatgttgtgacttagggaactataaactatcaagcaccagttccactcaggttgaccgacacatctaaattcagaatcaaggtaagattagtataatgatatgcatatgtaattacatgtatatcgtgcatgtttatgaaagcctattagataacatattgagatagcaatattagtatacatagagttatattggatatagatgaatgtatgtttgacatgagtattgattgacgctatcacatcggtacgactagagtaccgagtataggctgatatactatgatcaatagtactggcatacaaatattctagactcagtatgcgtgggatgtgggatagggttatgattgggtgtatggctgcctagtcgtaatccaatttaagtttatgttatggttatgcttttcttactgagtcattgactcacatctattgtttacatgtgtaggtaagggcaaagttaaggctgagcagcaataaatatgagtagatgaagattgtacatatcaggacagttagacctagagtgtttcccctttctagttttgaattttgggaccctcagatctagtacttccaccgctcgtaagtcccccttaaattttcattatgttcgttttcaggaatactcttactcaaggccagttagctttgacgcgaggctttataggttctagatgccccatactcagtggggctatagggaaaaggttttttattttttcaaacatgaggtgcttccttggccaatctcaaatgagttcaagcctcatggtttccaaatttttggaccactatttcttcctaaccacaagttggttctttacctcagatatttttttaggagatgatgacaccaagttttctagggaagaattaggacattagggtaggattagcctttcttgtttactattcttttaagttttcatttgatgcacttctcatgtttgacgtttccgcttttcactctcttttttctctttttatagctaatcctatggatgaactctttgccatgttggactctacaaacaaccctgatcctacagttgctaattctccatctgtggtggtaactcctagaggccataaaaatgaaatgcttgaaaaacttgaggtagtcgtgattgaggaagaggaggagcctcccatgcttgattggaaacaagagggtgtgcctagtgactctggttcttctaaaaagaccaagttatccaggactcctactgaaagtgttgagtttaggatcccgtctgagactgaagctttccccacaattccatcgattcttctgaaccccattaaccctaacgattagcgtgttcaactcctaatttccaaacacaattatgccattgacgagcaaacaaaagaagaagcagtggcagaggcttttaaagaaatggcttaaggaaaaccaagatggtcctttccgggcggagtatgttggacaggcttgggacttaaaccttaatccaatgaccaattggttcacgaactttttggggttctttttggcaccatttgcctcagagatagtaattcactttgctgcccacctgacacagcttctgccaaattggtttgctatctacgattcctccaacccagtctatcaaattccagatatgagcctagcaataacatcggtaagcccacacttagcagttttgacattttcatttttactactttttgctaacttaagtaggctgcccatccaagatactaactgatcagggattctctgtcacagagcacggtggtattgggtaggtgttgaagaagcttaaagaggtagatgatcagatggagaccctctagaatgaggcactggcaaagaaggcccttagagaatggcatcagtaaacaatgaaggctaaggatgatagttttaccttgacttaagctaagctaatcagggactagtgtccaagctcaaaaaccttgaagagctacaccaagatgacattcaaacgacaacaagaatgtctatcaaattgaaggagcttcgtgaattcaaggaacaggcaaagaaggagtctttgaaagctggataagcagccttgaaggctccagtgacctgtaagcattgtgtcaaatgcttcgacaatggagtctttatgtgatggaaaaccaaaaagttttagcctcgtctcacatttttaccagatcctcaggttgccttagttcaattccacgagatgaataggaagcttaagtagatacttaccgagagattaggtctgtaacaccctaactagcctaggcgtgtttacgtgatttttaaacgtactgtgcagctcgttgctaatcaacgaggtttatggaaaatgtgattaattaaaattttcttatttaattaaatactcataa

SEQ ID NO: 379963 - DNA, 1167 bp, Cannabis indica
ttcattggatatcataccacacaattattttgtctttctactatcataattgatgttgaaagtcaaatttttaaattctctgttattattccgacccctttaacttatactttcttctgagtatcttcctcttcattaaagagtagttccatacccaattttgcaagcgtctccaccatagtcggttcggccttagttagaggcccaatctcagcaacctctacattactagagattctagtaaccttactcaatgattcaataaattttagcaataaatcttcaacttcccacaggcttttaatatcatctagaatctcttccgactcagtagtatcttcttcaacaaaattatcatcttcctcttttgataaatctctttttgagctaaaatcaccaatcttaccctctttgggatccttatcctcttccaatatactcaatgtttaaccccttgtggggttgaaaagatctctagagaagcttgtggtaatggatttccattttttggagtacattattaactgctttttgcttactagttcatcctttaaatcatcttcatcgtctacattgaaaacagaggcccctttcctcttttatttcctcaaaatttttccaaaaacaaattattgcagctctaaaattaactctttgtttgggtctcacacccttgattacaccttcaaaaaaatccttgatgacctgaatttgatttttcttgttgattagtcccatctcttctgatccttgcctgacttgactaatagagagttggtgtagacacatcaatttatttacttttggaaacaaaacaaatctattatgggccgacaatatgcaggctgcctcaaaattgttataaattccttggcctaattctaaattagcccagtccgcagctttcaattgaaaactctcttcacaacccagccccttcaatttacggcccaacccaaagctttggcccaattgactttgatccaacaacccctttaaagagggacacgtgcgaggtatgaattgattaggcgcattcaggtcatgaatcaacagtttaaaaatatattgaatattaatcgttccatcgtgctcccacccatcttttttggaaattgcagtatcgtgcgattagggttaagcatcggtcagtttggtcaatttttt

SEQ ID NO: 379964 - DNA, 4133 bp, Cannabis indica
aaaaaaaaaaaaaaaactaaaacgacgtcgttttgaactttgaacaaagtttgtctttcttgagctgagagagacagaaaagtccacgaaaggctttccagtaaggccacaaccatcagatcctctctcgttgcgtccgtactccagaaattgatcagtaatggcagcctctccttctccttcgtcttcgtcttcgtctgctccatcaacttcatcgtcaaaaggatggttgagcaacatctcttccatagcctcacgcatctacttcttcttaatcatgcttcaaatcccccttttcaggtaaaacatgaaaccccgctatcgaaacagagttttaaacctcttataaacaaacaattatcaatgcatggtaattatcaatacacatcgatttgggtcatttccaagatttgttttttcgctctataatttttagtgtctcaattgattcattaaatcttggaatttgttttttattgatgtgcttcatttttttaatagttgctctgttaatttgtttcagtatttatgttcaatttccgataattttgattgaagtaaatgttattctcacattccttgagtatggttgactacctgatggaaatggccaatgggattgactttttagagtggttgtgtaacatcttgttactgaaaatgacttggatctctctggttgatcatatctcttataggagaatttttaacaagtgagttatctcacgaattgagatatttttaattgagttatgtgatcttgtttctttacttcttttgcttcttttgctgttagtaggaacttgtttgtttcatctacagaagtagcattttgagaactacagaagaaacaaatggagaagcctttattaaatattaatgtacaagttgtgtacttagtatttttatgtgtttcatttgacaggattccatgcagatctgggatgtgtacaacaccattgcatgtaacatcttcccagttgattgcaagtgagatctttccaattccagtggtgaaggcccttctttaccctggagctgttgtaaatggagtcgtcacaagcatgactgttccaagctgggataacttgttaagcatctacaacttgaccagtgcaaaggaatctcctgcagttgctgatctccaacgattggaggttttttttcctctccacccttgacctctctataatggtcttagtgtttataatccttttatttgtcctgagtgatgtctagaattattttctgttgttgccgatgttatttgcttggtatctctttaaaagctagcttgtttaaatactgcaattttctgacttttggtgaatggaagcagtatatgttgtttctagtcttttctcttgtgcttacataccaaaaggttaaatctattcagaaccttaacatttgaccacagaacgtttaaagattaattcaacacctcataattatattttgtatactaagaagatccatattcataaaagattcctgttcatcctctaatatctttacccttagaccttgtgtactaaactttaatgggctgtgacgggaacggaaataataataaaagaaagttttccttttccatcattcatgtgttttcttacatattatttaggaaacaagttctagtgaatacctatcatgaacataattcgctaaattgggcaggcataggccattttatttttattgttatttcttttcgttcctctctaaactcctccccttaacttctgttatcattatgatttgctaattgtgctctaactttattccttgttcttattgaaatagacattaataatgtcccataacatctcagaaaactttttggcattccatttctgacattattattcaaaatctcaatctggcttatggttcttccttcaggttcttgctggaagctacttttctgtggctggagcctttgtgtgccttctgaaaccaggaaggatgaccatgtttgggacacttctaataatctggggccttgtcaaggaagggatacttggaaagcctgcaaacacggatcccactaaagcagtgtatgtttacccgacaatggtgcttgctcttatctgtgcgttctcgtctgtgaagtatgatatcaagaaggctgctagaagtgcccctgctagaccagttgcgaagcctcttcggagctctacaaaatctaaactgaaataagtttcttgttagaagttcttattgtttatgaacatgaactatttgttttaacttagcaattattattttcattggtaacattattgtttctgaaaatatctccattttaaacttagtacgtgaattcagaaagttgagatcaatatttgctgaggatatcttgttgatgctttattaaaataggagtcccattacatattttgcattatggtccttaaacatgctgtgttgcttagtgtaatgtgcaatgaggcatgagattgtgatggttagactaacggtcaaactcaacaagaaggacgacccgaccttgtaatttaattatgacttttctgaaacttttgttccatgacacagtaggtgcctcctaattatgacgaaccagcttgtcattttcctggtaatttacttagttgacttgacttttgctatagttttctcacatttacagatgtatatatacttttgtttacgttcatacaacacattgtttgtattgaaattctagattattcaatttgtatttcatagtctttcagttatgctttgcctatagcctgccgaagctacgaacagttctttgatacaggtgtagcttacttttcatatcttaattgcttctactcttcagcaaagcattttttttctctcggacattttaaaaatattgttcttctgctacattttctgggcaaccaaacagtagaaaagaatcagcccagctccttttctctgcactaatctgtttgctagttttattctggtgttggttatcattcataacaaggagaaggcacacatggcaaacagatatggagatcattctccaaatgacatcgagaatccatcagtttctttggcgacttcgctgagattggagttggaaagcttgtctcccttatcttccaagtgctctatctacagggtttctgaacggctgcggcttgtcaatgaaaatgcctacacaccccaggtagtttccattggtcctcttcatcatggcaaggaaagattaagagcaatggaagagcacaaaaagaggtatttatgtgattatcttaagcacacaagtttaggcttggaatactacataaaaatcataaaagataaagaagaagaattgcgcagctgttatgcagaacctataagattctcaagtgatgaatttacaaagattgttttagtagatgctgcattcattattgaggttctattaaggtactgttttcacgagcttcaagacgagcatgatcgtatctttaacaagccatggatgctgcaggacatctggcgtgatgtgcggttgcttgagaatcagctgcccttcttcattcttgaacatctttttaacccagaaagaatttcagtcccttcttctaatgatgagaggctttcaatcattaagctttctcatatgtttttcaaagggctgatgcagttaaagggaacagaaaatttggagcgaatatcttctccaagaattgaacattttgttgatatccttagaaatgtatatgtcccactggaacaaaaaccagaagtaaagaggctgacatctatgaacatcccaagcataacagagctacaccgagctggagttaagttcaagatgaggtcgagcaaaaatttgtttgacatacatttctctgaaggaattttggaaattccgaagctgacaataagtgatgagatggaacttacattcagaaacttacttgcgtttgaagaatgccattgcagggagaatttgttacatgaaaagttatagggactagttagcaattgttaatattgcttagttagtataaatatgtaatactattacacaaatggaaatcaatgatacaatttggtaattgtatcgaattgcactcttcgagtcagtgccaaactccaataggaattatcctaatttttctcatttcattcat

SEQ ID NO: 379965 - DNA, 1443 bp, Cannabis indica
agaaaagcaacaaagtctaagaaatttaattaaaagtctaaaggttcaagcctttggaaccagaaccccaaaaggctagagataaaaattagaaacttagcaaacttgatagattaaaatgctaatatctaaaaagttaataaagtatgtaaatgtctgaaataaggctacgtatttaaaatccctacgacaagggcataaaatattgtctccgcccatgaataaaggagggtctatatcccccaaataataaaatattaaagtatcaaaacaagtaaaagatttgatagaaatggttaaggcatggctgggtcctttggtggttgagtatcatcttactgggcattataaaattgggcattgagagagaccttcaagatcgttgagtcagttgcaaaaggagaatcagaggctgatagagcttggtcttccaagttcacaccctccaagaggaaagttctaggatcgaccacttttgttgtcttagttacatccttatccttctcagccttagccagtggaagaacctaggacataagtagttccctatcttacatcatcaaaagctctatcacggatttgtttagttgccagatagtgtacagagagtatacataagcttttttttttttttgatgtcctagcctcttgatcttgcttttcctaggcagcctattgaagttgttcttccagccctaaagtcttctcttccagatctaaaatttttgttttagactctttggaagattgagccatggattgtttggtagcgctcaactcacctgtggtctcttgggccacaatgacacctttattctcagcttcctttgccttttactgcaattccaagtgatgcttcacttttctctctagagtggtttctttgacaattattttgtctataattataatttacttatcatacttctgagataagtgggtgagatttcgttctgattctttgatatccaacttttcttgcttaactgtttcctccaagtctttgatcgtagtgagagagcctgggtatatcattctttttacttgtctccacgctcgctcttagccttggcgaccttcttttcacgagcagtaaccttatttagagaatcattgacccttttgattaaagatggcctccatcctaccattggcacatgctaaggctttggtagcctcctctctttttcgctcagcattggaacgttccatcttcaggatctcaagttcatcggccaacttgatggccatagagtagttcctctcgactgtcagactcacttatggatgaaaaattgcaaatgagctagaaaacaaagataggcatattttttaacttaaattagttaaatgaaattcaacttacaatgttggcctaggtcctcatataatctgccatataaatagtgttatcccaatttttgcactctgatgtggcatcac

SEQ ID NO: 379966 - DNA, 758 bp, Cannabis indica
atacaataattggagatggtcatgtaacgaaaacacttaataacttaatcacaaaattaattaaatctgcttttattaatattagtcactaattgtaccattagaaaataaatatatattattgcaattgtatataattaaattaagaacgagtatcacatgcatacactgtgtccagactcagaactagatcgagttcagtttccattgtcttaatttcttccttttttcctctctacactctaataatatccattttgaaaatatttatatatacatgaatctcacatggattggccacttaaagtcgttgactcttttccaccctcacactcacacatagattattaaataattaatttataataaattactccaaatcttaatcatcactaccaataccacttagttaattatttaatcataatattctaagatcttaatgaaaaaaagtcataattagatcactagatcagcttcttaaaagcaaaaagcatactaatttatatttattttgattattatgatcacgggtagggatgcacattttttctatggggatagggccctgcggggacctgcccctaatggggcagggattccccgtctaaatgaggaatggggcggggacggggatcaaattttatccccgaatgttaaacgggacggggacagggatgatactccccgccccgacgaggacccgtttaatttattaattattttttattaatattttatattttatatatgcattt

SEQ ID NO: 379967 - DNA, 6208 bp, Cannabis indica
tctttctacttgagcatcaaaatccccaaactacccttaccaataccaaaccccaaccaaaccaatctcattactcaaaaacgtactacatgtactacacacgtctcaacattaataaaaataaataatccttttattattattattattattttctgcaaattaacattttcttttctctctctaaaaaccccaactcagatatttcccaaactcctcccattgtttctctctctaaaaaaaagcttaaagatgatgcatatgactttctactggagcaaggagatgactctcctgatcgacacgtggcgcacatccaccttcactggctacgctctctccttactcgcttgcttcatcgtctccgccttctatcagtacctcgaagatctccgccttcgtctcaagatcgcttccgccggaaaaccttcttcttcatcatcggatcagaatcagatcgactcatcttctcaaactcctcttctccgaaagagtatcgccggtaagtggtcgatcgccagactggccggagctttgctgtttggagttaactcggcgatcggttaccttcttatgttggcgatcatgtcttttaatggtggagtttttgttgcgattgttttgggactcactattggttgcttcgtctttcgtactgctgatgatgatgttacactcatcgttgatatccttgtgcttgtgcttgattttcattcatacggttcttattttcaattttcgtattttaatttattgtaaaattataattgaaagttttcaagagactctgtgggtccacgggaaatgttagaaaggaaaaagcagaattagaaatgttcgaactggagaaaaggataatattcagagattacgaatactgaattactgattgttttttttttttaatctgatgtaaatttacaattcaagagctgtgtaaattgttgttgttgttattattgttgttttctctctaattttctgtttggttctcgggaaaaggagagagagtctctgattcaacggttacgatgttgagatttttttcacaaatggaaacaaacaattgaggatcagcattgaaaggtgagcctttgatatatgaggatgaaataaatgataataatgataatataaataaaatttgatgagaaaagtttatgaagttcaaagcttgatgatgatgatgatcaataattcattattatccaattcaattctagtttttcaattatttcatgagacttgagttctaaaactattatatacattttgttttgtcatctttttctctttgtttcatacaattagacatgaattagattagctattctctcggtaacccgagctaacaatgggtttttcactcgaaccacttggctcccgaggcacgtggcacgtggcacttagcctacacaaactaaagatttgctcaagccaggtggttctgttgcattagagatgctttaaataattctaacgtacacgattataaaaaaaattaaaaatgtcaaaataaataaaaactgcaaatgataagttttactcgaggcacgtgactcttagcctacaaatcatagattttgcccgagccatatgactcttggtggcctgcaaacgacaagctttgcttgggccatatggctctccctctttgattggtagcctgcaaatgacaaactcttgcattgcaggctgccaaccaaacgaggtgtattgcgtgctcatggctcggtagcctacaaaccatgatttttgcaaaaccgatgtgtgtgaacttgtgagtgttttgatgatggaccaaataaatccacctatatagagttgtgtaaaacaccagaaagggaagagttatgttttttatgttaaaggaccacaaaaaatcaatatacacaaaggggaaaaaaagtgggggagcaaatcaaggtacactcagactaagcatttatcacttttctacaagtgaactacagaagtcagatcagcacgatctttagacccttttctctcccaaatttggcaacaaagagaagaaaaatatttcagaaccttttgatttgatcatcagcagcagagttgggtttttgtcaaattttgggcaaagagagcatgatgatggcaaaaaggtacctttagagacagttagtgaaagaatgagatccaaaattagtccttttcatttagctattgctgatcttgacttttcagtgccactaattcactctcttgatgttgttgttgttgttggtttctgtactttgaactgtacggtaaccaccttcgaagtttatctggccagaatctgattaaaatttgcaaaaaataaccaaaactcaatatgaggggtatagcaaaatgacttttccaaatacacttatcgaaaattctagtttgcgtgaaattagtaaaatgaagtcatttcgcaaagtaactttacaaataatctatttttaccagttaatcttataaataggtaacaaaaaaaaattaatgacttacagatccaatctttcataaattgcccgccgaaccgatgagtttaggccatatgcgattgagttaaaaaggccctaaaacaacaatgaagaactgatttttagttttcaagtatttgaggaataaaatggtccttggctacataaatatatttatagtgatcacataagcatgaaaagtgaaggaaatcaccataagagacgcagtgccaacatcaagcaccgaaagccaaaatattttatgacctggctcgatgaagtcatgaatgcggtttattgtggcaaatgcccatgatcctatcagaataagtggatagtatccccaccgatttaaaacctgtagatgaaaataaaaatagtatatatctaataaattatggaatctgagcagccattgctgttaacacaaaaaaaagaagcaagacttggatagacaaagttactatatatcataaatggaatatataacacagaattatgtttctcatagacatagaaattgaagacaaagcaaatgccacacatatcagttgtttaatatattaggcacagtaatttgaaccttaaccattttttaaacagctccaacatcaagcctatccagattttactacaataaatatctgtctatccatgtcaataaaaccgcataccttcatgtctggtcttgcctctgtgtgatatcctcggtcagacatgcccacagccatctgaaagtgcaaacgagtatggtctcagcaaatgtactagtgactagaattgttaatctgataaaagaaaataaagcagttgaaacacatacacgagttgcattgtttaacatgcgtatcacttgaaaatatgtaaaaccgttgtaaagaattgcaccccagagcggtaggtaaaatgttatgaagtgaaccacctgtagaataggtatgaagttgagattacaaccagcaaaaaaaaggattcatataaatcatgcaccatcttcactgaaatcagatgctctagaattatggcttttaatgaatgtatttgcaaccgagaaacattctccattagcagaactaaaagaattttaaataactaagcaaatccaaggtcattgaaaaatgagaaatattcttataaacaatgagcccagctagtgttagtccatagcttctacacacttgcctttccagtgcttgtttgtgtcgagcaccatgcgcctaagtgtccgtggttattaccaaacgagcgtatgacagtcataaccagtgaagtccctgtaaatagcaagtcaataaccaaatgagcttaaggactgaagatggcagaaacagcagaaaaagcataatgagtttttaagaagccacatgacattaccccaaacatacaagtgaaagatggcctctaaatcttcaacatcagttttgtgccgaacaacagtacggtgaagagtaaatgctattgttgtagtccataggaaagatgccacacaaaagaaatgtgtactgtaaccctgagcatagcaaaagaatcctttcgacggatccctgcacaatagagttactatgagccaacatcatacgacacacatgcgtatacatatgatatacccgactgcatttcaaagcatacccaaccatggtgaagaagctgcatagcatatcctgatgtcaagaaaataaacaagatgagtagatattctaaaattactcaagtgtcattgcattttacactaattgaaaaagaccaatattttctatagaaacacagaatggcagaattgtttttgaaatatttaatcacgccaaacacaaaatttgacccaattaacaaaatccaatcatggagttaagatttagtagctgctaagtagaatataaaccccaaaaatcacttacatatacatcgtgggatagtacacagacacaagtctcctttttcttatatatttaatcacatcaaacgcagcatttacccaattactcaagaatgacagaatttgaaggcgaaaagagctcaaatgggtgctcccacaaaatctgagattctagtcccttctagatacctatatagcaattgctatagtttcctcattcccaaatattgcagggttaggtgaagattctagtttccttcaaatgaaatacttaaaaaccttgaattaccacttcttgaacaagaattttaatcaaagtaaagtaagcatagcttcaattgaaatacttaaaaacttgaatttccacttcttgaacaagaaatccttaatcaaagtaatgtaagtatcgcttcaaatgaattacttaagaaacttaaataactacttcttgaacaagaaattcttaatcaaagtaatgtaagtatagcttcaaatgaaacacttaaaaacttgaatttccacttcttgaacaagaaattcttaatcaaacttatgaaagtatagctttaaacagtgaaaaagtaagatcgtgttgttcaacatcataacttgaataagttcacacttcattacttcctctcaagttctacccaaacataaatcaagctccaaaactatgacattacgcttaatttcatccaaatcataaaactacaatcctaaaagctaaattccttattcgtgccaataattcatacgaacaaacaaaaaaaaaacgaacgagcaattagatccaacattaaaccagataaatataagtaggcataaagaagtgagtgatagaaagaaagaggaatatacagaaatggcgaggtagaagacgagcttgaaggagaactttcggagctctttgaagagtacgtagcagaggactatgaagctggagccgacgaaggaaagtgaagctgctccggcgttaactgccgtcaaaatctggcgatcgtgggctgatagagccccggcggccacctgtgacgtcgccgacattgtcaaaaaatatctaattggattcgaattcgaatcgttttacagttttttagtgtgatctgtgtggtcttttgtgaaattacaaaactacccctgttcaaattaaacaagtgctcttttggtacgacttatcccgtctaatctaatccgcacgatcaatcaaattaaattcgtgaagtgcaaatatttgcacaaattgaattagtgcagattggatattaattaatatgtaaaagtaacttatccaattaaatttatgcatatttaaaaaattataggatttttttctcttatagccccaaaagccaacaatattacaaatatattttacgctgcctaatacatttttatacagcccgagaaaaaaaataacaaaagtacctcttactttacccttacagtcgcacattccttgcaccagagaaacgaatccaaccagcgatcgaaagagatcagcaacgataaatcaacgctgacaaacggagaaacaccattaatcctggaaaaatcacttgagaagaagaaaaatatcaaaccgaaaaatcaattattaccaattgatgaaggattttgcagaaaaaataatgtttgaaacataaatccaaccctgaaaaaatcgttcaatttacatattcataatatgtagacctgtaagaaatagatttggagtttccaatcaatccaaatcaagtataatctaaatagctaatattctaatggctaattaggattttcgccccctaaactttgacatgtaccaaattatgccccctgaacttttaaggacattgaaaatgccccctgaactattgag

SEQ ID NO: 379968 - DNA, 1202 bp, Cannabis indica
tttttatcggtttttttggtttggtttgggcggtttacgaattttttgtacaaccctagctataattatgcgggggaataaaatgtccatcccgattattcctctttcgatttaaattatctcgaagatcatttccacgcctgggtctcatttcttggaaaattgagtctgctttaggcttcttgcctgagttttggctggtggacctctctggcttgggaggatttccgttattaaacacgttatcctggtgattattaccattgctgggcagattatcttggcgattatcgcgccttcattgacagttgtcataaggccaactttcagcaccgcatcatttttatttaagacatgactcatcactctaagaccttgttcgatcttgtcgggttgctggttattgttcttattccgcccatatacctagactcttccgtgctagtggtattgggggacatacccttgagatccccctacatgcggaggaggtgcatcttcatttcttccttctggcccgagtcgaaaattggtctggtcatcccttctaaggtagtgacctggtaaaacttgctcatcagcatgatagtaatgattatgctcttggggccttgaatcggtaggtttgtctctcctaggcggttgcacgtagttggtaggacatccttctggtctgtgcataggcccaccgcttgagatatacaacccctttctcctgtggtcgctccgtctagacaattagtccccaatcctctgccttccagttcactgggcaaattgttggatcagatcaacaacttctctttccctacggttgactttttcttgctgggctcacatctccctagtggtgcgatccatccattattggaactcccgctgctgctggttgaacgcgtgtttcaccgtagcgcgagtctcctcttgattgtggtgaagggtgtagggtgtagctgcaccataggaaggtcggtcatcaaatgatgacgatcctggcaggatgaaacgagaagaaagatgaagatcttgatcctcgagttcaagatgaaagaaacctactaaaactaattgaagaattggagaaggttattcttgacccaggaaatcccaacaaatgtgtgtgcattgggaagaacctagacgagcagctcaaatagcaattaataagctttttgaaggcgaaccaggatcaattcgcctgg

SEQ ID NO: 379969 - DNA, 4075 bp, Cannabis indica
tttcaacagctggaagcgagttgtgggataacttacactccaaaccctttccaatgtttacacatttagtaagattgtttggatctaaattcaccttttctaattccttgataggtttgagttggttatattcgtcatggattctaggatccgaatcttccatctcctcctcattttcttctatcaaagtcaccatcaattaatgacttgcctttctatttttcaattccacgctatagcattgttgggctaatagttggtcgccttttacagtccctattcccacaaaggttaaccataaatagttttaaccttgcttcttctaaacccatattctttaaagtttatttgtagaggatattataatagaacttgtgttatccacaagaactctctttattcacttattagcgagctaaactgatatcaccagaggacccgtgtggggaaaccgcagatgtaatgcatcttcatcagtaaagatgatgggaggttattcaaacttggctccctttatgggttttggggcaaaagtcgatttctcatttttcacttcatttatatatctttttttagcattattgttgtatcatgcaaggtgtggccctctagagataactaatatgtcctcaccctcaattgggagaggttgtaatccttggttgttctggttattggtaagattttgttagtttccttgaggtcttacatattgcctcaggtatcctcacgtgatgagatttttaatcttgtctttcagttgatggcattcttcagtggtatgcctaatatctttatggaaatgacaatatttgttaggatctcacttatttcttggatttctcattggatcgggtctccaaaatgcaacctagtttttattcacgagatagatattttcacgagattcattcaattttgtatacaatgagcatataaaaatatatttctcgtgcttcttctattttttcttgtcttttgacaaatctcttgactcatcctttcttttagcattcgaaccactagggtttgaatttttggctttggctgtcacacttcttgatgttgcagtacttgtgctgggtttatcttcccagctagatttgagcagcttcatttcattttgcgcttcttcattctgcacgaaaatttgtgctctttcgttgaacttattaatgtttctaacagggtaaccttgcaaatcatcccatagttcacctcttgcggttgacaagtcaattgttatcccagcttgaagagctgtcaattgaatactattatttaaatttctgactttggttgcagctgtactaaaacgacttaagtatgcttttaggaactcttttggtttgctacttgatattagtcagtgaaaatgcctctagtctccagtgccttgtaacctagaatcactttttaaagtcctttgatagttgttcccataaagttatgaaatggttggtgaacttgtcgaaccaactgctcacagctcatgttagagaagttggaaataaagtgcatcacaagttatctaaaacattgcttgctcgcattattgtattgaaattgttcaggtgagccatatgatcagttgtcccatcatattgcgtgacattatccttgaggaaattaggaattcaagatatttggatgaaatggttctgtttcctcatctaagtcgtatcctgacagttttccatacactctatcctggtatcacttgaatttatcttccaattgtattactcatagttggattggatccatgggcggttgttgcctgcctcattctaatttaactgattacgaagatctggagcattacgattcaaatgctcacacggtttaggttgtctacgatttaactactcgtggagatcagggtcgtaatgcctttggtcataattacttacataccttgttctcgaataaattttggattggtagctttgagagttgctaatactcttctagtcatatcgataataaccccgatccaccttcatctcacattttcatgtgagatgaaaatgtgtccttgatctactttacccgtgggtccttgatcttgcaccacttggatctgtactcgatcctgtctcttgtggctcatctctcactttgacccttctcccttttggaaagagtatttgacataagacccctacttaggcaagtgtgtgtactgtctttgtcattgcgattaggcctttgtggatgtcttggaggttaacttgtcccaggccagtttcttgagctcctcacatcatgctgtggaattccttggtttcccaattgtgtttgcctagcatctttattcatgcgaggggactctggtacttcaagctatacatttccttggtttttaaatccacgggaagtttctaggtcgtcaagtgagtctcctgattttttgtgtttctaggattttgaggattctcttcatccattgggatatctctcacgttctcatgttgttcttcctggatgtttgagggattcccttggttgttcccttgtctcctggttctagagctttgggtctccctcgtggtcgtctagcagatacatcaggttaattttgaggggcctctcctcatgcagcccttgctattgccgcctcatgctttaattctgcgttccttcgatttgactctaccagacattaccgtggttgtctatttcccaattccactaatggaacatatctggttggatcataggcatcttggcttcatctttcaaggatatgttccccagttgggtcaaaatgtccaccatttcttctagaataaggagtttcagccgtattagttggctgtgaagtttgtggttccttcccaggaagatgaattgtctcttctggatgattctttttgttacgtggagtatcgtctgcgatgagtgaacggtccaaggttatttttaaggagggtaatttttgtgagttttattacaaaagttctcaatgaaagtaccaaactgttaacacatatttttgttaactaaataattagccatttttgtaataaataaactgcaaaattaattatatagtaattaataatatggatagcaataaataataagaaggtttttacgtggttttgaaattaaaccttcatagtctacgagtccatcttattcaggatttataagtttgtatacaaaatacaatgaaactattttttcaagaataagtaataacaatattatctatttataaatgtctaagatgacatttattctctagggatatcattcgtaattgttcatgaaacgtggacatatcccacatttcatacttgtgcatatggaataattataaataattgtctaaccgctctttgtctttatccagaagcagttatgctgactacgctcaattgttcttgccctttgagtgatgtctttcttaaacatctttgtagaaaaattgttaagtgttgagtcatgatgcatctcgcagtcttctttatttgttaagtgaggtataagtgagatggttattccaacatgtcaagagcgaggtgaataaatgttgaaattttacttaaacatacgagtatgtggatcaatgagttgtaaattcatactcacgagtatgtagatcaatgagatgcaaactcatactcacgagtatgtgggtcaatgagctacaaacttatgtctatccattccaaatagttttcttgtatattctgtttatctcgagatggatctgtttgtctcgctagtcgcatcggtcaatagttattactcacgtcttactattgcctatatggcaacgtagtttgagtatttctattaaatatatttttcgagacgtagttatttatgtgcatttaataatgcatcaatttgggacttgttcatattccaactttaaaacgcgtgtcatctttctattactgctcgaaatataggtgtaacaataccgattatggtttttatggtccatattagagttataaaagtgtaaagcggaaatttgataaaaaaatgtttttaatccaatatgaaccataagcccaaggatttcaacataatatatatagattaaactactgaaaag

SEQ ID NO: 379970 - DNA, 1328 bp, Cannabis indica
aagaaaaagaaaaagaaaaaaacggctctctccataataattaatgagtaatcatcttgtgtaatgtaccactaaaactgtttttcttttttttttcaccgttggtctaattttaaataaatataattaagtactcatctaattactacttttctcaattaatatgatgagttagttaagtgtataattggagccagcacaaggaatagtctcttgatctggaccctattggaaaataatagtaacaataataacaactgatatcgatagtataatatcaaatctcagccgtctattcttgtgattgatatgtgtataagtgtacgtatatacgttatatatatagtgtcaggtgtcacattaatctcgcttaatttttctctccaccaccacccactataccattccatattattattcctcccttgaaaacttttatactattttgctttatatctgtataaacgacatcgtatcgttagagcttatattaagggagactgtgagtgtgagtgtgagtctgagtctgagactctgagtctctcatatatcatattatcacatgggtctaatccataataattagtatttgggttaaagaagaataatataataaagtagctttggcctatgagatgatgagctagctgatcagccaaagctcaaataaaagagaaagctgataaaagaaaatagtcggtgggtcactccacatgtcatttccattcccatcttactccagtatccagtgctatactacactctttaattttctttttctaaatctgaattatgataatttttttcgtataaatttagtttttggggaaaaataattggcttagcttttataaaataaggtttggctggttctgagtccatatgtatgtactgcagtcaaactcgaataactccaaacgttacgtaaccaatgtgtacgtccaaatgcactgtcttctaggacacatttacatctcttgtacgtacgtacacttctataaataattattaataatatttactatatatgtatagtagtgtatagtatacacacgtacgtacgtacatcaataccttgaaacttcttggttcatgttcttcacctttggttcggtttattaatttatcaaataataaagaaaagagagaaaaataaacatttatttaaaacaaggcataaccctaagtatattaatttttgacacttctaaatggttatatttcttttttattaaataataaataatattattattaaataaaacattatattatattaattattaagataatttttttaattacaatgtaagttatattatttaata

SEQ ID NO: 379971 - DNA, 4642 bp, Cannabis indica
aaaacactaagcaatttttttcaaaactcaacaacccattatcaaatcttttcgttcccagcattttctacggcaaccaaacaaaacccaattgagaagacttcgactacctgagttgcatggaactgcaatttgaacacagatttgatcttgttcttctcgctcctccatctcgccgacttaaacatcttacgactacacccctgctaccacaactcctacgacctctcttaataattgagcttcaacgccactccatgaatcgatggagctccgtcaaaacccgcctcaacattgcgatctttacattcaccgacggacccaatgccaacccaaaaatctgtttttttttttttttttttttttggttagttttatggtttgaactgagctggttaagaaaaacagagcagaaaacagataaacgagttgactcagtgaatcaaagggagatagagggagttgaggatgacccagttttccatagaagcttggaatggtgaaacctcgggaaccagtttacagactcagaagaagacaatagtaacgagcagatctgatgagaggaaggctctctcttctctttctctctctttctctttctcttttcacttctataatacttctttagaaagcggtgacaaatgtaatttaaaaaaaatacaataataaaaatgaaaatgagaaaataataataaattgtgggagaagcttctatatgtgacaaataatttaaatgaaaatatatattatttaaaattaattaggtggaattaaatggtgttatatatatatatatatgatgtaatggtgtttgtttgtttgtatgtatatgtgaatattatataattttaaatatttatatatacttgacatgcatacccttatacttatatacttgcttataataaggtaatgttttgttgaggaaatatctttattaaatgtcttttattttttattaaaagagtttgattaagaaatctcaacttgggcatatcccacgtgtgaaccagcttgtattaggaaattaggattagtttactacaaatgtttaaaataagtgtatttttggaatggaagaaagtaaaaacaattttaattagttactaatttgggtttgaaagtcaagttttgatttttgatttattttttatcaatttgccattcattaatattgtattggatccatttgtgatttcccattttatggtttagttttaaaacatgcaattcccaacacttctcaaagagttgaattgttcactaaatactaataaatgggatttttctcatatatatgcatgaaaaattgtttgtataaattcttacttttaagcaattataaagtttaatgagatgcaaatgcttgtttaggtaggccaccaaatggttcatataaatatataataaacatcctatgcctttttatatgaatgtatattgcaccttttaaatatatggagagagaaccttggattcacaatattctaagtattttgttgtgtcattactaattaaatatatagtattttaattctaatcaaaattacaaaaatatagtgtattggacttggtattattggattcttttacaagatttgttcatgtctatatcatgctaattaatggacccttttgagaaaatgagtcccacaaagaatgtgtttttatgtattattgttccacccaaaataatacacattttacttggtcccatcaagatttaatttcttccaaaattgaacagctagagatagcagcaggactttcataaccttctcctttttaataaatctatagattattgaagataatgaataattctttttcaataaataaaaaaaaataacttttcaaaatgaatttacaaaaacacccttttaattcaacatcctaaaattttaagacattagtgttagttttatacatctgagtttgttggcattgaacacaaggagtataaacaacattgtcaagattgtgactccattgttaaattctctgcatgcattaaatatttttagaaaaatattaaaattcactattaatttattattcaaatatggcatacatatattcctaccatatatactaaatattgcagggttcgattgattgtgaacataaattcatatagcccatatcatgcagtaattaattagctgtgtcacttattttgatcaagcattttttttattatgtgcaataaatgggtttgatgattttaatttataaaataatacaagggtattctagtaattttccatggctttgtttttatgtctattcttatatcgtatgccctaaggatacatttctttgaataaatgtaatctcgagataatgacattataactaagtattatgctctttttagtcaataattttatattaatatatattaattacgaatattacgaatattagatgttttgaatacttacctacctccatggtcgaagctacatgtaaattaatagagcggtcaccccacttgaaatttggatcggtagtaaatcataactatttcaagcgtaggtgtaaataatttttttctcggtctttatacaaatacttttttgatcaaaataataataaataaagttacttagtattgttggaggaatttcgacaacaataaataaaatattaagataaaattattaaaaaaaaaaaaaaaaaaaaaaaaaaaagtatgcgattactccacctagaatggcaagtattcaaagaatggacactcagacgtactgaaaaatataaataacacaatggaaatatagtggttcagtcagatcacagtctgcttagtctactgttgcaaggatttctgtcttctttatttcatattggatcactcctttatatacaaagcgagtgtcctttgattatacaaaacttgattaattttcaatccatttttacattgaatatcaacatttaaatcaatagaaacgtaaacataataaatgaagaacagttttgactcaattcactaactacagcaatgtatgagaccttggtggtgcgagttgtctgttcatattctcacataagctcgtgggcttaagatgcgtacaagactaatcgagtcttacgtgtttaagatctgcgttctatttgagtcacttatacggatatcctacaaaaattcaataacttaggacatgcgagtccttatcgggttatcgagtgcgttaggtcatccggaccagctcgctgagtaaagaatcgatctttacttactcacaagaaaagctttatggacatcgcatatatcttggtatatgcaagttttaaaaccaggtcttcggtcccgcatcgtgcgaggcgtaataatgcgactagactctgtcagggtcacatcatctcgttgagtttggttcaggctaggtttatactcaaatggtctcattctgacaactcagctctcctcgaggagagtgagtccacgtgtcatatttatgggagcctggtcttgatttttctaggtaaacaattcacactataacacatgcccctagtttcgcgactgacagctatgtcatgagggaaactataagcgagaggcaggcgagagattatcacgagatggtgacttttggttatcttatcgagggttttgaaaagacggctgtaattattacttttaattcatttaaggtgccacatcaccaaaactctttggagtctacacaggcgtggttattggaaatcgttggatggaaagaccttaggcattcctttgccacgtgtcttcatcccaataaatgagggatattagaatttaaactttctgatacgaaatgatcctttattcatttccctctcattttcattttccccttctttctcccttctaaattttgaattctcaaaaaatctcttttcatttttctgagttttctccatcagagaaggattttgaagttcttgatatccacagaatctctcgaagagatactgcacttcaaggttagtggattaaaacttctgtaaatgtttttctatctttgagaatttgtacgtattctatgcttttatgggtagaaaatgtatgagataataagatttgttatttgtctttcgacaaaataccctgttttctgggaaatatgtacttgaaacttgagttatcacgggtttcaggaagaacacttcgagtgctctcatatttcctgatgagtacttcaagtactcttgagtttttgataagtatttcgaatgtttgcgtattttcttgaacattcgaatactcagaaataacttaatcaaaccaatatcaagtttttcgaccctctattttgctagaatttaataattaattcttagggtttttttagctttcaggctgtatatacttttgttataaaaactatctgagtcttcaaaatagtgggtgtgtcacagcaatttaatgctcatgcaaccttcgcatgttccttgggtcactgtgaaacacccagccatttgagacatggttagtttttatttttcttgctttgtagtcgcttattgggactaactaggttcttcgaaatggtgggtgtgtcccattacctcaatgttcatgcaaggaacgcatgccccttgggatactgggatacccccagccatttcttgaggtacacagttagtt

SEQ ID NO: 379972 - DNA, 2763 bp, Cannabis indica
aaaaaaaaaaaacaatattagtacaagaaaatgatcgatataaatatatatacatatacacaaaaataatacgaaaaacaattatatatagtgacaacttcactcataatatcatgtcacttgttgtacaaaatagtaacattttgtcattaattatatttttaatgacaaacatttttagtgataatatatttttaacgttatttttttaatcaacaaaaatgaaaattgataatttaaacatattataattctattatcatatatttttctttatactgaaatagattgttaagtgtttacgtaatctctcacgcgagagctcttaaaaataagattattaatttaaatagtgagaaaaaatatttttaatatgactatgttagaagtagagtttttagtgatggattgtgttacttacgtttcgaaaatgttttttctagccttgaataaaatatttcgaacagcaacttgatcgtccttcaatatttttatcttcaaaacttcttcggccaattcaaccattctagggaaaacgattgcaaaccaacgcggacagccgtgatcttccacttctttcaagagcttcttcgcatttgatgaatccataaactccaaccctaaaaaaatcgacatataataaagtattaattaaaagaattaacataaataatacaaacatatatatatatgtacctttacttatcacgtcagaacaaatgttccacttctttagggcaacaatacaagcaagagtggcagtaagacaatctagggttggcttttcactgccactattgcagttgccccagaacccatgttcggtttggttattaagaacccaattcagacaactaccgaacatgggctcagaaggtcggttaggatgtggtatcatggctacccatgcaatctcgtagggacaaggagaaacaagagagtaaggatccttgtctaacaatgacaaaaaattttccttgatctctttgatcaattcatccatttttataaacttcttgaacacttagtacttcacttgatgaaagaatccttagctatttataaccttagctatagttcctctagtactgtttttttcttttattttttcaagtctttaattgaataatttattaatagttgacttgaattgtgtgcggccataatttccacgtttttttttagaaaaaaaaacaaattgtatagtgtttacatataattaatactcaaataagaaattaatttatatatttttgtctaaataattattgaagacaactatcttatcatgtacggttggaatatatgtgtagggttacgtacgtcatcttacctaattaagaaattataatttacaatatccatgaaattgtgaactgatatatcaaataaaatagaggacgatctgttataactttttattacaacttgaaaaaaaaaaatcttttaaaaaaaaattatgacgttgtttgttatagttacaaaattatgtatgtaatttttttaaaaatttaattagtttatagtgccgaaaatagatttaaaatttttgaatactacacgtcgtaaactgaaatattaagaactctagtcataataaaaattatgactaaaagtaaaaaaatattgtgactaattataaattatctaaaaagtctgtggctaaatgtattagtcataaaaattacaatttattgtgattaaatgcgttttttatcacaatactttttgtgactaaaactaaattactaacaacttgtatctaaatattatgttttagtcacaagtaattttttgttgtcactaaaagtcacatttagtcacaaaaaatttatcttttgactaaaaaattgtcactaaaagtagtagttttttgtagtgaatattagtcacaaaaattataatttgttgtgattaaatatatttttagtcacaatatttgttgtaaccattaatattaaactagtaataatttgtattaaaatattatattttagtcacgaataatttttgacaattaattttattaattaattagttaattagtgtgaggcgccgatatattaataatggtctttggattatccaatgaaattaaattaattaatcaagatgagcacgactcatctaattgattttctttggatgttaacttaattattatcctcaaaaaaatttattggtcatatcaataaataaggtaggtcatataatggacaaaatatcctattttctgtggggaatttttattttataatatagttttatttctttaaaacatattcttaattaattatagctagttttaatatttgtcacacgtgcgatgtttgttggttagtgtcgggcgccgagatattgctcttaatatcaacatgagtccttatataattggcatattttactattataaaaatagcttaatatagtgatataattgctcttaatatctcatgcgcacacgaaaaatgttaaaaaggtaacagtagtgcttagcgcccttccatataatttaatataatagctagcttttaggaagtattgctagtcaatcacaatacgacatatcgagaaggtgttaatgcttatattttacgattggctaataatattttctaaaaatttacatgcgattcgatacttggtatcacacaaaaaaatgtattagataccaatagatatcttgtagcaatatataattttatgaatgttaaacacataatttatttaaataaataatataaaaaaactgttaattaatta

SEQ ID NO: 379973 - DNA, 1863 bp, Cannabis indica
gaataacaaataaattgtgacaaaaactataaagtttaaattactagctacagcagtaaaaacttttttacagaacaataacaaagtaaccaaaactatgaataccttctcaccctgttcagctccataaccactataaccttctcgggtggacaaggcatgcgatcgctgtcaaagtaaaacaaatatggaaatgtggtgagaaatagattgatggcatatcaacttttgcttacactgtgagttagtctgtcaaactccatttcaagttgtagtggcattaaaattacaaccaaagagaaaaaaaaagtaacttatgaataaagacaaactagtcgatatgtcaagaatcaacaatagacaatgaaacaaaaattaggaagcccagactataaggccacctctgttctggaagtagcaaaacctatactatataagaataagagtatatagtaccgctgacattgcagatgttataacttcgggaatgggctctgtagtatcaccgattccaaggcttatcacctttgcatcagggtacttcagcaagtgtgcgttccttcttctagcaatctattaaaacaaatgaaagattcataattatgatccacctactatataattgacaagcaaagaaaataaacaggtaaacaatctagacaagagagagagagagagagagagagagagagatccaactaaaaagagaaagcatgaattgcaatagatgtagtttacatgcataagcatactgacaaatttaataaaaaaattgaaaatcaaaagttttactcctctttataatccttttattagaaaatacgataccatctcaatctctacaaataagttggaaaatttgtgtaagtgaagaaactaagaacatcaactatagatattatttacatataacagataacagttgtcatttcttggtgaaaacactgaagtgaagtgattctctcccaatataatccacaacaacaacaagcatttcttatgtttacagctaaactaacctgcaggaatcgcaattgtgataaataccaatttttaaggtgttctaaagaagaaacagaaaattagtatcaaaaaggaaagcatagcatacctccggaaaaagataaccagcttggagcttgcctatgttcgcattgcgagaaaccttggtcttgaaaactttatcacaacgaggaaaacatgatcaacaccataaaacataaaacaagtaaagaatttcaaaattgcgattgggaacaaaaaccaaaagctataccagtctcctgttcttggggcgtagcaacacatttacagaccccaatggatttcgccggaaactgaacattctgaaatctgcagcagacagatttcaaaacgcaacaaatgagagaaaatgaaacacttaagaataaggaaaactcagtgttttggttttcaagtaagtttaataatttcaagctagaagtaaagaaagaaaggaaaaaaattcatcggaagcttgtggtgaccatcatcatcgtcaataatcaatgaaagttttgtttttgaggatttaagaaagaagctgtacctggggacgaagctggtgggaacgaagaatgcagatgaagaggatgagatggagatggaggaagcaaggctctgagtaatagacattttcgaactctgctctaaatgggtgtgcgccgaggggatttacagaaggagaggcggcgcttcttgctttaaactatgctcagcgtttgataaaagattaaagaaagatgaagactcaagacattggggtgtttttgttaagaaaaaaaaaaaacatataagggtgtttttgtttaaactttttttttttttttttagttactaatt

SEQ ID NO: 379974 - DNA, 1517 bp, Cannabis indica
tctctctctctctctcaagttcttggagtaattttagctcaataaccgtttgtaatagtggtgttgaaacaccatcatcattataattccaaaacttgtaattacacatcaaaagcaataaagatccaaagccaacaatggatgtttcccccctaagagtagacagtggacaccatgttcattgatcgtaccaaaagctaagtgttcattttattgtcaattttaagttttaatctttacaaaattgttcatttttataattggtgagtatgttgttctatatttgttgtgtgtatatttgaatcataacactaaccttcaattttaatccaaaaataatgttcttcaatcatttgattgttgaaaacctattaatattgtatataagtgtaggattaagtgagcataaagttataaataattttttaattttagggttttgtgggttttggggcacaacgacaacaatattaaattgtggcttcagttaaaaaataaacatcatctttttaaataaaatacctgtgtctttggtttttcaacacctacatgtcttcaccttcatgtttcgattttgagtttttttataaccaaaaactaactcgtctaaaaactgaagataaaggcccttcttctggttgtgactcctaggtggctcgttctctaaaagttgaggactcacgctatgtggactaccattcggtggaggctaaggctcacttttgtagggcctgcaaccaattcaagctttgagatattatccattttttgagatagattttgcgacttacaatttggccaatggggctaggactcatggctgacaagggcaattggcaggcttggagcagaatttatcaatcactaattagtaattctatttattttgtgttgctctgaatttgtttttcagtattttgtttttgttattttttgttgtttcttatgcattcaaaggttgttttattcttgtagttcattgttttttttaatatattgtgcatttgacacctcccttttatccagcctcccccccccccccccccaaaaaaaaaaaccggaagaaggtcatgcagatagtgacaagaattttcaaataaattattcttgtatttgtcttgcctatattaactcaccatacaaaaagagtagaaatacaaatttgatcataaaaaatataatttattaaagatacatctcatcaaaagaaatattttacattattatccatcaaaatatgctttcaaatttattagtttcaaaagaataataaaattaccaacctttgattttcgtatcaattggcatataaacttgttgtaagcagtacgtatgtcctgaaaagtagggttgagcatcggtcggtttgatcgattttttttctatataaaaatccaaaattcggtttttggtttggattggtgcaatctaaaaactgaccgaccaatccagaacatatcttaaaaccgattgttttgaacatcgaaccgcccaaaccgaactttttttttaaaaaa

SEQ ID NO: 379975 - DNA, 1024 bp, Cannabis indica
actttgttaccctctttctccaaagaggaattgtagtattggagtaaaacctgccagaaaaaccacacacaattagcatgcgagagtttatacaatatacatccacccaaagggagacccgtaccttggaatcttcaggagatggaattatgataccaggcatattcattggaactggattaagttgaaaaccaattacaaaaggatccatatagaacacaacacccaatgcacttaagtttttggctgtttcaagagcttgtttgattgtggaaattccaagcacaaatcgaattgaatagctacaaattaaaagatttccttggacaagatcaccgttgaagttacttgagtcttggcattcacccacatacatatcatcagttactgttgtgtcgttgtttaacgcatgaacagccgaaactagtgtgtacattgtatcattctcagttccagctgaataaaaacagataaacattagataatttgcaagtctaactgatgaaataattagctacacacaagttgcaataacatgtatcattaggacaggactactcatacaaatggtcattcaagagtatcacagtgtcatacagtaaaaggagcactattatttcttgaaaataagaaaatgaaagttgatttaataacatgaatcatccatcatgggccaaggttaattatattttaactttctaaaagagattttagtaaacatgcttaatcatttcattaacaccataattgtggattttttttttcgggtgaactaattgtggattattaaccattgtcaaagtagtgaaactgtcagaatcccacatcgactaactactaaggtggcgattggttggaggtaatgaaatagaatggaaaggaaaggaaacaatctccgttccatattggttgcatattaaagtgttggaatgtcattccaatggaatagcctttctatcattcagtgacaattctattttgaaatggaaggaaagaccattccaatgcatgatgagaaaagttt

SEQ ID NO: 379976 - DNA, 1921 bp, Cannabis indica
acccagaacagtgtccctaataaggtgcatggagttctccttgaaaattaagaaaattgtcaaggttgataaggttagaaagaaggggatattgctaaactcgttcctaagattcaggtctcgcatcaatattcgacttcctttgatcactggtgtgtcgcttgaaggtaatggcaagaaaaaatattgtggcctatttcaaatacaaactactctctatgttctgtttcaagtgttcctctcttcggccaatggctttgggatgggtctcgacttaaaaatggttttgctctgttagagaagaatgattttggctcaggaacagactgatagagtggtggcctggtgggggtgaacatcttagatcatctccggctaccaatacacaggggaggaccaatgatacttctggtggtaaggttacttctgctaattaaggatattattagtggggtatggagggtgtgacacgacaaaggtatatatgatactacgttctcagtgccatataatgattatgtggagttgcctttttcagcccaggttcatgtcgcacaaattttccgagaaaatcttggactagttcgttttggagcgacctgggagcatgaggatgaacctgtgagacatactaaaacctcctactagctaaaaaaggataagatggtaggatctaatggtattgctaagagatcaattttttcaaattattatctgatgttattttgttattgatatatttaaattaatttttaaataaaaaataaaattttaataaaaaataaaattttaatgaattgactaattagggattgccatggatacttaacgaccatgtacttactaaaatatttatatgcaatcatgtgttaaacttaggtatttatgcgaaaattatttttattatttttttgggaacatttgtggcgaaactcgctcagtatttataattgttacacatataaccctaataaaaaattgtcggcaaaaataccttaacttatgattctgttacaatcgtacccttttttggccatcaagtgtcaacttagaaatacgtgacgacatattattagactacgtattaaataagctaaataaatatatcgtcacatgtttctaaattgacacttaacatatttaattgacacttcacagctaaaaaaatagggcttttttcagttttaaccaaaaaaagtaacaatattacaaaagtacttccagctggccaaataaacaaatatacagcccaaataaaaaaaaattacacaaataccacttacacacactttcaacccaggattcatgcatcctgggcaactatcgcgcaaccacgcagcaacccaacgcaaccgaaacgaaaattcaactagaaagagaaccaccattaattctggcgacttcacttgagaagacgatcagaatcaatcaaaacagtggttgtttcaaattcataaaaaaaaaaaaagtgtagaaaaacgacttcaaaactaaaattcaaccaaaaattcaatttaatttgcataaacctaatgtactgactttaattttcagatccatgaaatatagatctcaaaaagttgaactggagttcccaaacaatccaactcaagtataatccaaaaaaattacatcaatattataataaaatgtttatatcataatgtatttttgttgttttctaaatttctaatggtgaatttgttcatattaaattataaagagacatgcagatagagttatgtacatgaaaatattattttgtctgattgaaacctgtctgatgcaaacttcggttaaacttttgtctgatgcaactttcaaccaaccaccctacaactatcatttgattgaaaccttcgtctgatgcaactactgtgcaactacgcaacaactatcatctgattgtgtaagtgatagt

SEQ ID NO: 379977 - DNA, 1784 bp, Cannabis indica
tttatgggcatctggagggattatctgcggattagagtgacagtgaatatagaacaacctttgaagaggcgaatcaaactcaagaagactaatggggattggttgtggtgtcagtttaagtacgaatttgttcctactttctgtttcatatgtggcattattggccattttgagagattctgtaacagattgtttgagtctgatagtgaacaaattggaaagccttatggcttatggatgaaggctgaaccgagaagaagaaaacagaagattggtgctcagtggttgcgtaccgaaacagaggctgacaaacagttctcaggcgaatcaagtgcctccggcaagattgatgaagaatttaatgctagaaatcaatttgctcgagattatgggaatcagacaagcgagaattatggtcccgataatggtcatccacacttaattaatgttggagagattcatggagttaatggtgccaaacatgatggtattcaatctggtcaaacaataccagttggaatggatgagcatataccagttcacactttaattgtgactaatacgaagagaaggaggacagatacagaggtattggaggatttaaatgatgtggaaaatgataagagccttgatccaaatgggcttttaaaaaatgggccgttggtgggtcctggggtccaggcccacctaggattatgagtatccttagttggaattgccgtgggcttgggaacccacgggccttacaattccttaaggatcttgttatccaaaagcggcccaattttgtatttttatgtgagacactttgtaaaaatgattctgtggaaagacttagagtctctttgggctttgaaggtcatatagcagttgatgttgttggaagaagtggaggtatagccctcctctggaagaacaaagatgatgtctaggtcttgggttattctataagctatattgatgtaagtattcacatgggggataatcctatttggtgtctaacttgatgttatggtgaacctaatcgcaataatcgttccaaaacttggaatatgatgaggaatttagctaagaaatatgatttcccttggtgcatgattggtgacttaaataatgtaacaagtcaagatgataaaaaaggtggcaatgcttatccagaatggcttgttgaaggctttaatcgtgctttggctgactgctatttacatgatcttgatctcaatggataccactacacatgggagaaaggaaggggaagtaacaactggatcgaagcccggttggatagagtcttagttaataaaaaatggcttgatatttttaacacggctaagcttttgaatcttgagtggtcgagttcagatcattgtcctattttcctagttccttgcaatattgaatctgttgctgctaagagaagctttagatttgaaaatgcttggttgagggaaccaatgtgcactcaaataataaaggacagttgggacttgaataatggctgccatattatggataaaatctctcactgtagttcaattttggccgactggggtaagagctacactggaaacttcaaggacagaatcaaaagacttaaagaagatgtcagaagatggagaaagggtagagatgctggttcggttgagaagtttagagaggctgaaaagcagctttttgaagtctatacacaacgggaagtgttctggaaacagagatcaaagcagttatggcttcgagaaggagatcacaacagtaagtattttcatgcatatgcctctgctcgt

SEQ ID NO: 379978 - DNA, 4206 bp, Cannabis indica
tttttttttttggtatttaatttggtaccttgttatattgctgagtgattgattgtacgcaggaaatttctttgtgccatttcttttcaattcaacttcataagctttggaaagtgtacgttgagttgatcagatgggttatatcaacaatgtattctcctagacacccttcaaagcattgagttattaaaaattagttcggccggagttaatattgtttcttattatcgtccttgttttgtattgcagggttttgaagataataatcagcaaactgatattggtatgagctcattaatcgtttattgtttaaattcaatattttgcaaaagataccaaaaaaagacaatcgtttatcttcatttgattgattcttttggaagtttagtacacacaaacaagataaggagacaaaagctcgaaagtataatttgggttgaataccaacaatgtagattgaataaggggcttgaaataaaggggcaaggaccttaaatggagtaatgtttgaatttttctagatggtagccaagttaaagaagtctcggttttaaaggatgatgtagggtattattataatacttttacatgagtaatgtttttgggttccttgtatgcaggtgccttggttcgcagtggaagagaggtactttttcaggtaattttgactatctcaatctatgttaattgcttcacagagcatgtaaatattgccaagttatgtgtagggctgatgttaataagtgatgaataatctaaattataattggagtgtagtgcagtgtatagaatggatttagtaatatgttcatctccactctttattagttatttttgatacactagcaagctttgaaattatgaagcttatgatttgagtcatttgaccattgatgacccatacaggcattcaattgggagtctcataagcatgattggtggaaaaatttagaaagaaaagttcctgatattgcaaaatctggatttacgtcagcatggttaccaccagcaactcattcgttctcccctgaaggtatatagcaaccaacacatgtgacctttatactgtgctctcagcagatatttgacttggctttaatgtatgtttaaaataggctatcttccacagaacatttactctgtcaattcatcatatggttctgagcatctactaaaagctctgcttcaaaaaatgaaacagcataaagttagggctatggctgacatagttatcaatcatcgtgttggtactacccagggacatggtggaatgtataaccgttatgatggaattccagtgtcatgggatgagcgtgcagttacatcttgtactggtggattggtaatactaataaggtttcatgcagtaaaattacttcactgtgcatgatttacataattgatttttcttaaaactttcatattttttcacattaaagggtaatcggagtactggggacaacttccatggtgttccaaacattgatcacagccaggattttgttcgaaaggatgttacagcatggcttcggtggctgcggcataatgttggctttcaggattttcgttttgactttgcaagagggtaagattatgtaaggatacgaggtattatattggtttaatcatgcttgtctgcttctgaaattttcttatttgtaacaattagttattctgcaaagtatgtcaaagagtacatagagggagcaaagccactattttctgttggggaatattgggattcttgcaactacaatggtcattccttggactacaaccaaggtaaaatacatattttcaaaattgatggcattaagcatgtagtcatagtttaatatcttttgcgttaatataatgttttggcttccatcacctgtagatagccatcggcagcgtattgtgaattggattgatggaacaggacagctttcaactgcatttgacttcacaactaagggaattcttcaggtaaattccaaatgaacatgatctgagaatttttactgttatatcaattaccgataaagaaaatctttcaatttcatacaaaatgttaagagaaactctggtggtacatctatagaaaagatcaacatggcttggtgtttatagatatgttttaaatggctatatgagagatgtatcttcatttctctgttatgatgcctcctctcaacatgttactatcagactttttgaagacaatgatctccttgtcttgctcgaggagcataccaatgatataagttcatttatgaaaagaatgacagctttgatcaatcacttctttgagtttgttttttcattttttaaggatgtatattttcatgttctattcaggaagctgtgaaaggacaattctggcgtctacgtgatcggcagggaaagccaccaggtctgatgggatggtggccatcaagggctgttacatttttagataaccatgatacaggctcaacgcaggtattaaacctcaactgagattaatttttaaacaataaaaatataacgcttttggatcagtcccttccacatgattgggtagtttctttttcccaactgagtatgaaaaacttgcaaaggcacaaaaattgtgtgttgggctcataactgagtgtattaaacaagtcaagggttcgtgtttaaggggagcacttttattggctccactaaattcagctatggcatatataactctattacagaaataatcattgcaggcttatttgcctgatattaatcgcggtggtcatgttcatttcttttatgtttagtttgatggatcattattactgaaattagaattagaaatagaaggaagtgctcactttttgtcacttcttatcttgcaggctcattggcccttccctagtaatcatataatggaggtatgtatacataatacatgttgcttgtaacttgttatgcacatgatttgcgattcctagaattcatattatttaatcctttttgtcaacatattaatgtgaacttcatagtttcttaacataattgtaatttatctaaaatgacgacgctcttcctctctatatgatggtgttggtttactgtattttcttgctctatatgagttaggaatacaacttaaaccagaacaataatttatggtgtttgtttcgtttactgtattttcttgctctatatgagttaggaatccagactgagtaaatagtaaaataacagcaaaaatcagttgaactcaatgattgagtctttgtatcgcactgaacttaagttttctatgctatactgctcaacttgttacacaatatgtgagctttaataaagacatgaacaatatctttcttaagtctatatttataatgctttccacagggttacgcatacatactcacgcacccaggaataccaaccgttttctatgaccatttttacgattggggaagctctattcatgatcaaattgtgaagctggtaggacactagtttttgttttgatagtgtaccaagtaaattattcatgctttggtgaaactttatgttttatttctactccacagattgaaattcgaaagcgtcaggacattcacagccgatcatccattagaatcctggaagctcagcctaacctctattctgcagtaattggtgagaatgtttgtatgaagattggggagggctcttggtgccctgctggaagggagtggacactagcaacttctggcaataaatatgcagtgtggcaaaagtgaacttagctatagcataattaaaatggagctttaggattatccaataagcatagctatactatattagagaagagttgatcgagggttgtataacctaagctggagctttctgttttgctgttgtattattatgtgggattattggtttattcaaattaaggtgaaacctagctgatcgtagaatatgacagaaacatcaaaaagacacacacatatatatatatatatatatatatatatattatataacacaagaagacaaagtaattgctagtaaatcatagaaacaacaaagaaatcaatcatagaattctacatattataaagataggtaaagttaggtcgtataggaaactatgatttccggacatattcactcaagttcccaagataagatcgctatcgtgggaaagacacgacaataagacatggcatgagatccactttattatacacagatgtatttatataa

SEQ ID NO: 379979 - DNA, 5764 bp, Cannabis indica
tttttttttttttttatagaattacaaaagaagttgtaaaagtcaaaatgattttttttttagtaaaggtgtatagaaggtaaataagatggtgataatttaatgttcacattttagtaagatgtaaataaagaattttagtgttgtcaaagaaataatatgtccatatcaaatatcaaataagagtaatttgcgatatatttactcttagttgcagataaatatttaagtttaatttttaacatcaataatacttaagttatatttttgaaacttccatagatacctgatcgttaagtgtcaaattaatggccacataatacttgctgattggtacaaattattaaacttttagttttaatttaaaaattaatttaaatatattaataaaaaaataaaacgtagataatgatttgtcacttaatgtacaagtatctacggaaattctaaaaatataattcaaatattattactataaaaaattaaatttaagcatttacaccacaaattattctaacaaataaatattattgttcacatatcattattctttgaaatagaagtaattatcataagtaaataaaagctacaagtgagattattgaatcttgaaaggtatccaaaatgaaatttttaattaaaagaagaaaaaaaaattatttgccctcattttttctcttgccattttttttggcttcaaatgaaaagtgaaacataaaaagaccattcaaactcaaggccaaactcattacataatgcataagctatctataatcaaactcaaggccaacacattttctcatcaaattttctcatcaaccaaacagaactttccaagtctaacccttttcattcatgtcactcgaaagcgaatgcccgacacaaaaaatttacaagaagtgaactttgactctaaccgaaatctcatctctggtgagctatgatgccttgaagcagcagcagcagcagcgatagcaatagcaactcaaaccgattctaatctttaactttaaagaaagatagtaagctgcaaagggcgattagaagaccgattcgagttagttagaaacaagccaatgatgatatatgttgttggaaccatggaagaatgaatgagcattctaatagagagattctgtagttgaaaattccacttttttgttcttcgcggcttttaactgttcggcgaaagaaacttctttttgcaaaacttcactctttaagagttttaaatccaatttctcccatgctggaatgttcaaagtagctcctccgtctcttcgattagagacttgaccgttaagtggaatcttctggcgaatctgtatagaagcattgaagttctcaatcatgtgaagaaacaagggaagaactaaatgatatgctatgatggttatgttctttcttcactttcaaataagaagacaatcaaagtccaaatattagctcagttttttattgttactataattttttaaagtagactaattaagatttttgttcacaaactattaccactcctaaatcctgccatttgaatttttcccgaactattaacattatataaaacttttgttaagttttattaggagtgttcataaaaactgaaaaagcaaaattaactatcaaaccgaccagaccgtactcgaacttttggttccaagctatcaaccaaattgatagtcggtttcggttacggttttttttgacatgggattggttttggtttttgaaaaaaataattaaaccaaaaaactgtcaaaactaccataaaccgctaaactgaaaaattgctaaaaactggacggtcagttttatacggttaggtcagttataaaattagtaaaaccgaccataaccgaccgaattttactcccaaattttatcctatatggactcttatatatcagcactatgaataattcaggagaaatttttaatagaaaaaaattcaggtagcatgatttgatagtggtaatagttcgagggtaaaatcttaaatagaggctgaagcaatctctctctctttctattttatcctaatattacaagtcatattagaagatagtgaaacattctctcatacaaagaaactattgaacaaagccaattaattgaataatctgttgcttgagttatgtaatgataattttcatttatagatgacaatagaaaattatgaccatgaatgaaaattacctggcttaatttctgttgaagtttcaacttttttgttgaatctcttttggcttggtttagttttctttttactttttcttgttctttcttctctttaatcctctcttcgcgcaattctctcatccgagcaagcttttccatccttttcgccatcacttgtgatgctttctccatctttgccaactccttcgccttaatcttttcttcggccaaacgaaattgtttatcaactatttcttgttttattttgttgtagctttcccaatctaactcttcttctccatgtcctccggttttagctgcctcggctatgcttttcgcccaagaatgaaaaaaattgtctcttgatcgtttccatttcaaacgctttgaccaaactcgtctaagcgaagatcctatcttagccttgacctgatcactgccaaaaaaaaccgaaaggtaaagtaaagcatatttctactcttaaaagggtgattcattgaaagaaactactacaatgttggtttactcagtaagctagcataattctgcttaaggtaaatacgaaaatgatgaaaaaacttcttttttacaacaaaaacaaaagaaaagaagcagagaattcaacccgataggcgctcgagaatgaacagtatagagcagcttgagtattaggaagttcatcaaacaaatgttagggaaaaaaagttcaacacaaaaagttggttgaagatcaatacaaaactaagttgttcaagtacaattctgttattcgtcttctatcaagtttgcattttggggtgcgtttggttcgagataataaaatgaaatagtaaagcaatgattttatgcacttttctgctattttggtggaatggctattcttccgaaaatggaaagaatggtcactctaatgcaagcgtaccaaacgtacccttagttttcatctctaaagagcacaagcaaggatttcgaagttacctatgagcacggggatgttcggccatctttttccggacctgaaaatgttgaaaagaacataattattcatcaacaatgaaacaaatactcctcaaatacctgtataaaactttaacaaaaccttaacaaaaccgaaaaaacatcaaatcttttcccttttttatgttttgtttaacaactaacatcacaacagaaaacatatcaaacttaaataaatcttacatgacttcacctttggattattcaaggcttctatagttctttgcttgattcgagcacgagtctctacacaagttcaaaccacaaatcagttaaaccattcaaatggggtttcgaaacttaaaacaaatatcaacactatgaatccatccaaactaaccttcactatgtttcttgcctttgttccaaggcactttccctttgtttgctaatccgatcttttctcgccttttcctttccttaatctctttactactaagacttttgaaagaatcattccaattaattgctagaacttcttcaagcaaactttggtctgcagaagagtttatgccaaccaatgactgatgaggccacttaccgaaatcagtgccattaatgtgcaatgctcctaatgagttaagtttaggtaaggaatcaatatgggaaattgatgaagacttgttccaaggcatagatatatcatgattcttctgcattttgataaagtgtctgtactccaagcatccacaaatggaaacagatcgaaaaatcgaaaatctcctgataaaaatttgaacaagctgaatctctttattcaaacaatagagctacttctaattaaacatagcaaacactttaaggtattacaataaaaactcaatttttcatatttggtatgaaattttttgttgaaacaagtttttctctatttattttactttatttttcactttcattttttcttacattttcttttttcccactaaaatccgacttccaaacatatggtaaagtaaatttgaaggaaaacaaaggtagtgttcatcattgcaatgaagtaattactcataaatagaattgattaacatggaacaaagatgatgaaactctcataaaaatcgaaaaatcgaaactttcataaagatgaggaacaagctctcctcataaaaattttaacaagctgaatctatttattcaaactgtaattaaaactcttagaaaccaataagtattcatcctaaaaatctatcaaaatcattgtagtgaagtaactactcataaaaagaattgaaattttcttataaatatagattcatggtgttctaaccaatcccaacaacaacaacacataaaaccaatttaatcttaaaacaaacatataataaacttaattaaggttggaaagattaaattaattaatgccagagacaatagttttacttacattcttgaaatctatactcattgattacttggttttttttttagttacacttttacacacaaaatacaaacttgagctaagagataatatttatattttgaaaagggaaatgagattgaaacttatggatacaagaaaaatcaagttttggggtgaactactagaaatgggattctgtaattttactcaaatagccattgataatagtttagaagaagaaagatgagattttgaggtgaacccagttggtgaaatgtgaaatggtgagagagaaagagaagaacttacagttgaaaagatgggatttgaaggtggtggaagataaggtgaggtaccggtggaactgtggtctggaaaccaaacatggtattgtattggtcggtcttttggattttgggtattattttccttttctcctaaaactcctaactaacatcaaaaaaaatgtttaagatgtcctactgacttagggatggcagttgtaaccacgcgtacccgaccctaatagaataggagcgggtcgaattttagaaatgggagaatgtatgagtttaaatgtttatatttgagttgggttcggattggggtgagatatttcactttttaagaaaatacttacaaacttgcagtaatgtatattaataatcacacttaattattttaagaaaaaataacacttaaccacttgttttcgattgtcaattttgtatttacttaattcagttattatacatactattccccttatgtttgtttttctaatgagtttttatgatttttttttaattctatttgaaacatcatatgtgtaatgggtactagatgagaattcttccatgttgagtgattcccgccccacccctgttttaatttaaattagtattggggcaggtatgagagtgaatttagaaagcgggtatgaagttaaagagtcccgtttatcattattatacgagtaatttgcagtgtaaatacttaagtttaactctcagttaaagataaataattaagtttaatttttgacggtaataatactcaaattatatttctagaatttttgtaagtacctgaatgtgtcaagttaataatcacgtggtagtccctaattggtccaagtcattaaatttttcttttattttttatttaaaaattaatttaaatataacaataagaaaataa

SEQ ID NO: 379980 - DNA, 4845 bp, Cannabis indica
tttgaacactgttttttaatgttataaattattttaaatttctcaaaattttagaatgtacgtcttaaataactgtaatgtgcacgaatataaaaaaacatagactaatttttttttgaatgtcgaaactgataggaagtacattggttcacctccttaaataggtacagtatacatgactatgaaacaaaattatcctttaaattctaccggatgctgaaacacataaaggtgtatctatgcactccttttagcggatgcattgtaaaagttttcaatatataaaatacttcttaatggatattataccaatgtatggtacttaccatttttttttttttttttttttttgttagaattaggtacttaccaaaatttaaatatatattaaattaaaaattttaaacttattagtttttgtatagaaatttgtaatatgcttactttattaagctacttaattaaaaaaaaaaaaacaaaaaataatctcgtttcactatatcaaataaatatatataattttactatatattactacttaaaaaaaaatatagaaaatagatatgtggacacttgaatcactcacaaatataatacacattgacaagttacttttaataagtagaacccatcttcaataaaaataatttgttgaaatcacaggtttcagtttagtttttctagaacattatattactcaattataataatccttataaaacaaagaaatatactcatttagtaccaaaaacacatttgataccttgtatttttaataatacttatttagtattttatattttgaaattgtacatatttaatactttaaagtaaaatattattaatacaattttattaatttaaccaaatagctctcaaatacttgtaatcaaataattaaatttgaatttagaatttataaaattgaaaataatttgattgtattgataaaatattattaaaaaattttgagtttagagtaccgaatatgtataattttaaaacacagatataaaataattattattaaaaatacaaagtactaaatctgtatttagataaaatatagggtaccatatctatataaaacaatattaaataatgttgaataaataaataaataaataacgtacctgttggcgatgagagcccaaaagaggccaatataaacagcatatgaattaggattggaagccaatttaagccacacacccttcatgaaaaaccagtacgaccgctgatcatcactaccagcatcttcatcgtcgttatttccttccaaatccttattattattattattcgaatcaccaacgacaactactttgttgtggtttgatgaaatacccatgcccgtacgacgaatctccaacaccaacaaaagaatagtgagccaaataatggcttgtacgacagaagactgaacgacaagatcaatgcccatacgaccatacatggctttcactaaaggcactccaacgacaagagaattagtcaaactacaaagtgagaagcttgttatggaccaaccataactccctttactactccacttggcccaaaagcctaacaaagccacagtgatcgcctttgataaaacgtcagcccctataaacctatagttccactcgaaagggtccacgtgggctgtgaattcgaacgtgaagagtggaagagtgaagaagcaaacgaattggttgatagcatcacactgctcaggactgaaaattttccaccattttactgacccataacctaatattaaggccacgtataatggaaccatggcttccaccaccttgtaaacatctacccaccctatcattttatttctatattattcctttgatgagtagtgtttttttttttggctgtactgtatatcatatgtagtggtgtatgaagtggggtatttataatactatatattatgtgtgtgtgcatgtagatggagtgaggcttaaggcataatattaattaatttgttcccttagtgaattatttttttctgttttgttttttgttattattattgagaggatttgatgagtaggtgggtgggtgtatacgattctgtaataatatgctgtggattccgatcgaaagggtgacatatatgtgtatatatataatgtatgttttttttggttagtgcataaaaatgtaaggttactttcaccaggtttcatcttgtagtataatgttataaactatatataatcatcatcatcttggtctattgtatagaataacgaatgaggttccacccacatatatatataaatatatatatatcttagcaaataagatttctgcttaattttttaaactaattgttattgatttaatttttggtttattgtatatatatatatatataaaaaaaaaaaaaaaaggttgatcgatcgatcatacacgtaagtggtgggcgtgtgcttgcttattttaagtaacgtgcatgcattcgtacacatgcatgcatacatatatttctgaattcgaatgctgatcaaagttatcaaacagctcactagttatttatttttattggttttgaaaaaaatgaaaattttcagtaatagataaatcacattattatctaaaattacatgataatatattagcagaataaaaaagattagataatagaaacaccatattatatacaaaattatataagaatcaaaaccgtaataatatcttcaactaaaatacaaataggctgctacttgctagagtgttgaagcatcaaccaaagggcgaagaatgctagatttataatacaaataaacatctgacaaatcacatctattaatgactatttgccaaagatcttccaataaaaattggataattaataacaaccctattattcaatctagaataaaagtaagcaaccaaccgaccaaccatagagataacttgtaataaataatcgcaccataaactatgagaccaataaaaattaaagaaatcccccaaatttgaacatggacaaaaatagtcatgctactaacacaaacatgctttaaaccaattgacatttccctaatatatcaaaaagaaacaagacaaaaatctcatgcatgcatgaatgaataaagtcctactaccataacaatgtggtgtagcaactctattatattgaaaataaaaagaaacataaaaaataaaacatatatagaaaataaaaataacacactacacgatgattgacgctatagtgaatatttaattcagtgtcaatgagcaacttaaattttcgagacacacctctaaagaaagaagatcgaccgagaagaaaagaacacttaggaagaaggatagcaataacctcggtgaaattgaaaatagattgaaaatgaaaaagacctgactagctagctagaggcactatatggctagaaacggcctgcgagccctagccaggcaaaaaaaatcaagcggcggctaaaaacttctagagagtacaactcactagttaattaataattatgtaagtttatgtaggaataattttaattaatcactgatgataattattaataatatgctcaaaatttcacaagacaatttaaggaagggatatagtactatatacatataataccgaataaattccgtaggtggaatatatacatatttatatatatgcaaaatctcttttatgaaagaaaaaagaataagcaaaatataataattcaatcctgatacgttaataatgaaattattatgataccatatgtatgtaggtatatatatataacttttatatatattataatgtaaattttatttctattaattttataaattttaatgaagtaaaactttcctcaatatatacctatattccctttctatggttggaatgtgaaatatatgcttgttcttgcaagaaactgatctctccgacatacggtggagtgctagttggctgagattgatgggttttattttattttacttaaattgttattgaatggtttaggatcaagctacctctaccgccacatatataaaattatttatcataatattaatataggtcatctagagaatataatattgatcttaagagtaccaaaatggttcttttgaaacattaacgcatgccatgacatcttgagctaccacttaaatttaatgtcgcaaaaagtttggggtgtgacaaaacaaataataaagactgtctctattagtttatttactttattttatttgtttatatcatcttagtagtgaatacaaaaaaccaaaggctgagcagatcaaaacaagcaaatgggttcgaaatttaacgttcactactttttgcaaaattaaacaaattaaataatattatatgctctgcatgtttgatgatgatgtctagctacttgcctagattttgtacaatttgatttcgtgagtagtcaattttggcttacattatatacatgttttatttatttttattggaacgcataaatgcactatcacaatggcatcgatctctctctcgtcaatatatgtggagaaagttgcgttgcgttgcgttttcttgtttttctttcattggtttaacgtacttttgcgaaaccaatcgaacaattcatacatgtaattattataatgagaatatttataaaagaagtgatactatatataatttatagtgttgattttcatcattatatttttagtggctccaacaattcaatattttttccatcccaccagtactgatctatttgaaaaagtagagtaaaatttgtctttgtcctgttatattattttataatataataaagtatatagattaaaacgtgataaatatatgtgaataatatatattaagtgtat

SEQ ID NO: 379981 - DNA, 1825 bp, Cannabis indica
ttagttgaattagcagaggattatggaggacaacttcccccccccccccccccccccacacgtgtgcgtttttgtctctaattttctgagagggttgtcattcttttctttctattatttctgtttttgtagttgaaacttgaaagagttcagcaagcctagctttctcatggattggttgttttgacttgtgaggcttaacgtatgaagcttttaatatttttattaattgtttaagaaaatggccattattttctgttctgttgtggtagttagtctgcttctgctgctgattttattcgatgtatttggtggatatgaatcaccaccctcttatttttaatcactatataattatattatggatttttcatggcttaaaatattgatttccattgttctgttattaactggatttttgtttttaatttccttctttatcttgtctcatttttaagggatttttttttaataatatcatagacattataaggaacaagtcagctacatgtgtcatatccaaagaccaattgtccccctattttcattatttctgatttgttgaagattgttctacttaccatctgacctctccacccctaatctcctcaaagggaaatataaatatacaagtcttctatgaaattttcaggaacaggaaaccataaagagactagaaatattttctaatccacatggcttctgttcttagatgttcagctgaagccaacaatgatgtagcaaacatggaattcgatgaagatgatcttttcgagattgacctcgaggcagtcgacagcatacccccgccacgttattgggagagctgtgtcacagcgaccgagagcgcacttctcgctaattgcctgctgcccatatcagatctttcgagtgctgttccaatggtttcgggagcatgtagtgcggtgtcattggcgagaacgggtaatgttttgatgattatggagcctatccctttggggaagcttcttcagttgtcatgtttaggtacttttgggattcaacagaaggacatgaagtcttgatttgataaatgagtaggaggagaaatggttggaatagtattttgttagtcataaatcagatatagctttttcattttttaccatttatcaaaattatataaacagatatacttgagaaagtcattgaggcttgtacaaattttacccttttgatttttactatacatttatattcccatatctaggacttgggagtactagcattatctccataatgtggagctaagcttagttgatgttgggaaaagcgacttgtcatttgcccgtgaaaccacttgtattgtaatttcttagtgaagttaaatcattgaatgtctttcagcaatttgttgtgggattctaattcgccaatatttccacaaaacgctcgctaatcatatgagtagacttatgtcttcattgtttttttaatgggagaagagtatttcgaacttggtacttcctcaaggacaagtgtaaagaataattgatatttattataaaatttgctgcataaatacttattttgtttgttttgttgttaataagaattaaatttcttaaaatagcggtcaaatcatctattccaagaacacctgttacttttcggcttgtaggagctgtattagttgaccatgatagttgttgctgtctaagatctcaaaagcttcattgtaagatttggaaagaatggctccattggctgaagcatccaacaccatccgagaggctgcattgagaccattgtaaaatgtctcaagttggatacaatgagggataccatggtgtggacacttcct

SEQ ID NO: 379982 - DNA, 5795 bp, Cannabis indica
ctaaggcggtgtttgtgaattttggcagggatgaggactatcgtgcgctgggacgggcaggggtgaatgttagcgggtgcgtagttttggcgaggagagggaatctcccgagattcgcggtgattgagaaagcggcggcgcacggtgcggcggccgttctattgtacacagaaggtggcggtggggaccggtttaggaaagggttcgagagaggcacggtgatgagtggcgttggggacccactcagccccgggtgggccggagtcaatggcggcgagagtttgagagtagacgacgtcgatatttctagaaggttcccgaagattccatctatgcctctgtcttctgaggccgcggaaaccatattgggttccctgggaggagctccggttccggctccatggaagtcggtgccatcgaaggtcagacgtgttggacctggtccgacaatggtggacttcaattaccaggttagagtttttcactctcttctcagctgagaattttagtcaacgttttgtggaaaaagaaaagaacaagtcttattgaggatctttgactttttttttttttgtgtttttctccatggtatatatttttgtcctttggatttatttgttctttgtataaaaaaataaaaaggtccaagtcaaatctcttaacggaagacggcatttgtcgtttcattctccatgtgatattgctaattttagctattgttctataaaaaatcactttttagtttttaatggcttgagtaattttttttttttgctgtgttgttagttgaatttggaaaatacagttataatcagttataagaatgtttaattcagtttagagacttaatttaattgtctttgtcttttaattggtagggagagaaaaaggtggcaacaattcatgatgtgtttgctgtgataaaaggattagaagagcctgaccggtatgtgttgcttggtaaccatagagatgcatggacatatggagctgttgatccgaacagcgggactgcagccttgctcgacattgctcgtcgattcgctcgcatgagggatttgggatggaccccacgaagaacgattgtcctctgcagttgggatgcagaagagtttgggatggtaggtaaattctccaccttcatcattggcggtaaagttgtctggaaaactaatgatctgattccaatttatgtaaatcttgtatagattggatctactgagtgggttgaacaaaatcttggaaatctggggtccaatgctgttgcataccttaatgtagattgtgctgttcaaggacctgggttccatgctggggctactcctcaactagataatctcctccttgaagtcttgaagaaggtaaatagagaatcaaaagtcataataatgaaactctttagttggttcttttttgtaattaattgctatcaatttgatttcaggtcaaggatcctgatttagatggttccaccttatatcaaaactgggcagacagagataatcagaatgttgtaagttcgacatggtctttaattttcattataacatacaaaagtgttttcgttttctgctaacatacaatggcatcgccgacttgacatgggtataatgatttgataatacatattactgattataatctatactataattctgtcgtttaaaacttgtcctaagtaattacttaatctttgaagtagttgactatggcatctctgacttgaaatgaggaaatacttttcttggtttataagtaaacttattctctttttgcatgtgcatattgtaagtgctatgcttctgagtgtttaagataccactctgtaatgcagattaccagacttggaagagtagattcggactttgctgcatttgttcaccatgctggaattccatctatagacttatactacggaagaggtaaatatatcagacttaaaattttggtaggcaaacaaacattgctacgtcaaatcgagtacagggatagttacaagtgcgtggtaatgtgtattcaagtgtataaggcttttagggtgttgcatttggggtttcagtataattgcaggtgttttgaaaagaaaaggcttcttcttttggtttttcgcacttaccaaaataaatcatacttagaaacacttccatgaaaaattttattctgggtacaattttttcaatgcttgttaatcttctttcttcagattttcctgtatatcacacagcctttgattcttatgagtggatgacaaattatggagatcctttgttccagcgccatgtagctggtaagcttttacttgccataagtatatcgtggtttcaagtttgtacttgacttgcctttttatcgtacttcctctattgtaaactgtctcagttgctggagtttggggtcttctagcccttcgccttgctgatgattcaattctaccattcaactatcgatcttatgcagagcagctgaaggtatacacaggcctacaattttctcttctcacgtgctgctagttttggagagcaattttagatcagatcaactgtcatgtatattggttttttactgtgtagctttgattttcgccatctttatctgagtttaaatgctgaattttaaacttcatttccatataataaaaagataaatgaactatgtcaattttttgcaggggcacacagaggttttaagcaaatttttagacagtaatattggatatttgtctcctctaactacatcaatccaagaatttgctgccgaagccaaagaaattgacattaaagtgcaggtcaatcttcacaagaaggattatcattatgttctttatcattgttattaataccttggaaattctctttcgtataggttatgttattgtattagtttttgtgcaactgcagatcctgagagagcaagagagtagtactagtgaactagtcaccctgcagaagcgggcattaaatgatcggctgatgctcgctgaaagagccttcctcaacacagatggccttgatgggaagaaatggttcaagcatcttgtaaggcttatcctttttgctctattggtaatcataatgcaaacattaataagtagtgtttaagaatgcagacagtaaagttgagactcttaaacaagttacaacataagtctataacaagttttcttctcattgttcaatattcctcttgattattctgtgatgcactctttgacctcattgtttgactgtttttgcttttggtagatatatggtcctagtgacccagaaaccgaattagacttctttccgggtatagcagatgcaaattttagatcgactggaatgaatttgaggcaaaggcagtcactgattcagcatgagatatggagggtcgctagagccattcaaagggctaccagtgccctcagaggagagctttcttgatgcattgtacactaacaaaattttagacctgttcttatgagttagatattgggagagcgagagcttacattacctgattttgtacatatgagtggtatatctctcctttttgtgtgtagttttccatacttttttgtgtgtaaataattgttatcatgtctgagatcagttttgttttaactttacattatttttatggacaaagtatatatgaaaaaaacacttgaaatgaaatcaatgaagtgcagtcgtgccatgacaaaataaggttacagtaaaatgcatttgccattgatcaagcacttttaagttggtcgaacaatttctttttcttcgaatcaattacccttatttttaattttaaatagtttcacatttccatttttcttttgttgtttctaattatccctaccaaacaagataataaatattcaattatacatttttttttctttcttttctattttttaaaatattgtaccaaatgtaggtaggtctaagatccaaaccaagttcattggtaaatgaaattaatgccaaattatcagacatgacaaattcaaatgcataaaactagtctacaatacacaaagtagctaaaatgacgctttttctttttcaaatgcataaaactagtctacaatacatatgaaattgatttttaaaaagaaataaagactgctattaaatatgaaacaacatatataaccttagatgaagtcatttttactctaaaatcaatggatcttgaattgaagaatgacaaacttggtagttttaatagagaactaaatttgagcagaggaagacctcacaagaagccatcaaataataaaggaagaagtgaattaaattgaggaatacccaatcattagtttaagaatgaggttttgctctcaagggaatttgggtcgggtcgttctcttcgccttgattgcatgcagagccgatgatttttctatcgttacgacatatcgatctcctttctctttaaaaaaaaagttgaagaatatctcttttttgtatctattaattaaaaatacctcatattatattttattaaaatgtacccacttttgtgagtgtgtgttgcccaatatacccttactctccacttaagtccagcacataatttacattaacttaagggatataattaggacatcagctataaaagtgggtatatctttaaaaatatggacatgaaggtaaaaattaaaaaatgtaaaataaagtgggtatacaatataatttcctcggaataagtcatagtagaggccctaataaaggtagaaaacaaggcagagacagatcacaatcaagagggccaaaggatccaaatggttgctaccattgaggaaagccaagacacttcagaagggactactactattgaaagagaaataacaaaaacaaactaaatgaacaagacaatgatgcaaacgagagaactaattctcaaaacagaaagaaaaatagaatgaagccagtctaaatgatggctatgaaagtggaaaagtttatgctcctaattttaagaatgaatgattcttgatttagtttgtacttttcacatgactaatggtaaatctttacttatgaatttcagggaatctaaatgtgaaaaggtaattcttggcaacaatcaacatgtcatattgaaggttcaagtattgtaaatttaagaacgtttgatggtgtggtaaggtgtttaacaagggtaagacttgtatcgaacttagctaggaatgtaatatctatgtgtactagatgaccttcgtatcgtgagtaagattgaaaaggtacaatgaaactaagcaagggttctatgacaataatgaaaggctactgttaagcaaaaatttcacatttagaatattaaaaataaatgcaaaacacaatttcacctatgccaaaattatagcataagagtttattaacttaagttcgacccatccaagattataagaataatctcttaattacaatccttttatttaaaggaaataccctttgattccaattacaatgacattaaataattaaaataaatttgggaaatttggggtaaatttggaattgcggctgaactcagtcgatttaattaaccgagctgcctacataccttctttgtgaaggatcaagccacttgtagttcagaatacggtattttaaaatttggatataaggattccggtagatgaccactttgctatttaaaaatttggaaaattcctaggtgtatgaccttgtatggaattttgagagtttgtgtttttataccatttttgcggtattggcgactgcacttagtcttagcaactaagttgcctacgtatccttttgtaggaatcaagtcgaacgtagttccga

SEQ ID NO: 379983 - DNA, 2548 bp, Cannabis indica
attgaatattggcatgaaatgttgagaagtgaaatctgggagttgaagaatatggaggtagagcttttcaacccattgttattcagttattatgatttgactcctgtagaaagacgatgttttatgtattgttccatcttccctaaagataatgtgtttcgaagagatgatttaatacaacaatgggtggctcaagattatttcaagtcaatgaacgatggtaagcatgaagatgaacaaagaggcctggtgtgtttccaaaatttagctacacggtcattttttcaagaatttgagtttgataattataacttcactatggaatgcaagatgcatgatatagtacatgattttgcgtgttatctcacaaaaaatgaatactccattgaactaatttctgatgttgaaaagagagttgacttggatattcgtcatctcaacttaatttatgtttcttcatcggtgactccaactttctcaaatctcaagaagaagaatttgcacactcttatggttacgtgtgattcaatgttgacaggttcgaataattcactgagttcctgcatgttcccttatgatctcttggatttgaaacgtctgaagacattaattttgaagggagaatcaatgaagattccagtaagtatcggtgatttaatacatttgagatattttagtattagatcttatgatatcatagatgtgccacccacgattggaaacttgtttaatctccaaacgttgaagttttattgttgtattactgaacttcctgaagaagttggagaattgatgaacttaagacaccttcacttaattaaagggtgtactaaaagtttgccgaaaagtatttgggccttgacaagacttcagacattggatattggtggtagtataaaggtaggggtcctaggggatattcgaatcttgaacaatctttgtattattcgtttggaaggcttaggcaaagaggaacacaaggaagaggctaaggaagctcaacttcttaacaaaaaagctcttgtccatttgcatttgaaatttgataaggattcttcagtgatggatacccatgaaattgtactggattctctgcaaccacatcatgaaaacttaaaatctttaagaattgaggagtattgtggcctgctcatttctcctagttggatgttatcattgactaatttgagaaacttagacttgtatggatgttttaactgcatcacattgcctcctttggggaaactcccatgcctcgaatcgctttgtattgatagttttcctggtttgaagaagattgggtctgaattcttgggagaagaaaaggatagcaagtcactgtttccgaaattggaaaaatttgaaatcaattttgcagattcgttggaggaatgggtaggggtggcagggtggacagtgaatggccctttgaaaataatgccttgtcttgaatctttggaaatgtcattttgcggtttgttgagaacattgcctgactttctgagatcaacaccactgaagaatttggtggttgctcaatgtgatattctagagaaatcttgcgagatggaaaagattcgccatgtcccaaatattactatctgttaaaggtaaattaaaacataggtagaaaaactagcaataatgacatctatttttttttttactaataatagtttgtttgtttgtttgtttgtttcaatgagacaaacctaaatacctctgccatttgtatgtagctaaggatccgaagaattaaggaaagggttggcccgaagttgaagcagttctgtcttctttcatgtgagtaaattttctaccatatgcttttataggatcccttcatactttataaattacagtgtctaagattttattggatattaaatttgagtgttgctatggataggataaatgatattttgggctgtatcaaatattcttgtttctttagtacaagtacaaaatttgacaaaataaattctattaggagtctcatactctcacagtggttgaactaatcatatagagtactgagaaatttggagaaaaataactctgttattttatttatgtgtatatacatcctagaaacaatgtatatatgtagtgaaaatacaatcaatcccataaatacaataacaaaagaaattaacacatttaatcaaaaaaaaaaaaaaaaacgaaattaacacaaggaaaatgatggtaaagcaacttaaacgattcgactttcttatttgccaacaagttcttaaggaaaaattgattattttatgaatctgaaaatagatccgtaaacgattcgacttcatatatagtttatcagaaaattattaactaattatttagttattgctatttactaattagttttgatgaatccgaagttatatttaaacagaggttgttttgcttaagaattatagtatgaaatcaattatagtatgaaatcgtcttgaatagatctttaattaaatgaaagagtgctaattacaacctcctattacaatcttttagtcaacttctacgtctgaaatcacatgcc

SEQ ID NO: 379984 - DNA, 7200 bp, Cannabis indica
attattattattattttggtgctaacgcaatattttgcacgaattcgaatgataaaagaacactgcctctctgaaaataattagtggctgtatgttaattcttgttcctttttcaacttggcaggttgagctgccaggctgcaaaggaatttggactgtttaccacaagagcacacgtagccatactgttgactcaaaaattacctctgctgatgatgagtaccatgcatatttgatcataagtctggaggctcgaacaatggtaatgcctaacccatacttgagttatcctttactcagtttatttgttgagaagggttattttgctgttcaaacgaatgagcattaatattgtaaaatttgagggtttttaagaatataaattattgtgcttaggtttgggacataattagtcattacgtaacaaattcatgatttttcatgcatcgttgtatttttacactaatgatttgagaaataagacaatttttactgtgtgttaagatttctatttgaggatgatttagtatgttatcaagattaaagtttgttggaaattgattattcttttgttgatgggtaggttcttgaaacagctgatcttttggcggaagtcactgagagcgttgactattatgtgcaaggaagaacaattgctgctgggaatttgtttggaaggtgagctctatcttgtgaatcttatgataagaggctttaaatatgtatattgatactattcaaggtgatgatttgattctagaattgcgttttttgggtacttgtgaccatgttctctatgttaggattgtattgttagctggctagtaggattgtaaagtatattcatggctgttagagtttgttactttgggttggggtcttactagaaaataaataggagagagggtatggcaggatggaggttgaaattttgagttttgagagcattctttcttgctcactagactctcgaattcctaggttatccatgttactttccatatttcgtttacaattttaatcctctctatgatttacatttttgagtgttgtatgaggtattgtactattgtgggtagagttgatccaaagtctcatcaattgattccagagtcatcgatcttggttacttttcaccaggtgatgtgatagaactttctatttacacttcgaacaccaatagactagattcctcaaagaattctttattggtagaagtggccaaagttacaactagcttttgagaggctagactcctctccaattacaaccttttgagagggctgctccatccttagactcaaactcttctaatcccaagctatcttacaaatgaatccctctaaacaaacacagccactaacataaaagaagggaaaaatcattaaatagaacagaatataaaacagccctgccctaagctatttctgtggcctcctattgtaaacaaactgtagtaggggattatcatgatcccaaagaagtttaaagtattaccttctttgaatgacgaaggtgatgatctgcattggtggcttcatctcattgatgattactttgattaccaccatattgataacgagcaaaaagtagctattgctttaaagtattagaggtggatctattcagcaacagtttcaagtggtggagggaacgtgagcaattcatagattggctgcaagttttgttagtctgtgttaattgttggtgcttgagtattgatgattcgtattgatttgatcttagtgcaacaattccattaatggtattgaatgagtttacaagctgtgaatatatacagaaggaaagaaattctcgatactcaaatgtctgtgctcaattgcttaatattcacgtgtgcatgttttttgcctgtttgaatgtgtgtaggcgtcgagttgtgcaggtttacgaacgcggtgctcggattttagatggttctttcatgacccaggatttcagttttggagctgcaaatgctgaatctgcctctggttccgagagttccatggtgatgtctgtttccattgccgatccatatgtagtattgagaatgactgacggaagtatccggctccttgttggaggtatgcttgtcaagattttcttaagtgcattacaagtttatgaaacttgcatttgatttcaaatttacttccagttatcttgatatgcgactttattctcgaatttttttctttttctttttttctttattcttattattataattattcccgttacatgtccttttatgctctcatctactaatgtttctgtgctcttttgttttccgtcaccgtctcattacttttctgacgtttttctaatttgcctgttgatttgggtttgcagatcccacttcctgcactgtttctgttaatactccagctgcctttgagagttcgaacaagtcaatatctacatgcacactctatcacgataaagggcccgaaccatggctacgtaagacaagtacggatgcttggctctcaacaggagttgatgaggcagttgatggcactgatggtgctttgcatgaccagggagatacatattgtgttgtttgttatgaaagtggttcccttgaaatatatgatgtgcctagttttaattgtgttttttctgtggataacttcatatcgggaaagtctcacctagttgatacgtttgtgcaagaacaaccgaaggatccccaaaatgaaatgaataaaagttctgagcagttaagtggtcaaggaaataaagaagatgttcagaacatgaaagttgttgaattggccatgcagaggtggtctggacagcatagccgcccttttctccttgggatattgactgatggaacaatactttgttaccatgctttcctgtatgaaggtccagagagtgcctctaaaacagaggaaaatgcttctggcttgggaaatattagtgcatctagactcagaaatctgagatttgttcgagttccattggatacatatgctagagaggaaacatctgatggaatgccatgccaaagaattagtgtttttaagaatattgctggttatcagggattgtttcttaccgggtcaagaccagcatggtttatggtattcagagaacgtgtccgtattcatcctcaggtcagcattttggaattaacatcattcatgaggccaatctaaagattagattgcattttttggttcagaattgtggctagtgttgtttttatgtttcatttgatcttttttttttttcagctatgcgatggttcgattgtagccttcactgttcttcacaatgtgaattgcaaccatggattcatatatgtcacatcacaggtctacatagattacacttccgtattttgaggattatagaatgattgttggagactggctaatatgttgtgactttgtttaatttatagggtattttaaagatttgccaaatgccacctataacaagctatgacaactattggccagtgcaaaaggtgagtacttttcatcttcctattctactttgttcgaatacgaagttaattttgttattggagttttgatggtcatctgcttcctgtcttgctaattagattccattgaaaggcactccacatcaggtcacttactatgcagagaagaatttgtatccaatcatagtttcggttcctgtaagtatattctaccctcaaactttttcaatgcttttactagtacatcctttatgcttattcacttgtgtaaggtagcattctttctcacatgtagtggaagctcatgtacagaatttgataaaggcaatatttgcagttgatttggctattataacgaacatcctttgcagttttaattgtcttcaagtgtttccattgatttttttaatataaaaattacatacagagaatttaaaagtttgttattaatcttttagtcgattcattgtgctgtgctgtgcctttagtctattctcctggatcatctcagaagaagtaacgatgcccctactaattttctgtaggttcaaaagccattgaatcaagttgtgtcatctttggttgatcaagaggtctcccatcagtttgagaatcataatttgagttctgatgatttacatcggacctatactgttgatgaatttgaggttcgggttctagagccagaaaaatctggtggtccttggcagactaaggccaccattccgatgcaaagttctgagaatgccttaacagttcgagttgttacattgtttgtaagtttatttcatcaattattgcttactcattgttagttttcttacttgtgtgatttcccaccaaaaaataaaaacagatgaccatgtaatgatggtatttgaaaactaaattgcagaacacaacaaccaaggaaaatgaaacacttcttgcaattgggactgcttatgtgcaaggagaggacgttgccggtagaggacgagttcttttgttttcattaggaaaagatggtgatgattctcagaattcggtaattgatcagactgtacattctctctaccaaatttactttgatgtaatcttgtactctttcttgcaacattctctaccaacgttcactttcaatttcaggtttcggagatttactctaaggagttgaagggcgcaatatctgctttagcttctcttcaaggccatttgttaattgcttctggtccgaaaattattttacacaagtggactggtactgagttaaatggaattgcattttatgatgcgcctcccttatatgttgtcagcttgaatattgtaagtgctaccttctacttcctattgtattattgggattccgaaggcattacattcgacgttttttgaaattcatttcatagaaagaacagcagggctttcaaagactgagagtgaagccagagcctatcttatagtagattaaaatctttaaagtagtgggtcctctataatacaccccttgagatgcattgatataccctctatttgtttcggtatctagaataatcacgcttacaacacattgtttaaactatgtttttgacatgttaaatttttttaaatttttcgaaattttgcaaaatgttttaattaactataacgtacatgaccataagaaaaaatttgactaaaacattatttcaaataccaaaacagataggggtgcatcagtgtattccttttaaggggtgcattgtagaatttttttaaagtatttattgaaaaaaagaaagatttgattactatttctgaatttttcttgtaacctattacaacattgcattgcaggtgaagaattttattcttcttggtgatgttcacaaaagcatatattttcttaactggaaagagcagggagctcaactgagtttattggccaaggattttggctctcttgattgctatgcgacagagtttttgattgacggaagtactctaagcctcgtagtttcggatgaccaaaagaacatccaagttagtgttattgtgtagtgcattgtttatataatgccattcaatttaattgtttgaagttcacttttaatgggttaaatttggcagatattttattatgcaccaaagatgtctgagagctggaaaggacagaagcttctttctagagctgaatttcatgttggtgcccatgtaacaaaattcttgcggttacaaatgctttctacttcttcatctgatcgaacagggacaacaactccaggatcggataaaactaaccgatttgccttactctttggtacccttgatggtagcatcggatgtattgcacctcttgacgaactcacatttcgtagactagaatcactacagaaaaagcttgttgatgctgttccacatgttgctggtctgaatcctagatcttttcgccagtttcactcaaacggaaaggctcatcggcctggacccgacagcatagttgattgtgaacttctgtgccagtaagtttttatgcccttgttcctaacattcattctgaattcaaatataagtttattgggatttccgcttttgcagttacgagatgctccctttggaagagcagctagagcttgctcatcagatcggaacaactcgcttacaaattctttcaaacttaaataatctctccttaggaacaagtttcttgtagcctgtaatatattgaggtaaggctcttctacttagatcaaaatcaatttgggacctaacaaatatgttggattggatgtatgaacaacttaaacaaaagaaaatagatgatttaattagtttctctttattgttaaacaaaagatcattattccatggctatcatattttttttttgaacaactttaattaaaccataaaaatcatttggttgtgaatagaagaaaccctactataatcattattaacttaataaaaaagactcaaagctctgaggggtcactagattgtattgttgtatattatatttttatatgatgcaggttaaattttgatttatatcaaaattttgatagttgtagagaatcaaaatcatttaattaatagtgttatcaagatgatatcctaatatataaataagacccatatttattattaaactgaattagtataattattgaaattataagccttgtcaatttctgtagctttcctttagttcaaacagccttacagatataatatattgtacatacaacaaagggtcaaagacctaatacaaccacaagaaaaccattatactatatgactatttgaagaacagatgatcaccaccttattgatctaatttcaaacacttattgatccaagaatagaatctcaatatttccaaaggacaatatactaagtaaggtccaataaagaacttttttcaaagttacgaaagcttcctgacattttttggtgaactcaaaagatcgattttcctctagtaaagaacaaaaagatttagagatttttgcgaaatttttaaaaaacctcttataaaaaacctcttaacaaatttgctctatccacttcaattcatttgttagaaatttgtcacccaaaataacgcttttttgaagcatgaaatgatatttttttcaattgagcatcaagtttgtttcttcacatcttgctgaaacttgctccaaattagtcaaataagtgtcaaagaattccaagccactaccattaccaccaccaacatttctctaaaatcaaacaaacaaaaaacatagatc

SEQ ID NO: 379985 - DNA, 1135 bp, Cannabis indica
tatttgtggaatttcacatatacttgagaagttaaaattgacccacaaacataatttagaatagaaaaagagaatacaggtgaataagcacaccaaagcacacttatcatttctgcgcacttatcattttccatcttaccttcataggttcaagccagttttagcaatgttacatacgtagcggagcttagttaattttttttagttttttatttttctgtttacaaacaaacaaagaacgaaagaaccaagacccaaccaaggaaaaaaaacattatatagtccactatgaaaggagacaagttagccttcaactgatccttttattttgggtctgagtctaaaactgacttgatatgctgaaaaacaagttaccaaacccctcagtttctccgcttctgtacttaaattcactaaacggccaactggattatgtaaaagactgaaactttatcctctacacattgtttgatggatttcctggccaactggattatgtaaaagactgaaactttatcctctacccatagtttgatggatttcctagccttaccggtctatgctggaccctctcatagtggtgtgggtcctcactcaccagctggacctctctctcgagaagtaaaaccaaaatttcatgggaaaccaaacacttccgaaaggttctttaggtcccaagattgaacattttgggacataacagctgcaccagctacaagtgcgatggacacaaacaccatgctttttaagcatccatggccccgcgtcagtcgtcccaaaagtgctttgctgtacttttccgcttcctttaacaaagcatgatgtgcactgtctcctttgttcgttaattccttgagattctgatgaaaaccgataatgaatataacaattacacttaatcgtgacaacattgaaatctgaaaatattgatcttagatattgctagtattaaatactcatgaattcataacatttttatagtggtcatttgttcatccattgaagcttcagcaaaactgtcgtttaaaaggttaggggctgtttggcttcataacttaaaactgttttagtttttaaaaacagtaaatagtttttaaaacatcaaaatgttatcaattttcaaaaacaatttttt

SEQ ID NO: 379986 - DNA, 1878 bp, Cannabis indica
gttatttatagatataatattagttttagtgtaagtgtgaaagctagagttgcatatatatatatatgatagatgtcaagagttcaaattctaccaagaactacttttattttcttttaagtttacttttaccaatgtcttaacagtaaaaaaaaaaattatgcctccttattttaaatcttaaaatttgccactgcatatactgttactagtacaaatttatattggattcaatatattttaatttattaaataacatagagaaccattaaccgctaattacacactacaacaatataatattggacaatttaaagtgtttaataataatatttgataaataaagtatgccatatgtatgtattattatatcatagctttaagcaagaccatatagcacaaatataagataataaaacatatgtcaacaaaggtcaccaataccaacattgatctaagaagacgcctctacccaattgtgttatttaattagtaccctaatatattccagtccaaaagggctgttaactaacattgaacaaacaaacaagtacaaattagcttaattcttcattaatataatcaacaaagaaagtctttaaattattatatttaaaataaagaaggaaactttcatcataatttccttcaaaggaataaacccaacaaagttatttaataaaatgtgaaaacatggcaaaaaaagtcatttaataacactttcaaatttgaatatgtaacaaccttatttgaaaaaatatatatcatattattattaaagagcattttgtttggttaagtctctgatccaaacgtctcctttttctcatttccatttcaaaagagagaaacagagaaaaacagcatattcatcagagattatttcagagaaatataattctctcttcaaaattctaactcaacccagcaataatgaaggtttgttatgtacctaaatggattcaaatattatttaattttcttattattattctcaattttgattttgttctttcagagaaatattattttactttccattacaacaatattggctaccacttttctcatggattcatcttcagctctcaaggtcactatcttcttcttcttcttcttcttcatttttgctttaaaataaacccaaaatcttatcttatttgctctgtttcgcagcaaggacaaacttgtgtttcagataagaactgcgattctggtttgcactgcgaaacatgcgtcgcaaatggaaatttacgcccgcgatgtactcgaattaaacccattaaccccatttctcaggtactccacaaaatcatcatattactttttgtttctaatttcacatttttttgaatttgtttttgggttttggtggaaataggtgaaaggattgccatttaatcggtattcatggctaacaacccacaatgcgtttgcgaagctgggacagaaatcgcagacgggaacaccgattgtgtcttccatgaatcaacaggactccattactagccagctcaatgtaaggtttttttttttttttctttttagttagtgaaatttatgttgtttgtttctcgggaaagttttgcggtaaaattaaggggaaaatatgatcaatgactggactttacaataactaaaaagcagagcctaggtttagggtgtcagatggtgaatattagtgttactataattaatgctcatctgccttattgtccttcactttgttaaatgaccaaactgcccttgcacttatgcaccaagtttgtgtttgtatagtcttttttcggtaaaaaaataataattttcttgattttaaaattatctttgtgtgattacaaatgagaatgtttgttctagtttaaaattaaaaaaaaa

SEQ ID NO: 379987 - DNA, 1441 bp, Cannabis indica
aaaaaaaaataaaagtaatatgaaggtcatcaagagcttaagtttgaagataattaaatctcaattgtgagaaagaatttatatatatcatgaaaggaaattaaagagagaataataaatatgataattggtgttatgatgatggctttggaaatgttttaagtactataatgcatttgagaatatgtgctttccttagtagattggagaatcctttatgtcttgttttaagagatgttgaatcattagatttgattcccatcttttctttttcttatttttcacatttttatttcatgcacatctttcttttttctttgtttcaaactattctgaatgaacccatatgagagtgaatactatattaatttaaggtcatgggataaaggaatctaagacagagaccctcaaaaggaatgattagaaatgagaagtgaaaaggtcctcaccctagctagcctaattgatcacttgagaaagttactagcggttagactctgtttttgttataagggcaataaggttcagtaaacagagcattaatatcttaatttatattcattagcaccacactaatttcaatatctcaatttatatctaactaatatgtaaaattatatagtttttattttactccaatcctcacaaacttctattgtttaattttaataatacttttcacaatatgtccacttttgagaatagaatttaaattgaatataagaaatggcctagaacttacaaaatctatttttattctaacttaatagaaactaaaacttccatgtaaaaaaatatttatctatataaattaaaactttgacatattttttcttttttaaagaagaacttcgacatgtttgattttaccaacatgaagttgaaaaaatatatacatataagttaatgaaatatttttcttgagagagaattttaaggaagtaagtttttttttcctattacataaatccagtttcaaaatttagtccttaaatatacatttgatcattaattcatttttttttttgttgtaaggataattaggacctgtagttgaagttctataataaataacagcaattaagtctagtttatccataacaaattagaatttgagagaaaaaaaaattggcttctgactcagagacttgattgataattattttaaatttttcagaaaattgactaaactgcaaaatactccaaatgtgtttatgttaacccatattatgtataatgttaactaatacaaaagtgaatcacatatatgcaaaacacatatttgactaatcgtataaaaacgaaataaacttaattgataacataataagtactgactactgaatcattaattatggtgccgtttggtaacatttttgttttttaattttttaattcacaaaataaaagtaaaatttttagtttttaaaaaatttatttt

SEQ ID NO: 379988 - DNA, 4383 bp, Cannabis indica
cttgatccacaagccattcctaccacagctgctatgcagagtgcaaggattgttgtggagaggctagttgagaggcaaaagattgacaatggtggaaagtaccccgaaacagttgcactggtattgtggggcactgacaatataaaaacttatggtgagtccttgggtcaagttttgtggatgattggtgttagaccaattgctgatactttaggccgagtcaaccgagttgaaccagtcagtcttgaagagcttggaaggcctaggattgatgttgttgttaactgttcaggagtgttcagggatctctttatcaatcaggtaccattctttaatttgtccacctatatatctcagattctgctatacaatcagacatttcaatccaaaataaattgttttgcagatgaatctccttgatcgggcggtaaagatggttgctgaactagatgagcctgtagaaatgaactttgttcgaaaacacgcattagaacaggcagaatcccttggagttggagtaagagaagctgcaactcgaatcttctcgaatgcctcaggatcctactcttctaacattaaccttgctgtggagaactctacatggaatgatgagaaacaactgcaggacatgtatttgagcaggaaatctttcgcttttgattgtgatgcccctggtgctggcatgactgagaaaagacaagttttcgagatggctttgagtacagctgaagcaaccttccaaaaccttgactcttcagaaatctcactcactgatgtgagtcactactttgactcagaccccaccaatctggttcagaacttgagaaaggatgggaagaaaccgagtgcttacatagctgataccacaacagccaatgctcaggtgaatttctataccaataatgctaaataccgagtatttggattgcgaaccaaagatctctagacccttttcgccaaaatctgattatcttcttacaatgcaggttcgtacactttctgagaccgtgaggcttgatgctcgcactaagctgctgaaccccaagtggtatgaaggaatgatgtcaactggttatgaaggtgttcgtgaaatcgagaagagacttaccaacactgttggatggagtgccacttctggtcaagttgacaactgggtttatgaagaggccaataccaccttcatccaagatgaggagatgatgaacaggctcatgaacaagaacccaaactcattccgaaagatggtgcagacattcttggaggctaatggacgtggctactgggagacatcagctgacaacattgagaagttgaggcagttgtactcagaagttgaggacaaaattgagggaatcgaccggtagagacaattcttgaaaccgaaatttctgtgaaaatttgtaaagtgagattaaagaaaagttttcagtacattgatgaagtttagttttttgtgctttgaaatgtctacttaatgtgaatttgcttacaagtttttatgatgtaacttgagacattttcaggcactagagtagtgactgttgctttgattatcatgttcattaaaataaaatatataaatatatttctctatcattgttttacaataaatatagagatagctttcatttattaaatagcagaagatttttgaagctgaggctgaaaagattatggttagtaacttagtgagcttggagttttgaacagagtgaccaaaagcaccaagagtagctgaaattttcactttcttttcttttgaagtgtttatattgttatcaaagagaggaaaatctggtagatatttcaagacctacctaaaacaatcaccctttatttaaagaattgaaactaatgcatggagattttgacatgtaacactatcctcttattacttctcttcttttgggaagatcaatcttgcttataaaccagtgttgggtattctggagaccacatactgttcttcacatactctacaatttcgtcctgactaagttttctaagttggcgcgcatccatttcgcggtatccttcagctagatcctcttctatagcttcctttataacagctgcagctacttgttttgttatatctcgaatgcttgatatagatgggtaaataaccccatttagaacatcctcttctgacatatacgcagctaggcattcagccgctgcttgcagcatgccatcagagatgatccttgatccagatagaagagtaccaagcccaattcccgggaaaaggtacatgttgttaccctggttgcagtgaccaatacgaccatttccaagatggacatccttgaatggacttccacttgcaaatacaacattgtctcccacaatggagaatgcctcatgaggagtacattctgcgtttttggtaggatttgacatggcgaagattgcaggccttgttgaagttgaacctttaagtgcctctagtacttcttttgagaacaagcccccaactgctgacaatccaagaagcacatcaggcttaatttgtttcaccacttgtacaagacttgcaccttcctttaacccctgtcgatgaatttcttcgatttttcttgcaaaaggaagcgcatcaggatcaacattttcgcgctcatctgtgataagaccatttgcatcaaccacccaaaactgtctcaaagcactctctaaagcagattcattgtttcccaacatccttgccattgtttttcttgcagcatttagaacacctattcctgcactcccagcaccagcaacaacaatcttctgtttcgggaaatcaatcattgctcttccttgtgctcttacagctcccaaaagtccagcaatggcaacccctgctgttccctgaacatcatcattaaacattctgtatctagctctataacgctgcaacaacttaaatgcccatttgctttgaaaatcttcaaactggacaataacatggggccatctagtaaaaactgcctccatgaattcatcaataacaccaagatactcttcaccatctaaacgatgtctctgtaatcccagatacaaagggtctttgagcaatttctcattgttggttccaacatcaatcatcacaggaagtacctgaaattccatattctatgattaccaacttttatttaaatcccaaaataaatcatataatacacttcaaaaaagggtatattgatgcatttttacttttatcttgtagttatttaagacattcaaggcgtgcaacaagctatataaacgctgttttcggcatgttaaatgttctctaatttctcttacaaatatgtcttaaataactccaacgtacacgacaataatgtcaaaataatcatagaattttctcatatttatgaaataaaacttgtaaaataaggatttgaacaataccctttgaggattaatcccagcagcagctacatacaagtcaagtttcccaatagcaataccaatcccctgaacaccaagatcaccaagccccaatattctacttccatctgtaacaacaatcatatcaacctcatcagctggccaattataaaccatagacatcatttcaccacgatcttcaccactgaaatacattccccttggtcttctaaacaaaccaccatagttttgacaaacaagaccaacagtaggagtataaatcacaggagcatattcttcaatattagcaatcaaaaccttataatacattgtctcatttctatcatgtaatcgattaagtatcctccatttcgccactgcatacggatcagaaggtccatctctcgcttccacttcgtacctcttcaaatcagccatgaatcgttcgatttgctgctctgttgacataacatttggtggaagaagccctctcagatccaaacggtctcgttctgtcattgtgaaagctgttcctttgttgaaccatggatcgtggagaatgtcgagactgcgtttgtggatcatcgtgggacggtgaccctcggtggtggtaaatgatctggattgagacagccatggagatggattcacgacagctctcagtttctgattaaggcgattcacaagagatgatgaagctctcatctggccgtacaagttccccattgttaagctaagaccaccatgcattggtattgtgttaaatttgggtgagtatgaaagagtatctcatctccatgcaaataggtgatctgtaatatagctgtaaaaaagtttggtgtgtcatattatgatataatttttaatattttattattaaaattatttattttattatattataaactttttacatttatcaaccaattgtttttatagatcacccttattaaatatgggtatttacataaatataaaaaaataaaactaatttagataaatata

SEQ ID NO: 379989 - DNA, 2990 bp, Cannabis indica
tcatcactatgttaagagagaaatatcttagcaaatgtgactataaagtgtaaagttgtaacatacgaacagttaataggattacgggacaaatctacataagctgacacttttttgctataatatgataagtaccacaaatttcataatgatagattaacatccccttcaatgaaagcttgttaccatcaccaaacaaaaccaagattaaccaccgaaagttcttatcacacagaacaataaaaaccaggagaaaaatctgggaaagcagtagattagttaaatccagacaaacacaaagcttacaaattacaatgattactagtactacttttcatcccctaaagaacgatatatattaaatacagcttcccatcaaaaaatttgcacatgatgcttttgctcatttaaacaataacatatacgcagaatatgcaagattattaaaacgcattagtacctgtcctcatcacttttgacttcaacatcggagtcatcagcatctacgctacgtggtattatgcggtcttcaatgtccctctttgaccctattttcataaacaatctagacagttagtgatgaaccaaacacttcagaaaatgtaattcaaatgctcaaactagaaagtatagattcaccttctaacaggagatggcttcccctccttcgatctctgtcatctgtaataataaacaaaccaatcaaataaaatccaaatttctataagacaaaatagaagcacgataagagagcaacattatggactgagactacatataatgaaaggccagttattaacttataagctgtaccattataattcttatcctttgatgaaaaatgtcttcgctcacgttcttcaagctcctcctgaaggttcctcttctgcaattcatcttgggtgtcctgcccttctttcctataattgcagaaagataatggtaattaacagagtcaaagttgcagaaagacaaaattcgaaatgttatatattacgacatggcaaagagaaaacaaaaatgatgatgaacggaagaatctcactttaaaagataagagcaacaaccaatagtagctccaatgttattccatagcaacaaaattttagtgaaactgcttagttataaatctatcaaataattatgaaatatgatcacttaattaccccaattctagcacatgttttagacaatctaggtaaacaaaatacactcattaaagaggattcatatgaagtatttatggattatgcaacaaagactcgtatgaatcatatacaaatttgttgtgagcctcaatggttgatgtacctggattttaaagtggtatgagcagctagatctctcgatgaatatttctgagatgggccaaaaatgcgagtaccaccttgttcattaccacctttagcaggagcccacgttggtcgagctgcagtcgtcatgcttgcttactattaatgccagatgtgatctgaaagacaagacaaatgcttcaaaacccataaccatcatcaatttttcattatagtcttaagcttagcaatcttgagcaaagttttcaattaccattacattcttcaaaacatgaaaagaacacacacacagaaaacaataaatatgcatatacatatatctatcacacaaatatatggtagttcaactgtgtcaaattggcagtttcaagatgccgaaaaggagaaaaattaatcatgtggtacaaccccccaagaaaaaacccagcttacaaagaatatccaagaaaattttagaccataatttacatatgacaatcgtaaaaaaaccctaaccctaggtagctccaattaatcacaaaagaggaaatgaaataggaaaagaagtaaattgaattgaaaaaggatgttacctggaagagaagaaaaagctggcgattggatgatggtgaaggaagaagaggaaattctagggcacgcagaaggatgttcaactcaacttttcgtttgggagaagagctctgcgtttcgctttctaattttcttttattatctaagacaagtatggttatttgacaacaccttttacaagttgtaaaaaattattacattaaagttacgaaaaatgctaaatggcattagtggtgcctaatactctcttatatataatttaatataataaattttagggagtatcgctagccaatcgcaacgcgacatgtcgaaaaagtactaggcaccactggtgcctaatagcaatgctcttaaattatatgtgattcgataattagttcgacataatattaacaataagaaagttggctgaattgagattaattttaggataattacttaaaattattattttttttaatttttatatttttagagtattttataaaaataacatgaaaataatagccttttaaaaaaatatataaaaacaataaaaaaattacacaggaaaataatatcaaaacaataataaaaaaattaacagcaaattaataagtgtacaacataaaaatacatcaaaagaccgtattttttataaataaaattacaaaaatataaaaatatttaaaattctgtaaaatcgtatttttgtaattttttttattattttttgtgcatttgtgaaataattcccaattattttaataggccaacccaaattagaccggtctataaaaattgtaacacattcgtattatattttatagaaaaatttacacaatacacctaaaaactaaatagttttacaactttttttacttacatttttatatggataaatactattttggatcctgtgttttgtaaaaattaacgattggaccctctattttgttaaatgacaaaatagattatatattttccaaaatgacaaaaataggaccctaagcttaatttttgacaactttttgtaataaaaccaatttgataataattcctaacacgagcatatacaaaaaatataaacaattttgtcattgttataaatattaataattatgt

SEQ ID NO: 379990 - DNA, 5632 bp, Cannabis indica
atgtttgtcttattctatcaaagtttgtattagatttggcccttctttccttgtgaataaaattcccaagtctttcttaaaaaataaaataaaagaaacattttggaaaatgagataaaagaaggtaaagtaaacctatgaaaagggggccaactatgactttgaaatataggttttaaatgcaaaacaaagtttcaacaaagagggaagaaaatcatcgctatattgaatacatctctttgattaacatttcgatcaccaaaatcagatacttttggacactcttgcttctttggtaccaacttcattcagtgttaaaggcgcccacaaatgctacacaacactttttttctttcctttcctttcctttcctagagggacatcatcccttttcaatattctaggcacaataagataggatccacaaaaacaattttcaggctgatatcttccaattagcattcctgttgtttcaattgtgttcttacaagtatctagacctaacgaatcataagcggtgactgaaatacatgttcataaaatatctcgatggattgaagccactcaaaataactgcagagtgagaaaagaatgttagtagtgtaagctattgtaacattaattcaataaagaaagaaaattgagcagacacacttacagattggagtaaggacgatgacaagaccaattgggtatagaaaaaaagtggtcctttctagaaagggaagaactgcagaaaacaggaccatggttatttgtacctatattccaactattggcagccatgttattatggttgtcgtcttacaactttaatagaaaagtaaaaacaaagattggattgagtcagtggtaattgaggataaaattattctaaaaccaaaatggaaaatcaaaacaaatttatagacagtgcactctagctggatcattgtcaaaacaactacagttgcatgaataatgaaagtcagttggttttggtgatgcttagtaacttattggcatgatttaaaaactaaatgctataacttcatctttcaatttaaagatctcaagaatgaagaagaaatttttttgcttcaagccaattcaaaacaaattgaagacatgtgtcaatgccatattgaacgagccaaaaataaattcctatatcatgcaaagcaaacccaaactcttgtctatgagcaaaatctttatcttaccatcatagcctaagaagttgagataatgatagtaagaagtagccaccatgaatagtaaatttgacagtagcactggaatgaatccgtgagctaccaagagaggggatagaaaataatggatcactgcaaaatcatgacatagtagcattatttcataaattagaatcaattttctttttaaaaaaaaaagaaatatagaataaaataaagaataacgatttattaatgccgctattaccataagccatcacaaacatcgggaagaaagagttgcagtgcacatcaaatgcatacagccttcagtgatcaagaaaagaagaaagatagtttcagtcaccaaaataattcaatatgaactgtaaatcacagaaactgaaaaaggaagaaacagatttcttttgaaaaactacacatttttctcaaataaatgactttcattacaggaacagttagaatgcaaaatatatgtttgcacgcacataaaaggattaagagatgcatgtgctgatgatttaggttcaggaaaaaaaaacatgttcaattctccagttgaaatttagattcctaatcaagttagaaaaggattgaagacttgccattcaacccgttgctctactacatgactgtttggagcttcttcccgaaggtaagaattagtgataaacctgcaattacgttgaggattttgccattaaattgtgttcaaagatataaattgaagaatcagccaacatagaagaattaatcaatatagctagaatataatatcaactatcctgcgcagtataggcagaacatatatttaagtgtcctgcctagtatcgacctttaggtttgtagattaccttttttttgtatggtgagttggtagattgtttaaaacatatatcacaagagcaaattagcacagcaaactaataggggcaattttaagacaacaaaaaaaatcccgccaatttaatatcacttaccaacaaaaagtggccagaagtgtcccggttaataaaaaatggaaaatcaatactgaaataactacaaaaaaagcatgcccagcactgtggtcgtacctgaaaaaggacaataaaagaaacataaatttcggcattcttgaataaatcaataatatagaaactcggtatgtcaaagtattacaactgaagatattccaaaaccattatataattttattttcttcaaataagcagactaaaatagaaacatttctgtattcaacttcatattcaccataagatagggtagtaatagcattcttgaagaactcaattattaaaaaaatcagtagttcaaagttgtacaatcaaagcaagtcctcaaacctggtaacctttctccttcacatatatccttgagtaaaacttttgaattagtcaatttcgatttcataacaaacgctacaatgaatcaaaaaaatttaaaaaccacttggcatgaagataatggtgaatgttaatctcaaaacattgtagcgcttgtttctagttttaaagttgtggggccccactaattattaaggaatttatgacatttggataaaaataaacaagtctcattttcaactaaacatataaataaattacttttaagaatctaagacaatattatcatacacaaataaggggctgtttgttgttaggataggaaagtgtagaaagagttagtatgtgggggaatgtgaaactcaacttttcaaatggacattaccctttaaaatccagtgaaacccatgaaaaataaacacattcccacctaaaaaattaaagcaaaaaaggggtacactacacattaccctatccaactctgatattaaatatgaacactttatctttgtattggtttcctttctcatgaaatatgcaagtgaataataaacttacgcagcacaatatgccatagttgcaactgccagtaggaggctgcagatcacaacaaaagcagggtcgtcacgtgcccattgattcttagtttctgtgaacaaatcaacatgtaaatatgtacatatataaaaaatataaatggcatctaacaacaataggaaagccacatacatgattaattgataagtccatatgcattaaagccataaatataaaatttgtaataacacaatgaaattagctggtcaaaaatgattgcacacttagcagtaacatagaattacaaaagaaaacatcaaacttccactataatttcaaatttttgcagcgttaatcttctaagtaactagtgaatacaacaaagtttgcagagtcctgacaataagaaatggaaaaacttacgcttgtgatacttggtgtgctgataacttcacatgcaagatcaaaagttgagccagaaagaaaagcataaaaagttagattcatggtaaaaacatgaaaaagatttataagtgatcctccacaaaatatcaggttcctcatccaataatgaacttacacaacttttggtgatgtacatagatgaaacatttgccaaaatgtatattccacatccatttgttgccactgaaattaatcaacaaaaagcaaaaataaaaagaagtgcaagaccaacacactaaaacagcttttaaattattcaattaaaaggtacttccaaaagaaactataggtctataaagaattcaatgaaaccgagtagagtagcacaggtgacaggcatagaagagaaacatacgtaaacttaacaaaaaaaaacatttgtacagaggttaacacctataaactccacagggatacaggaacaggaatcatgtgtcatccatattccaattaaatattcatttatgtatatatacatatagtgcccaggaactgagtgcacctggataacaaacatttacttgttggagaattggaattggaaatctatgtttttataaaaagaaatgaaaacagcgcagcaaaaagtcctatcaaaattaatcattctaactatcttaaatattaagttggccatgaagatatatcaagatcttgactaatagatttaaaagaaatgaaacaaaataaaggcaatactgtaatagtgacgtgaggaaatcaaaactcaagattcagggcagcttaggtaatcgggcattctattatttttcttttcatttttcctcccattttaccctacaaatttgaaggcaagaaatagcatgttgctaggtacatcactatcatgaatcaatcctacacctcaatcctcgtggagccaggtccaaccattcaaactaccctaatgtgcgggaattcaaatcgtatattccattaaaaagcctctttcagatctaatcgattactctggtgtaatccattagatttgagcagccaaggtaaatagcttaagaagcaaaccaatgttcagtgtcatctctaactaaatacaaaatcctcaaaaactaccgaatgtagattgaattccctaggggccagagttgaaatcagagcatatttgggagacgacgcctaaccccactttaacatgtcgtaaacgattgaactgatagacatgacttaaactacgtcttccattatcgtatatataaattagtcaattggcatttcgatgaagtaaagcatcccacggaaaatcaacgcaattcacaattaagacatacacacatataccagatatactactcaaactcccataaaaaaaatcctatacaaattcaaggagctatgacaaactatatttaaaatttaccggaataactgcccgcgaaaaacctaatgatagataattctctcaatttctcaacaataaatgaagaacaatagttcgaaagttcaagtccaacatttccattcctaatttgatctagtttatgcataaaagagcgtgatatatacagaaattcaacaataaaagagtctaaatgttagagaagatcagatccgacttgagagaacgcaccttgataattcgtctaagatactgaatgaacattggattacttcgagaagtagaggccgaagacgaggagcgtcctttcgaaaccgtaggcaacatctttctccttctctttctccttcttcttctttgtcttcttcttcgattggaaatcgaagatctcagaaaattaaacgaaaaagcttcgctgtgctggaaatggcaggtagcaaactttacaacgacttctttcccttatttgtctcaaaggcccaacttttagttctactctcaaatgggaaggcccacctttcaatttttactagaacccattagcccattcatctttagggcttcttagaaaaaaagagcccaaacatattaaatgtagtgttacatgagagtttcaattatattgaattaaatctcatatgttttgttttcaaaaaaaaaaaaagggaaatttacacagtttactgtgttttcccattttatttcttttatactgttacactctaaaaataactttt

SEQ ID NO: 379991 - DNA, 678 bp, Cannabis indica
tgtatatatatacacatatatagcaccatgagacacacattgtgaaaaaaacactaccatgcaaatttgatatatttaatataatgtgatgtacacatatagatggggataagtctatgagcatgatggagttggctttttttgctttgtaaagactgatcttaactgtcattataaggatagctctttgaactccttaaattaaaagcttgatgggttatgatatcattgttgtctgaaactgaacaaggggttttggaccacttgaagcatcttttcagatgttgcattaactatgtgggggcatctttttaattattatatattatatatgtaagatattaccttcttcattcgtttctttacctatcgatcatttcttttttctttttcttaataaattcactttagctaaaaatttacttgttatatattaaaatatataatcaaatttctaattatttaaccactagagattagattatttaattacttatttttgaaaaagatgtatgtaatcaagttaattaattatatatattacaagtgatttgtcaaaacttaatattataatttttatgaaatattagtattatgtaatattataatttagagaaagaaaatagagaagagatgagaatttttgtagtattttattctataggtgatctcatattt

SEQ ID NO: 379992 - DNA, 1025 bp, Cannabis indica
cttaaacaaagaaacaatgttaagatattaaaatataacagagaacatcaaaaatagtccccttgttggagttcaaacccaaaattttgctggtaataagcaaaaagatacaggcatacatcaaaaacattctaagaatgactctaaattacatgttttaagcaaaaatatatcattttctaaaatctatataccaaacaatataaataaatgttgtagtttgagctcacaagtttgcaaattactagcttaaacaaatgaacattggtgttcactctttatattatacaacatatctataaactaatactttcttcaccattccttaagaatttaatttacatactgaaagataaatcaacaaatacagagaactcctgaaaggttgtccttgagtactaatgaagcaccttatgtcaaagcataaatatattctcttccttaatagtactcaatacttcatgtatcaaaatacaaacatggcttcctaattctctcatgaaactaagtagcttaaaataatcgaaaccccacattgaatgattataatacacaaagatgttaaaccctcacaaactcattacattcacaatcaatcacgatggcacattgggtgtaaaaatattattaaccaaaattaggagtacactcgaaattctttgcaacggaaaaagaataagaactcaccaatgggcagtaaagaaaaagaaagaaaagaactcaccaatggacaagaacgacaacgacgaggcagttgggagtcgggcagagaggagcgcttgtgctggtgagggatgtaggagcctgggttgggcaggaaattggaacagtcgaaaatggaggagaagaaatcaaatagaaaggttggatgagaaatcagagggaaatcgtaaaattgagaagaaaagctcattttaattttaacctaaaaattgaataaataaaaaataaaaaataaaaaacttaaaaatagaaccaaaaaaaacacaacatttttttaatgacactagtgtattagcacgtgc

SEQ ID NO: 379993 - DNA, 7282 bp, Cannabis indica
ttttttaaatattatatatacatttatcatgatatcatatgtgaattttttattaaaaaaacaagagaaaagtgtaatgatttaaacttgtaatgaatgaccctaatgaagtggatgagttatgtgtgtgacaatagagatggaagaggaagatgaagactgggtggtggagaaagatatgataactgagtttggaaatctttgttatgggaagaatacgatcaaagagaagatgtaatgttaagttcatcaatatagtgtatggaagaatgtgaaagacaaaatctgatgcacaatgaaacaatgaagcatgttgagctgcctcaacgtttgaggtattttctttggaaattgttagaagcactatgcctaatggtattattaataattcaagtagttcaatcaagctggtagatttgttgagagggattgaaactatttaaacatgtagcaagatattaatgactactaagaatgtttagtaaaagtttgttacattttggtatctatataaagaccaactcaagtcatttcacgatagaatgaaagatgaaccaagtcttttgagttgttcaggtgtttaagagagttgagtctttctttgaggtggtgtttgattgaggtaatgaaatggagtgggatagaaatgaaacaatttttattttattcttttgcttgatttttttttaaagtgtcggaatatcatttcaataaaataattttttattattttagtagaatgactattctattttaaaatagaagaaaagttgtagtctcagttaaagttagttaaaactaacttttaactcttctcaggctatagttcgacttggtcttagccagttaaacgaagttagttatgacagtgtcattccaacaatcttggagtaaagtctataaatatagtactgttgatctcattgatcactaattctaattttcttctctaaagtaattgtatagactaataccagagaactcgattctcattgtgagttcctagtgtcatcatgttggtgttctccaagaattcgattaataaagattcaaatcaaaggttgttcattcagagagtagccaattgccagtaattaatcgaacgttttggtgtggcttattttttttgtctcaatgttttatgcttctttggttagttttgatcttggcattgcattaattcattcacgttcttgtgtttttgaggtgacttataaacaccacacaaaagaccaatttattgtaaaagaaaaaattaaataatttttttccatttcacttatatttattcctaagtttttaagaccatgtaacatttgaatttcaattctcaatttcatctgcggaattcagtcaagtgtttttctcatttaagcattaaggtgtcgtttaaaaacttgataaaaaaattattaaatttttttttggtggaaagagcattgcattagaaagaatgaaatgaaaattgtttcctaattctcaagaaatcatattagttgcaagaattgaaaaatatattatttgtagaatttagttttagaatttcgttgggaggactagacactgagatacaagtctagaagcattattaatatattatttgaatacactactttcttctctctatcaatatgggacaaagttttctcatctatactgagtgaacaatagattaaacaatagagaaaatcaagttattagttaaggagaaaatagagtgtggccacacatgcatttccacacctgtggatagtaatagtactcctcttccaaacccattctccttattgacacttcaacaggcatgcacggttcgcattcattacattttgccttacataatttaatcacagatgaccctcttctccccttcccatgactcatttcttttggcatcatgttgttggcctacatgaaaattacaacataaaaattcttcaaccaaaatgaaaaattgagttactctttaggatttagaaaactcactggtgaaggtgatggagaattcgataggtggtatgtgcaaacttggcaagcatgaatgagtaaggtgagaaccaagattagtttccaaggccttgttttttcttggtgcatttttctacattaagagaaaacacaactcaatgtggtgattataccttaataaatacatttgattttttcctcacaaagccaagtaacatccaatttatatctgtgagtgttagtttttgaacttgctcaataacttttcagtgagttctattgaactagtcttggactcttatgcctagttgaagagtagttgaaacttttacataagattttgaaatggtcaagatgctttccacgtgtaaaccagtactgtcatgcatctgagtgtgacagactaatattgctgacatgttaagagtcactagtttaaactcaattaccccatggtctgcataataatataatttttactataaataacaaataccaacatggtacataaatacacaacatataaaagcatctattcatacttttaactcactatctagctagaaaatgttgatgagttcatgaagataaaatgttactctcagttggtaattctatctcagaagctaatctcacattaagatggtgcttaacttggcgttcacttggggagccaacaataagagtgtgttgtccaatgatcaagtttctctcccctttactatccacaaggttaagtactttgcacacatcaactttcacagtcacagactcattctttcctttcataacaaatactctttcaaaggccaccaactgcacatttggtgctccactcaagtccaccgagcttgccggcttccaaaacacaagcacaacatgagaaccatcttttggtcccctgttcattatgccaacaacaaggtcaaatgtagagttctggcaattcaaggttgaaacatcaatagcttgcccgttaagggtttcatgattcagttgagcacatgagttggaagctagacaaagaatgttgttttgattggaagtggattttggtttgattagtacagtggaaggtgcctttataatgtacttggcaaatgttgaatagcttaggccatgaccaaactcataaattgtttttccattgtagaatctgtaagttctaccagggaagttattactggtgttggctctcatgttcatgtctgtcattgatactttatctgcatattcttgagggtaccatgtaaaaggactccttccacctaacaatgtaaacaaagtactcttaattttaacaaataacatgactagtagaatcaatgttattgtaaacaagacataagaatacctgggttgtggtctccaaatatgacttgagctatagcatctcctccagcttgaccaggataacctacccatataatccccccaactttactcaaattcttggcaaatgaaacatcaattggaccagctgacataacaaccagaataactgttccattagtcgaattcgccacttgcttaacaagcatctcttgaaacccgggcaatgtcaggttctctctatctagtccctctgcttcaatggattgatcaagtcccaccaccacaaccgaagcatcggttgcagctgccgccttggctgctgcctcaatgaggctttcattgctacatttgacattaacacaccctggctcatatctcaaatcttgaacatatttctttagcccttccaaggggctagtgtaaccacaaggtatgccagcatagttgcttatcataacagttgtggcatttgcattgggccctataacagccaaactctttgtaccctttcgagacaaaggtagaacaccattgttatccaacaacactattccctgctttgcagcagcaagtgccaaagccttgtggtcatcagtacatacatcagaaggcccaagttttccaaatggcagaaatttgggattcccatcaaaaaatccaagtctcataaggactatgtagttgtaaaccaaagcttgatctactacagattcttccactttacttagattaacagcattggctgtgtattttcctagataatctccacagttcatgtttaaacctgcatgattaagtactatttcatcacatttgaagctcaaaagtgtaatcattaacttggtcactaaatttttagagtacccaattggtcagaaattaatctcagtacctgctttcaaggcaagagcaacagcatcctcaggtgttgaagtgtagtgtatggcattgtaatacacttctactgagtcacaatctgaaacaatatatctgctcaaaagaaagaaataaaagccaaaattaaagatgtgataataaaagagattgcttaattgaattatgtttctctcttcttttaaaattatagtttactgcaacttgagaaaagtgtaataatggtgcttttcaaatcatgaagcttaatataagaagtgtgaggtttaaggaagagagatttattaaattacccatctaggccccactggcctctaatcactcctttgagcaagtctggatcagcacaggtgggaatcccattaaccctgttatatgaacacattacactactcacatgaccttcctccacacaacttttgaatggtggctgatatgtatcctccaaatcctgttttgtcacctgcatcaatattaaaccccaatatagctacattattaaagaaattcttcaaaaaataaaaataaaatgtaagcatagtagttaaattctatgctaatagtagaaagaatcttattgtatgaagtatggttccactttaaaattaattggttattggtagaatttgggatgaaagaggttaagatgaatgggattctatcttaaaattaattggaggagtagtccatgaattttatacatgttctaatctttccacatattagcaatgtgagactctctaacatttcctctcaagatagtggctattttttttgctcaccaatcttgcacgattcgatcacaagcagttctttttggcttaaagtggtttttttagctcactatccccgaatcacaagcggctctttttagtttgttttttttttggactagttattgtatttggatcggttactagttttagtttagatttgataccatgttaaaatttgagatgaaagaagttaagatgaataaaattctatctcaaaactaattagcaattagaaaaatagtctatgaattttatatatgttctaatctttctacacatttttttttatacttccaactaataattgatggttctaagcttatctaataaagttgtagttgtttaccttagcatcaaagtgaaaccgatcaacacctttccaattatcaacatcataagcagtataatgcttgcaacaactagagactttaagcttatcaccttgatcatcactcacttcttgcaaacccttaacataattcaccgcatacttggataccacaagagggtcctctccaggagtctcttgaccgcggccccaccgagggtcgcgaaaaatattcacatttggactccagtaagtcaacccagctaagccagtattgtacatggctcgagcctcggttgacactacttgtcccattttgtaccacaacgactcattaaaagtcgctgcggacaaaatgacagctgggaagctggtggcaccggggatggttccattaaactttgtacccggtcccacgttggagacaccatgaagagcctcggaccaccactcgtaggctggcacgccaagccggcttatgccagcgcttcctgacacgagttgttggactttctcttggagagtgagacgtgaaacgaggtcgtttgctctggcctcgtaggataaggaagtgttgcaaaatggtaaattgttcgtttgtgagaaactttggtcgcatgcatgtttttgagtggtacttgggactatttggatagctattagtgaaaggcaatataaagggactatgagaactattttgttgtgggataacttcatttcttttgggttgataaatgtttagttggtttctgttttggggagaaagattttgtgcttgtatttatagtaagaagtttagatcatgaagtggggtttaaagtacttttttatcttttaagactgtaaagagtaattgcttgtagattcaggaaagagcttgtggaatcattctcttgcttttattaagatcagaatatgatttagagggaataggaaagggcctctgtatataattatgtggatgagccaaaagggcctggtcccattactcttcgtaagggtcaagactcaagagtactcagcttaacctggtcccttcattcgtatcaaaatatggattgttttctttgttgatctctttacaacaaagcaatctttctaaactacgtatatacatgaaataagaatgaacaaatataagaagtaattaaattaatatttgaaccacatattatcactaaaaaccattttttttaaatcactaaaaactatttcaaagacaagtgtatttacttttctaaaaccaacaatataaattcatttatgcatatattagagatggaaatttttgacttgggggaatgcgtacctgtggttaaccataactacccgactggggtaggaaataccagctttggtgggttatggagcgggggtgggaataattttatttacatgaagcgagttcggggtatgatcgagggtgatactatccactccatatttaaccttaatatatagtttttatataattttttaaatatttattcctataaccatattaaatttattggttacgaaattgattattgatcttgtagtatagttcctcaaaataaaaaggtctctaaaaattatttgtttatggaatgtaaaatatcatttggaagggcgttctcagaagtctaactagtccatccagaaggagtctctagggtttgctagtattcctccgaaaaagagttttaaatggctagttattccctcttagaagggagtcccggatagtcgactccagctgttgacgttccttttcgggaagtcccttccgtgtgcataataattaattaagttatataatttttttagtattgaataataatatattgtaacaaaaatgaataaatatattagattattaaatatatatatataataatattttataggagaattaccctatatactattttttattttttttttcaaatatacggtttgggtttctaaagtggtttctccagtagtttctatgtgggtt

SEQ ID NO: 379994 - DNA, 4715 bp, Cannabis indica
agttatatatattatgtagtttttaatatatttattatttagtattttgtattttaaaatcatacatatttatatttagttactttaaatttaattttatattattttaaatttaaattttaattatttgatttatattatataattaagatctgtttagttaaattgataaaattatattgatttaaattttatttaaggtattaaatatagtaaaatttaaaaatatgaaataccgactaaatattatttaaaacaggtactaaatttttgtcataaaaagacaagataatattctctataaattaccacagccacaaagcgatgtatcaattgtttgtataacagatggagctagctttttgcttaatatattataatttgttcatgtgatcaacctatattcaacaagtaaatagatctatcgaagcaaatggtatgacacaatacacacacatttatataataattaatctatgtgtctcaacaaataataatatattatatatatgtgtaaatatatatatatatacaggggtcgacgtcgtcagaattagaaggagtgatttcgattggagcatgggggagtcgttcaggcggcgatccatggagctacaaacctaacactgcctctccaataagagagataatattcttccatgaaggtggtaatatcaagtccatttcgttcaaacaccaagatagttttatctctgggggattcggtggcagagatcctaatgacaggggtactcagagaccagggtaatatattttcgatacatatatagttgttatatggctattggtgtacgtagcagtgttactaataataacaattaatgttgtttactaaatatatatatagattactttgcgaacgccgtcagagtatttgaaatccataagtggaacgtatggtgtgtacaatggggtagctgatgttatactttcactatcttttcacacaaatctgagtacatatgtaccttttggtcgtccctctaatactggcacgcctttcaccatccccatggaagacagtgtcgtagttggatttcatggacgagctggctattaccttgatgctattggtatctatgtaaaaccagtaagtatatatagtcagctatatttgtatattattattggattcgggtacttattattaattaattgtagttaaatccaagaggaagcatttcacttgggacatggggtggtccgaagggagacccttttggtttcatggtggggactactagttggattaaacagataattattcgacacgattccaatatcaaggctctctctttcaaggatgagaatgaccacaactatggaatttttggtggcaagaatcctaatgatcttggtagagaagccatagtaagtaattaatactcctttatatatatatattaactgaattattgactatatattagttggtagattaaggtgaatgaggttttattttaaaattaattggtaatggacaactcgattataagagtagctctgttttggttcaatatttctcatcaaaagttttttttttaactttggctcttagaacaattttttttttatatttttttttgaattggatagtcctacgtactcattagtaatggaaaataaagtattttattcatcttctatattaacaatgtgagactctttaatttgcagattgagtttgatgggagatctgagttcttaacatctataagtgggacatatggaagttatgtaaactacgcgtcggtgatcacgtcattattattcgaaacaaacctgaatacatatgggccattcggaagagaaataggcactactttctcccttccaattatgcgaggtgccgtcgttgttggatttcatggaaaatcaaacatttacattgattcaattggcatctatgtcagaccggtccgtaatttttttatttttttttattttttgccctaattaatatataatagtcatcactaataataatttatacacgttttttctaatgcttaattttattaaatgtttaatatagagaacggtcggctgatcaatacataaaatggagtggcggctgaggaaatattcaacctgcgtctatcacataatgtttccttggatttggatatatccttgttttacatcatgcttaattactaccatgcattttggccatgcagtcttgatcttgatgaggactctttctgtttaagcttgtcacaataatatgtaatgttttgttattatatatttagtaaattttctctcttcatgatccatttaaaattttattgaaagataaaaccaaaactttcttaccataaacagctaaactttaacttcatttacaattcaagagactcaggatccctagaggtccaggcaggctatgcccgtgtttaggacctaaaatttttatgtagtaaatacttattcactacacaaaaaaaaattcttacgcccattattaatcaaagttggccctgaatcacgaacaagtttaacaaaatatttataatcaatttaacaagttgtatttcacttatggacacctgagaacaaatggagctttgccaactgagtttctcgaagtattcacttttgattacagtggtatttcaacagagtttcactgtaacaaatatgagtattaggggccacaaaagtcacccctaaaatcataaaatatcgcctctaaaaagttgcctctaataattcgcgcctaaaaatactattagaggtgacaaaaaagttacctcaaattaagggcaacatttgtcgcccctaatactcctaaaagtcgcgcctaaaaagatgtgtcaatattctatttttgaccttcacacactgactccttaaatggatacaaatactatattcattttgttgatatatactctagattcacttagatatacatgttaaagaataaatttgaggctttaaaggtctttcttaactttaattgtgaggctgagttacaattaggattcaaattgaaatgtctttaagagattggggaggagaatataggtcattcattagtaacttacaagaaatgggaataactcatatacacccttgtctaactacttatgagcagaatggcattgctgaaagaaagcatatacacattgttgaaaatggtcatgctttacttgcttaagcacacttaccctttaaattttgggacgaggcctttagaacttctgtctaccttcataatagacttccaacactagtattaggaaacaaatttcctctagaaattctgtttaacatcaagcctgactatagctggttgaaaacctttgactgcacttgttatcctaacataagaccctacaataagtacaagctccaatcagatccacaccctgcacttttttagggtatagccttaatcacaaaggctacaagtgccttagttcaaatggtagactctacatccctagagatgttatctatgatgagcatcaattttcctatgcttaatcaaatagttcaaacatttctaaaaaatgtcacgtgcttgaaacattttcctcagctcacattcccatgttctcatattctcttgtaccaataaatccaactacatatggtccaaatgaaccacaagcagatccctcatgttcaacttctcatactaacagaactgttgagttgcagcagaatctctctgaacaggttgttggcagtatgcagcctgttaacacaacatttgtaactactgatgggcaaacaacgatattcaagttcttactgttaacatagcactttcaccagtagctggttaaacagaggttcaagcctccactacttcgtctgaataagctaaacatagtcatgcacatcctaatctcactgatactgcagacaatcaacaaaccaaacacaaaatgcaaactcagtctaagtttggtatctataaacctaaaacattcattgtttccgaactcgccgagtcaattcagcaagccttgttgtatggtcattggaacaattcaatgttagaagagatgtttgctctaaagaaaaacaagatttggactgttattagaattcctgcagggagagcggtaatagggtgcaagtgggtatataaaatcaaggaaaatactgatggttcagttaataagttcaaggcaaggctggttgccaagggctttcaccaacaacctgggtttgatttcactgagactttcagtctagtggtcaaaccagtcgcaatgagagttgtgtttactcttgctctaagcaaaggttggtgtgttagacaactggatgtaaataatacttttttcaatggtgatctccaagaggaagtctacatgctccaaactcctaattttgaagatcctaccactcctcatctagttttcaaacttcacaagtctttatggtctgaagcaagcaccaagtttgactaagtttgactttctctcatctaaggcagatcactccttgtttattcaatatatatcacacttaattatttttattttggtgtatgttgatgacattttgatcattggtaatgatcaagctatcattgcctctcttatatcaaagctgaatcaagagttctctcttaaagatttgggtatgttgaactacttcccaggcttagaatttttgtacactgatcaagggatgcttctcactcaaactaagtacatcaaggatcttct

SEQ ID NO: 379995 - DNA, 4350 bp, Cannabis indica
ctctctctctctctctctctctctctctctctctctctctctctctctctctctctctctctctctctctctctctctctctctctgcagcttaacaacaaatatctggtcgtggttagggttgtcgattacagtcgggatatagggaaaacttgggacggagaaaaatcacaatcggagcagggtgtggcgattaggggctttcgagttttttttttttttttgcttaattggttttcttggttttgttctgatgaagagacagaattgaaagatggattttgcttcgcagtggggaacttgtaaaagctatggaggtaactaaagtttttggggtaaattttgagattgatgaatgagacaaaggagaaaatggattgtgagaataatgatgatggtgttgttgttgatgatgatgattgttatcttattttttgcactatgacgtggcaattagttggatgacacgtgtcttatattttcccatatgggaagaaggttacactcctagcagctcccaaagattggtagaaagatccatatcaaccgtacataacaggatgtccgatttgagtcataaggagacatccgaccaaagctcgatcgtgtgattaactcgcatgcatcaaataggatatgtgagttggtaacttcaaagatgggcaacgttgcttccaagaacgaagataatccctacattcgtgggattagttcaaagaataagagcaacaagcctaggtttcccattctttgtattgtaattatgaaagtaaattagtttcctattttatttagtataaattaagagaaattattcttcatgtaataactccctataaatagtgatttaatctcactattcaggaacacaaaatttcagaaagaacactcaagagagaaagaacaatctaagagaaatttactcagagatctattgtaagacctagtgagagagaatacttagttctttgtctttcaagtcaatacaaccaaaagagaagtaggctataatcattctcacggggctaaacctctagaaattttgttattctctttgtttattgtttttactttctattatttattttatctaatcgctttattttgactcactgtcgttgactagaagcaaagtcaatattttagtgttttcattgagagcaaaaacataagcttttgtcttaaagtcttgacaggttaacatgatagttgtaactcgtgagagaagtcagactgatccaattgactcaatggtgacaaatctaaatgtgcagactcctaaaaatgcaagagatccaccacacaacactatccttagatgctattaagacaacactagtctatgaagatggccaaaagccctgatgtcatcgcatcaccgctacatgaaatagcgaataactatggaaaccaaaaaaactcaataggtatttttcacctttataaatccaaatttattcaaattcaatgaatattcttatatataaaattttgatgttacattttttcaatctatgttgagaattatatatggctaaatattatactatttattttatgtgggataatgtccataatattccccctcaagatggtgactattttttttgctcaccaatcttgaaccgtatcagagtgggcatggtcactatttgtataggtgcgaatcagataagatcacttgcccgcaagggatatgactctaataccatattaaaaatcatggggttccatctcaaaattaattggtgatgagtggagtagcacatattcttatatataattcaatactctacaatttattccatgtaggacaatgtctacaataatttatttttttaattataagtaaaatagtgtagattttaatgtacattagtgctacaatccttattgtaattaggtaactacctgccattttgtatctcattcttatttttattatcaacactatattcagaattatattattctgtaaatttataaaaaaaaaaaaaaaaatcgtattataaataggaaagaagaaaaacaatttgtaaatcttcaatagattatggggtttttagacaatgtattgaaatttctaatttttttacttttttgctgtggggcggaatttttttgaaaaataatattgtgtaagttttatactgtgtgctgtgttaagttttccatgttgtttcacggttgtttttagttgttctattgttattttaattgttctgttttagttgtttacgattgttttataaaagataatatttttagtaaaaaatttcatgtggcagtaaaattgtaaacttttgctcaaaatttaatatttttgtaaaaattccatagattattgggtatatatctctgggtgggctctacaacattgatccaacttccaagcccagcccacttaacatggatccgtttccaactcatcacatccaaattcaaaccttatccaattttaggaaaccaatagaaaattgccacttaagcaccaagtatctgagtgtatccaaatctaccaacaccaagccacaaattgttcatgtggctgctgtgaaagttttgcttactcactacttttataattcatttcatcattttcactaaattatatgctttctttttcttccaagaataaaactaaaaattaggaaatttgtcctttaattttggctaaaaaaaatggcaaccacagttgctacttctctccctcaattcaatgggctcagaccccagatctcaactactcctgtcagaactctggttagtgcttctctcaagtttttaccatatatataaatatatgagtaggtgttgatttgaaaaggtttatacaattttcaaaatggttcttgaagatggtagtttttggtcaaaaaggaaaaataaaatctttttattttatttttgtaattaaataatttataatgctttgattattagcataaatatgatcattttgtaattagtattatttttacttgtgcaggctgcagttcagccaatgaaacgtaagggcaagggtgctttgggtgctcgatgtgatttcattggttctccaacaaatttggtaaaaattcatatataaaatgttatattatatttagtccaaacataatttgaatatgttaagtaaatttaatgtaaattatgtaattttttcacacttggtatttgtgtgattgtacagataatggtgaccagcacaactctaatgttgtttgctggtaggttcgggctagctccatcggctaaccgaaaggcgacagctgggttgaagctcgagacaagggactccggtctgcagaccggtgacccggccggttttacccttgctgacactttggcttgtggtactgttggccacattattggtgttggggttgttcttggcctcaaaaacattggttccctgtaaaaaaattaaaataatgtgcaattttatgtacttgagttgtaaaaactgtttttttatgtctagttcaatgcttttttgttacctacttttttcttctaaagtaacttgattacttttaatccatttttccaagagatggaaccaaaatcagaaacatgcatactatttagaaaatataaataatggaatcataaagagaacaaaaaaaatgtatcaagcaatatttggaagaatatggtacttactgactcaaaagttcaaaataatatgaagtggattaaattagggtattttcaaaaagaattaaaataaattaatatactaaaagatattctcacttattggatttaacattttttttaatttaaaggatattagaattattacttctcattacgtcaaaaaacagaaatattacttctgtttcaattttgacgaatactttcacaaaattatgaaagtgtaggttagggcctcgggagctcacttttgtgcgaatgagtgaggacttacacgtgtgctcgttgttcgtctgactgatttgaattgaactgactgatgtggtgtgatactttacttttataaaaatttatttaataaaatattatttttttatcttattttatctatttgaagatgtgtttaatataaaattaaatacttagtcgtattggttatgagacacgtttagtaacaactctttcatgattcataaaacgatcttcattcctttatattttttcaattcattcttctatataatgtgattgaattgatgggaggaatatatctttttcatatatatataaaaaaaaaaagcacaattttactataaaaatctatttgtgatatcataatttttagggtgtattcgataattctctgtagtgcaacaagatttctgtaatgaccgctttagtaatttggattag

SEQ ID NO: 379996 - DNA, 1379 bp, Cannabis indica
tatttttgccaactctaaaatctcgactataaccgacattcccaatgtctaaatatacttccccgcaatactaaaaatactaagttgtgattctaattgcgaaacaccgcgttccaatgttgccgagcacaaaacatgcaaaattatgaaatttctatatatgacatataagatgcattctgaattcaaataaatcatcataaattaataattcaaaattaataatcaagttttataatttaaaccctaattatctgttaatttccaaattaaagctaagcggtctttacacaccaaatactctcctttccattcaagctaatctgcaacaaatattgcttatgccaattcagccgtgccataaacgcttccttggtcttccttattactcagtcagggacaaaaagaatttctttggggaaataaaagaaaaactttggaatcacctttcagcttggcaagagcaattgttctcagtcagtggcaaggaagttcttcttaaagctatcgcccaatctatccctacttatgcgatgagtttttttcgtcgctctaagtctcttataaatcagattgaagttatgatgaacaagtttttgtggggttctaactcttcgggcttaggtattaaatggaaaacttggtctgctctatgccattctaaagtcgaaggaggtttgggtttcaagagttttatacactttaatcaggctttattagccaagcaagcttggcatattttctctaatcctactttcttaatgagttgaatactcaagcaaagatatttcaagaatagttccttcttcgatgctggtcctagctcctatccgtctctaacgtggcaaggaattgtttgggggaatgagctcctcactaaggggttaagatggcaagtttttgatggtcatagcattttatgtggatcagattcgtggcttctaggcttctcacattttaagccattaatgtacaagggtaatgataataatatgagggtctctagtttgattttggatgaacgtcaatggaaccttgccttgctgcagagtctattgtctcgactcagacgttcaaaaaattcaaaacatccctttgacattaactccaacccgtgaccaacagatctggcattactaatcccatggcatatactctgttaaaactggctaccacttagctacccatttagaggaacaacaaccatcggttagtggattgcaaaattaacaatggtggaagaagttttgtgcgctgaatatcccatctaaatcagaatttttcttttgaaggcaattcatgactgcttgccagtagcagctattctacatacaagacacattgcggattcccctatttgttatttatgccaccgtgag

SEQ ID NO: 379997 - DNA, 2249 bp, Cannabis indica
aatattagataaacaaaagtgcatgagctggtgaccacatcccaaaagggagggagggacacataaatataaccgtggagatgagaaatatattttttatacatttcctcccaaattagtgggacccaaattttcacactttgaaataaaggaaaaaggaaagagacaattagaccgagtaggacaaaaacaaaagaaaaatattaactttaatgaaaaaagagtaattaagcttttaattaagacattaattattatagaaccccatggggccatgatcgtgaagcctgatcactgatcactctacctataattggttagttgtaatagcctattgtctgcggctgcatgcttgatgtggcatttaacagcaactttgaatggtcaaatctcctaattaatggatttttttttttttgcaagaaatctaattaatggattgaaaaagcaaaaacaatagattcctatataaatatttaaatcgaacggcatcaaagcttgataacaatttttggatttttattactcctccccataaatattgctttcgcaaataccttatagagaaattataaaaataaataaataaataaaatctaatattatagcaatttacttgagatttgagaaagagataaggataaggacatatgatcatatgattgatgattgagaatccgccgaacttaaaagttaaaaggaggtagctaaatcggacttttgaatttataaacacatattggtgaaatctttccaatactatatactagcatgaattgaaagtaacattttaacattttttgttcggtcaaaaaagctaacaaaagtaacagaatcattataattgcctcaaagctagagagtaatcgtacagtttactgatatgtcatgctcatagttaattcaagattatggaccatggtcaagaatcaagatagaatctttaattaatgagtagttgaaaattttgacaattttgatagattattactatagcgcaacggaagtataaaatttgtatgtgtttcagatttctagctaaacacgaaaaattcatgtatagtgatcttgatttagtagcataacttgtgtaggaaaaatatggtctttttctgtttattttttccatatttcaacacatatattaccacattattattgttaataattgagagatatttgttaatattcaactatattattggtgtgatattgttggtccaggtgcatttaaccaaatcaattatgctattcacttggtgaacttgaagcagagactcataacggactagtatatacataaaaaatcatccattaattagatgaggcagaaaaataaggtggcatttttcacaagtaattaattagacgtacttgggtgaaagaatagtgtggaataatagaagctatatataattagagagactcagtttatcattgagaattacgccaaccagacgaccggtggtcaattataatgtagattaggcacaactaaaagtagaggggttgaaaaatcactattgtattgttgatttacatttggaagccgtcgaggaatgagaactaaaacctaggttttccaacttgagcttatcaaataatatagttgttttcccactttactttatttgcattaatatattcaattacttactattccattttgtagaatccaaaatgtaggttaccatctacctagctattcaatatatatatatgtaataatgtaatatcataaagatttattttacttttctctacccatacatttggaagccatgcatgaattatattacaaggatttcgattataattttttaaaaaaactattaaaacaaatattttttttttttaagaaaaaaattacggcagtgttcattatagttataacattgtaaaaatttttaaaaattaaataattttaaattatttacattgtcgaaaataaacttgtacatattaacacgagtagtatattagaatatcaggaactctataatctattatcgacaaacaattcaaaaaaatttaaaaatttagtttaatattgtaactataatgaacattgccatgaaaataaaaaataatttcgacatgtattttcaaacgcagaggttaagaaagaggttgacaagaacactcatactaccaaaaacaactacctttactgacaatttttttgttagataaatataatacactacaacattcaggagcaatagcggcgggcccctcggccgctattg

SEQ ID NO: 379998 - DNA, 2163 bp, Cannabis indica
taaaaggtcacattatcagatacagttatagtctgttagactcatatgccacgtcgtcacgatttgatcaaactgacaacaaatcaaatcacgacaccttttattctaaaaccgtaatttgggtttccacgtcaaatcaaaacccttgattttcgtcaaaactacgaaattaccccatgagagtagaagactcatccttaaaaaagaacactaaagtaaataaacttaaaaccaagggcattaatgtaactttctgttaagcgcagcccaacttatctcgtcattcatccaatcatcatctgtgagtcacagacaggtgaaactaactaacttaaagtcggttttaaaaaggattatcacgtgagttgcacgattcctttttttctgtacttggagtaggagaccgacctaatgacctaggctatagccctctataaatagaagggtttcttatttgttttttaagcatagccaaaattgattaacaattagtttgtgtttagttctcccaaaattttcattcattttctttttgattttctcgagaaagtaagtttggttaaaatgggcacggtgattcttcatccccacgattgcctcggtgcgcggtttcgtggcgaatctttgacgacgacgaccgattcgcagttcagatccaatccaaaccctaaccctagtcgtaccagttttcagtctcggcgccgtaagcggagtcctccgtcttctccccgcgatgacgattgtaatcggtcgaaagatgtagccatggtggaaaaatctcctgcgattaatttggttaatggtcaagtcacgatattgaagcgaggcgactcgttgagtttgattgcggggaagaacgatcggatccatggtgctgttgtctccgatgagaagcgaaaatctaaggttgtctccgttgggaaacgaaaacctagagttgtgaaggttgttgaagaagcggatttgggccttggatcgacgaataggcttggtcctgatccagaaatgatgatgaagcaggttagagtatccaatcacaaattaatggatcctttttacgctggatcgtgtgctgcatctacatctccaccacctagctctctgccgcttcctggatttataggaaataaagaagtggcgaccggcgatttgcgaaggttgttggatctcgatttcgatattatctagaagaaccagtagtagaaggcgaccttgaaggatttggttcgttcgctcaatctgtctctgtttcttcctttattttttcaagaggaaggttactgagtttaatcattgacgataatcaatcatcttcttccgctggagtaacgttttctcaattgctgtagtgcagacttgcaagattcatggggttttacagttgtttctaacgagtcaatagactcagtactgcatttcttttactgcttttacagatttcatttctacagagtaacacatagaaattgttcactgatcagtacatacagtaagtactgtgtttgtaattgtatcactgtagatttcttatacggatcaatacacacaataaatactgtaaatatttcttttacggatcaatacacactatcttctgttcttatgtatggaataaataatactgtagattctgtttccttttcaatttctgtgttttttatatctgcatatggggtttgattgttttgaagaccaaaagggtttatgctttcaatggtttgaattgtgttgaattaatgtgattttgattatggaaaattgtgtattgatgtgaacgaaacaaactttatttgggtttcttattggcttccattcatgccagttttcattatccatatatatacccttgatttggtgttgattcaagttcagtgggaaggacaatcttctaattaataaaatatagggtaaatgtcatgaattttgctaaagcttttatttgttagtacaaaaaaatacaatatagtttgagctattgagttgagtaggtgaggtccaatttggaaagttatttagggcacttttaagttgaagtttgattaatttatataacattttttaaggtgccgtttggtaacatttttatttttcaattttttaatcacaaaaaatgaaagtaaaattttaaaaattttgcttttgaaaaacaaaaatgcgttctgt

SEQ ID NO: 379999 - DNA, 1039 bp, Cannabis indica
ctgtgagatcgaatcgcccagcgagccacattgtgggctgcacagttgagctttcgagggatccaactagcctcccaaaagctcaagtcgactgacgatgccgtgaaatatctgcaccaggggctgaatgttgtgcttaaggtcctctatctttgtatgatctgttgtaattgcctccaccgcacctactgagtcgcactggaagatgacatttttgagatttagagaaatagccatttccgcgccccagcataaggatacaatttctccggccagcggatcattgtaatggaaacgtttggtgaatcattgtaattgaagtcggtatcggatggtctatttacctccttgtggaaccagttgatccactcatcccatctcgtagctataactataaaggttcggatttgccaactacacccaaaccatacagctctggtgaaatcacattcccagaagatatgaaatgtgcattccacttacagagaacagaatgggcacgttggatcatttaattggaggaaattcatgagtttccctcttgtcagtaggcagtcagctaggatcctccaccaaagcattttgaggcgattatgcattttagctccccaaatgcgtctccacttcacattatcattcacatcatctttagacttataattgttctgtatgtcgatctaatggtgaacttcccattatgttctggaatccaaagctaggaatcattcgtcggatgattaggaagtgcaatgttcagaatgcgttttgcatcctctggatggaaccatcttctcacccgagcctcattccacataccattatcaatgaacttacttaccaagcttattccttccgtggcatcaagtcttggttgtggttgtaatatgggtcctgaaacccacggatggaaccaaatagaagtggactcaccatttcctattttgcggcataggcctctatgcatatactgtctcgtgaggagcatagccttccacattcgaattttatttgaaaaatagattaaagttgaaaattattt

SEQ ID NO: 380000 - DNA, 1024 bp, Cannabis indica
taatttgtgctttgtgtcgccgtaatagtgaaacagtaccacatgctctgtttttctgtcaccggcctaagcgtgtttggaaggcctcttttctctcttggtaactatcttacggggcaaatgaatctcaaagaactgttgttacatgtttctgctacatggacaaatttgcaattagaacagtttgcaacaattctttggaatatttagagtgagagaaataaagaaaagcatggtaaaaaaccaaaaccacataatgtgctactatactttgctttgtcttttcttgatgatttttaatcacctgctaggttaagaactcggttattgctgttccatcgtcctctcttaatgctaccaatacagatgccccttggatgaatactgatgtagtcgttaacaagatgactcaaattgaatactgatgctcccattaacaagatgactcaatcttccagttttggtgcgattcttcataacacttatggtgatataattgctgccatatctaagcctttccctggtacctttcgctcaaaagtgatggaagttatgactttaatatatagtctccaatggcttaaagatcttcatttgcttgtttactatatatagagacagattctcttttagtggttaaaggattacagttctctaaagtctctgtttcttattttcattgtctgttaacaaatatctctctctagactctaacttttctggaatgcagatttcacatttgtttaaatctattaatactgctgttcatttgctagttaaatatactctttcagtggattctaattgtacttgattgaagaaattgactcctcctttaaatgcttattgtattacgaaagtttgatttaatataatatgcattttcatttctaaaaaaaaattattgggtgattctacaatgcaccacttaaaagggatgtactgatgcacccttgacttgtttcggcatccagaagaattttttagtctatttttttttcatatttatgtacgttataactat

SEQ ID NO: 380001 - DNA, 5496 bp, Cannabis indica
atagatccactctcctaaaaaaatttccacgacaccaccttaaactcagatctgggcatattttctataacaaaaaaataaaaaatacacatttaacatcaataaaacctgcaaaaaaaatctaatagaggatgagatgaacagagaaggagggagtaagatcaggagcgacagcgaagttcatgagagagagagagaggggagcagtcgggggttttgatgggttgttgccgtcggagttacggtgggctagggttgggatctttgggtagttggggctgggacaagagagaatggttcaaagtctctatctcgcgacaattgcgagagcgtttttagggattcgccaaattgcgacgatcgccggagatagcacctggtttggcagatggaggagagagagaaagagagagggaggagacaacttggtttggctgtagatggcaccactcgactggattttcattgatagtagaggggaagagagagaatgtgatagattagatagaaccaaacttataattaattacatacatagacctggggaaatatattattgaaaacataaagtggaatcggtttggaggaagaaactcttatttatttaatttttttttttttgaaaacaataaatgattttaaattatttttttattattttaaattagaatataataatttcaattaaaagagaggttggactagttatatattgatatgtgtcactttaataatcatagtcagcatttaacaaaatagtagtaacggaaatggatagaaacttacatttggtatttaatctgccgaaaaaaatatggtatttaagtgtataaaattgaaaaatacgatgtttatgatgcaaatttccaaaaaaaaaaaatatatgtataaaaagaagttatttatttaattaaaatctgtgtccctttcaaaaaaaaaaattaattaaaatgtgtgagaggtaatgtcaagtgttggagtgcttggtactattggtcgcatttcttattaagaaagcattttgagaagtacagcagtacttgttgtataataaatagtgtacttttacaacacaaaaaaggacgtacgtagttataatgaacagtaacgaatctatgacaaccaacccacaaatgcgtctaccttcatctgtatcgttacatatatatatatatatcccatagttctgaactgatcgaactaaggactggaaaatggcccctacatcagaagtattatttcaatctgccaacgatctctagctaccttctcttagttttttttttttaggtgattctaatcagagtgctgaagactaaaaaataccaaagtaatcaaacttccccccgtttgacacgtacgggttttttctttttatcttttaaggtgtttaacacgttttgctgatatatattgaaagaattttatgttggccaaataattgaataacaaaatagaatttaccaaaatattcaattttacgttttgtttttgtatcatgccaaaaataaagtgatttagtgagtataatagggaaatgtatgtaccacacataagttacacataatattgcatctattatgaatagttcaaatatataattcttctatacatatccgattgcatggcacattttccataaaagtgaagatggaatacttctatcaccaaaattgcaaccagtcatggaaaatccaaaacctagtagtactagaacataaaaagcacattaattattccaacaacatgataagataaaaagaacaaacccttaagagctgttctcttacaaattataactacatcaccaatcatcataataaaactagtaaattataaaaacatcaaatgcgctgatattttcacttaataagacactactcttaataataagagattaacggccgtgcgaggaaaaagaaaactaatactatattaattttctctttcttattatatatgccattattggcagggcatatagttaattaattgcttcttcttgatctagcagcagtttctctttgtgcattgaagtatacaatagccacggggagacccagattgttgtcttgagaaaatgtccttgtgttaaaacagtctctcaaagctggtgctctcacagtttgtcttcctctttgcttgaataagatgaatacaaacctatgaatccccaccaccggttttggagcttcataactcacaatttcttttcctgttttcgttttgtatatatatatacacgtacaaagctccattaagatatttattttggtaatataatagtcttatatttatctaaaagatgactaccaaaaaaaaaacataatggttcattgtgtcacacacacacatatatatacatatagatatgtatagtgaggacatgaaatactcaccaaatgatacattagttgtacctggaatgtctgtgactatcctggaaagaatatacgtattataattataatatccaatattaatggaaaggatcacatatatatatatacaagaagaggttacaaaaaaaaaatagtaaaaatatataatgagtattatttctttaaactaatatatattacaaaccagtgaaggtgttcttttaagtagggatcactagggcttggagcatctggatctaccataatcttcaagaaataagtggaaaaaagggtaaaataaatatatgttgcttctagagacagtatataaaagttagagaatatatctatctctctctctctctctatatatatatatgatattttaatgattaaacttacgagtgtgtaagaagttctcatatcttctccaccaatatctactcgaggtttagacaaaatattagaaggcatgaactcgtagccattacaaacttgcttatcagggttgttataaatgacagtcatttttacactaggattgaaattgtcaaccacatctcctattactcttgccacacttaaagtttgtattgctgaccttgacattattatatttatataaatatataataatatagatcagatatatgataaggatgagaggaaagagctaacaatatatgtagttataaaatttaactcaattgtagtagtagtagtagagatcgagttaggtgatcaatgggtatttataagccagctagggcaagttggaattttaataagcatatagaattatttgaatagcgtagtagtggctgctcttgggaaatgccaggtttaatatttgctttattcagtgtaaaaagttaaaataccaaaggaatttgaaaacatcacttatatgtctataaatattttgaacataataaccattcctagttcgacacgtatcgttgtgtctttatgaacaatttgacacgtttgttgatgttgaaagaagttggtctgccaattaattaattaaaaactaagattattaccaaaaatacatttcccagttttgttttcgtatcagaacagaaggaaagtgattttgtttgttttatgatttgaaaaagagtatatattctttcctctattgagagtatagcatataattaataaggcaaatccacttgcattgcaaatgacacgtctttccaagcttttgcttaaatcactagtcaaaggattacgtgtcgattttttgatcgttgaaaccacatagcatagctcagctattctattagactttagccataccgtttctgttgcttttcatccggttttatgtatattggtcggtaacgtagttacaaaatgttgtaaatgttatcaagatctgtcgagcaagagtacttacaattaccactcaaaccacacaaactatcaattatattatatatagggataccattttttttcggtgttgggtgatctactttcacgaaatgtattttgtggtatattagataactcattaaatgagtgtcagggttactattttttaaccctaattacccctagatcaatctcagctctcagatcaaataattccctcatctaacggctgccgtacatcacgaaagatattccgtaaaaatacaatcaccgaacaaaatcatatccctatatatatatatataaattttagtacgacaactacaatacacaaacaagataagtcttaactcaaacatagtttggtaattgaattagtcatatgtgtattgaaatctgaaaaaatatatataaataaaaagaaggaacatatgcaaatacaagggaagtccagcagagacagttatacacaattctttattacaaaatacaaatgtaaatttgtacaagttaccacccagccattttctaaaattctttcggtacactcgaggaaatatctttaggtttatcaaattaacgttaaacacccaaatttaaaagatgagaatgtgaaaagcattaatatgatgcacctttttaatgttgatacaaactcttaactcttcttattttgataattaaaaaaatatattcgattattatttgtcactaataatttgttaattttgtagtaaaaattaaagagaattaagcattttaaggaaaaattgacttcaagggcaaaattataattttacaaaaaactcgaaaaatgactcgtagtagactccaagacttaagaaactcaagacaaaactccatgaaagttttttttacattttcttagtcttgtacaatgatttgcaagtccacacttaaaatttctaagtataaaatttaactcactaacttgtgcgacaagttatttcacaaaaataatatttaattttcttaattaacttttaagatcacatatcattaaactaagataattcaattagaatttttttaaataagataaacaagctaggaattataagtgttaaagtgccgacaaattgacattttgtctctattaattttcggttaatcgtttaccaaatggtaaactgtttctcccaaaaactagattgccgtcgaggaaatagtgaactgaaattccttgtagtgtctcgattttcgtgtttaatagctataaacaactactttttattcccacactatataaactcgtttgtcactcaaaaaaaaaaaaattggctgagtatttattccatataccaaaaattttcaagtgaatttaagagctcccaaaatattaactcattcaaacacttttcacacatttcgagcgaaaatttgtatttatttcttctaagtgtgcttgttaatcactctaggttcttccatgtattattacatagtttctatagtgagtttgcttgtatcacaaacacatttccttattgtgttgaggtgaggttggcactagtattgtaaacaactcgattaaagtgagattgacactacaataatctgagattaagattgatagtccttcgcggtgtaaaattattgtaagagctttagaaacacaatgatgaaaaattctaggttgtaatggttagtcaagcctattaactatgctcgatagtggaactcaaagctaggtccatagctttgaaga

SEQ ID NO: 380002 - DNA, 4196 bp, Cannabis indica
ttttttaaatttgaacttttctaaaatgagatatgcacacccaaattgaataattttcaccgcacgttttggcacaaaaattgaaacaaacacatagtcataaggtattgtgagcacaatgaactaactactacaaatatgccatatacaccagcagcccatacttgacaaatgagataagagatagaaacttagagatactcaaaagctttaggaaaaaataggacaactaacatctgttcagtaacaggaatagagccactgagcatgaaaaaaaatgcaaaacatgagcaacaggtcatttcagcacaccaaactccaatgacacacaaagcagcacaagaccttgaatctccataagtgtgtgtaaagtatcctcatgtggtccaggaagagaagagatcttctagaccactccctcaattaaacaattttttttatatatatgttttttttagatgccttttcttttactaagaaccactctggctttttctatattacccagacatggctttcagtctcttctagagatgtagccgtcctctttagactacaagaactaatatagaaggagcaaattacttcatagtaaataggtttaagagagctcttcccattgcatctggaagaggtagccttttaatctggagaagattcaagatcagtatcatacaaaataactctcaagagacggtgatataaatgacaaaacaatgctcatgtcaggacttgaagtacaagaatactcagagacaaaatatttgaccagatgttactgggaacagtttagatggtacagagacctatacatgttctttttttgatcaagaaggaaaaacttcattaatcaactcaacaagtacaaacaccaataaaatacaaaataccaaaccactaactacaaacaaggagaagcagacccatccacacaaaaaactaactactttgtaattttagcaaataaattttctcaagagtagtgagttttctagtgtttacaatttgtaacctgtacttaacagtgctctttacatcattaacaactccacaaatggattttgagtaaccattaaagatgcatctattcctattgagtcagatattgtataccacagctgccaaaatggtggtgttgatcctgtgcaaagagccttgccctctcaaagctagctagttataccagccagcaaagtcaacaggccatcctctatatcctatccaattgaacaccatatcaagaaccctgctcgacaacacagaagagaaaaaaatgtgctcatgagattcaatctcagcttcacacatcggacacaaagttgaactcagatcaatttgaaaccgagctaacttgtcccttgtgagaagatgggagttaaccacttgccaaagaataaatctttattttggaacaatggttgaactccagataactttgtaatagttgacctagttttgggctagactgttattatataactagttagtcttgaaccagtccttagtgcctgctttaatgatatcagatttctcaaacttctccctcaaatgacataatttgtgccaataccaactagtgtctgatttgagatcataatcccaaaaactccgcgatttcagatagatattatctatccatttaacccacagaaggtcctgcttcgtagaatttgcccaagcatacttggccagaattgattggttccatttgacaatattttaaaacctaggccaccataagcccttggcagacaaactttctcccaggatgcatcatggatcttacttctattaccattcattccccaaagaaagcctcgacaaagattttcaacctcctttgtaatactatgaggaagaacaaagatactcatccagtaattcctaaggccaagtaagacagaatgaattagttgagccttaccagcgaaagagagatgtctgctcgaccaagtgtgtaatctctatttgattttatccacaatgatccacaatcctcagcttccattttgtcggtctcagaggaactcccaaatatttaagagggaaggtaccctctgttagatgaaaaccatcaatgatagcttgtttctccacggacttaatgcctccttagtaaatctaggatttactcaagttgatgtggaggtcggagatagatctaaactcattaagcacctgcttaagcaccataattgagcttttggatcctttcctaaacattattagatcatcagaaaaacagagatttataatctttaggcacttgcataaaggatgatacctgtagtttgaatgagatgttgcctgatggaggcttctcgtgaggtactccattataagaacaaaaagaaggggggagatcggatctccctatctcaaacatttttcccctttgaagccaccttgcactcttccattcataactaaggagtaagaagtagctctaagacatcccattatccactttacaaacttttgaggtatgttaaaagcaacaagtaagtcctccatgaattcccaactcactgtgtcataggccttgctaatatcaattttgatagtacacctaggagaaacatttttcctcttgtaatttttcagaagatcctgaagaatcatgacattatgagctatagacatgccttggatgaaagcttcttggttttgattaatcaaaagcggcaacacctttgcaagtctagaacacagcagctttgagatgcatttatacacagtagtacagtaggcaattggtctatagtccacgacactagttgggttctgatgtttggggatgagagaaatcaaggttgaatggagctccataggaatagaacctatagcaaaaaaaatcattcacagcagtacaaaactcggctcccaaatcagcccagaagtacttgaaaaaaccagcactataaccatcagcaccaggtgcttttgtatcaggtatgctgaaaaaagcatgctaaatttccttgttggtgaagggctgaataagagcaagctgctgctttagatcaagataagggccctgagcaatgcaagctaaattcagcttgttaatggctaagcttctactccccatatagctccgaaaatgagaaacaaaatgatcaaccactttgggaaagacatcaataacaacaccctgatctgtagtgtaagaagtgattctattttcaattttctttttttttttcaaacaagcatgaaagaaggaagtgttctcatcacctttatgaagctaagatatcttacttcgttacagcaaaaagctatgatacatcttctcttgactcaaagaagtagcagcagcttgcttctctttatcaagaaatataagctccatcgggtgagcctgtgcaagaagcttggacttgaggaactcatctttagctgcatggtaagacttctcaatatctcctatgatgtccctgttaaaattctttagacattgttttaagcacataagcttgagatataaagcaagaatacctttagctgccataggcttcacccaattctaaaggacagtggctttaaaatcagcatgattagaccagaagttgtaatatctaaatggcacatacccaattttgttggacaccgtagtggttatagtgtaagagcagtggtcagaaatggtttcccaactgaaaagagcttttgaattgggaaaactgtcaaaccaatactcattggccaaggcatggtcaatcttcgaatatattcgactgtttccatcctgattatttgaccaggtaaagtttgaaccagagtgaggaataggttcaacatgagctgaagctaaccattgagaaggttcacaagtgtcgctgagagtaataggattctgttgtcgagtgaatttcgcaataccagattgtatgatattattaataataagaagaaatttacgtgtagaagaagtgcgagtattcaacctagaatggcgagtactcaactgggaatggaaataatcaacaaaaaactggaaacaacaataagacacaaaattatggtggttcagtcagaacacggtctgcttagtccactgtagcaagagtttcgtaggtgccatttcagggtggatcacccttttatatacaaagcaggtgtccaattagttatacaaggattgcattcattgtcaatctgtttttaaacattgaattacaataattaactaa

SEQ ID NO: 380003 - DNA, 4562 bp, Cannabis indica
gttaggattccaatttacaaaacctaaaaaaaaaaaaaaaaaaaaaagaaagaaaaaggatgtacacatatgaaaatctttaaaaaggtggcataggatatgagttaccaatgttcttcttgaccactaggatggaaagtgaggttggaatattttcctcttatgggcctacctaaatagaggccacctagaaagcattgatgtagtgccactaggtcacacctaaaaacacttcaaagggtaacattttaggatcggcaacacaatccaatttgcccattatttatttatcaccataataatgcactcttttacgggtgttcattagaccacatccaatatttttaaattattcagattcgatataattgtactttatattggatatcaaattttaccatctaatccaattaatttcggtcatccaatcgatcaatttggatcggttctatccgttagatgtatttaatatatatttatcaatttaatttggatttattcaatattttagacttagtattttttggattcatctaatattttaggtgcaatatgtattggattggattggatccatccaattttttttaaaaaaaagtaaagttttaatattagtatttatacatacatatatatttcaaatatataagaatataaagtttaattactctaaatgaaaatattaattagtttgattggatgttggatgtattggatatttagacactccatccaacatctgatctgatccaattggatattcaaaaatgacatccaatccgatgcgattacaattggatatcaaatgtttaacgttcagttgtaattagatcggtcaattatcattagattgaatgatttatgcacacacctaaaataaagagtattaataaaaaaaaaaaaaatctccaacatttaatatatatttatgtatatatttatagttctctaaaataggaaataaataaagaactccctaaatataaacctaatgttagaaaaaatagttatttattttttgctaaaagaatagagaactcgcttgagatgctcttagtcttagtgtttgtattgatattggtctttctttttcttttctttttttctttttaatttaaaatagaaaagcaaatatatgtatatatatattccgtaaatctcttttcttttttaaaatgaaaattttaattttaaaataaaaaaaaaatcacataaaatttaaacacttttttttaattttttttttaactatagtactgtatttgcatttcttttattggacctttaccctaatttaggccgaccctaatttcgaaccttggaccctagctcccaacccaaacctcaaacgccgacccagactcagtgatcctgtgagagaccccaacgaactttctaacttagtttctgattccttacttaaataaaataccaaaaaattaaaataaaatttatacaacattttattttttattttaaaaatcataaataaaaaatagttataaaacacgttgttgttttttttctaaaataaaaattctacttttatttatgtaaaaaaaataaaagaaaaaattattatcaaatgcatcctaaatgtttcattttctgtaaataatttggattatttgtcttatatcttagcattgtcatatatgtgcaggaaaatatgataaaagaaccagcttgaatgacacaactcagtttgaaaccacagcgtaatacacaaattactccaaatataatactcttttttaatggtactcttcgttaaataacactatatatactgattttattttaattaaacagtggctcccagatgagagaggccctgcaactacaactagatgtacagaggcgtcttcatgaacaattagaggtaccaaaacgtgctctctctttattgcatactactttttcttgatcttagttaaaattctaatacatttttttttaaaaaaaataataataaacaaaaaaacacagattcagcgaaatctacaacttcaaattgaagaacaaggaaagcaactgaagaagatgtttgacatgcaacaaaaaacaagcaatagctttttcaagagtcaaagctcagatattacatcccaagatgatgccccatcaactagcaatgatgaagatcaattctccttcgtcgaaccctccgaaaacactcaatatccctctaagatcagttagatctatcaccatatattacactacatattgcatgtttttaaagtcttataaatatactcaaactcaagtggttccaatacaaaaatactcactctctccttctgaaaagaaaataggacaatgaccgttcgatcaagattgaagaacaaaataaaaatgtcttaaattgagtgcaactctatggtgttacaaatcatataaatgatgtcttctaaattttctatacagagtgggcacaagtactgtctatgggttggttctttttttttttgctcagagtctatggattggttcatggttgaacaaatttttttggggtagttatgtcttttcaattatttgttgaatgtcataaactttccactgtaaaccaaaaagaataaaaaataaataaattactgaccacaagcttacattatattgattatattaatgtactttatttctgtttatctaggcttgttttgtaggttataatttagagaagaaaaagagcaaggacagaaagttgagaagaataaagatcaagatagttgaaaataatttcttcaaataaaaaagatagttgaaaataataataggtttgcggtgtcatatttttgtgttgcgacagtgaaaatgtttgagaaaaacaaatcaaaatgtaaaattgttatattatatagtcttggaaaaacttatgcaatctatcataatatatttgggattcttatcaaatagttccattacaaatacaaatattctgcaaagcaccacagacaataacacggaaatcaattataaaagtaacacatcaagtttttttattatgtggaaacttaacgcgggaagaaactacagcagccatatataaaaatatgatatataattcaattcaatattatacaataaatacaatacgacctaatacgaagttctaaacgagcccttaaatcattcactatcacaattgtttaataatgggagtacaaattctcttcaagtataactagagacttgacaatattaaactaaaaattttggttcaacaatacaataattatcatctataaaaataaaattacaccatagaaaaaagtgggtatcacaaaatgagaatagtagagctgtataggagagcccttaaagaggacaatcaccaaatcaaaatgcatatatttctagaacactttacaaagattcatcacccaaaatttgaaaatcaatcattgaatcttcaacataaaatgccaaaactactttcactctctagctttttgtcatctttccctctctttctctctttgttttctctcggcttctcttcgcacaacaatacctttttgttctttgattttaaataaatacaactgacgttatgtttttctttcttcttcctcttcttttatttattataacgtgggatgattctctttatttggtccaaggtcatcttagtggcccaacaaatcttcccctcagttggtgacctctactaattaagctcgctcctcacctacaaacttgagtatattcttagaaaaattatttatcaatatatctgaaccattctcattgataaatgcactttctctaagggctgtttggttgatggtaatgggcaaaaaaggaatagaatagaataataatggacctgattcttttgtttggttggaaataataattttagaaattttttttattgtaatgcttattcctctaaactaacaaaattgcttttctatttttcatttggtagaattataattctattccattacttaattactaattcataccctagttcccttctttctcattttgcagatccacaaaatttctgttttccactctagacatgggccaagcccaacaaaccctaactttagaaaattaaagattaacttgtcgtcgaccataccattgtgacggtcttcttcttaagtgtcagccttcctttgttgcttcttcttcgctaataatagcttcaccagttacaaagtaaatttctctattctctattctctattctcagactgactaatttgagttttgtaatcttaagtttgaaagtgggaattatttttcttatttttaatatggttccatgctttatgaaataaattagtggatgtgatttctattcttacaagtcttattatctatgccactgaatattcaaagaaggacctttgttactagttgctaaattatataatttaatttatgaaaaaatcacatatacatacatatatgataaattatatcttacactaacaaaattttaaaaactttatttctaaactaattaaaatctctccaatctcattatcattcacaataaatatatatacatacatatatgggtgactattcaatgg

SEQ ID NO: 380004 - DNA, 1222 bp, Cannabis indica
agagagagagagataaaagctttgttttatttttatgtttatcttataaaataaaccaatctcttttcaataaattcctaattattcagctagaaaagacaaaataaagccctccaattccactaaatgaaaacatcagcttaaggcaaaattctcattttacccttatttcaagcttaagcaaccttaaggtttaggagtaaaatagtaaaataccataaccccgcctaattcgaatattttattttaaatatcaaataaatgtaccccgctaaaataaaagttctaaaccaacccgtgtgacactaacgaccaactgtcgcattttcatcgtcactaggcaaaattcacaaaactattaaattgcacatatagtgtaaataatacacgtagagtttaataaaatctctgaaattgagaaattataaccttattacctatttcttaaatataaggtcaatataataaaataaccacatataaccatataatataattaattagtgcttattgacttactaattcatattctaagtatgcggtcattacaattatccccctattaaaaggttttcgtcctcgaaatcatttctaaataactctaaataatgagtcctctaattggactctctcccaggtggttttccacaccaaaatatacttcagagtttatgttacaactcattctatatattatcaaatacttactcatcatcaatacatgaccactaccatgtatttttggtaatgctaaagataaattagacggtatgttacctgtctacttagggcctagcatgcccttcccttttgaagtgttccacaccttcgataaatgaggctcgtaggtttataattttttgcctacccacacttcaaatctacataacctccctcccaaagcattccacacctctgataggtgaggctcgtaggtttataatctcctacctacgatttgcatccataaaaactttttgttgtagtagaattctaataacttgaaccaattcagatcgaacatattagggctttataactcaaatcatgagtcatctaacacatactttcttaacatctcaacatgagtatgtcacttgcccaaaattctcaagaattctaatagcctcaaaacttagggtttacttactcttcccaaaacacttcacctttgcattgttgaaccttgtaggaaaacatgttctcctacctgaaactctat

SEQ ID NO: 380005 - DNA, 1053 bp, Cannabis indica
ttttaattttcaattttttttttgttaaagatggggatttcacttgatgaacccaaaaaagttttgcccacctccactttgctccgcctagaggtaaatttcactctcttttattattttattgtagatataggtatatatgtttttttatatattttttatgaatatatatgtatttgtatgtattgtatatttgatttttttttaatcaagtgttgttgactaacatcgttaatggcttccatcgatcctgtgactctcaaaactccaaagattactctggcaacaacaccagatcctaatgctgctctaaatctaatgaactccatctagaatccattttcaagctccttaacttcgtctatcaccatcaaactcaatcgagttaattttttagcctggaaatcctaggttattcccactgtcatcggccatgaacttgataacattctcttattctgtgttcatcccccccttatgttggtcaccatcgatccaaatcctctgtatagccactggaaacaaaaataccagctccttctctcctaggcgcgatcgtcaatgtctaaaggagttcttgcctttgtggataacttcacctcctcccatttagtctgccatgctcttgaacaaaagttttctagccattctcgtgcccatctacttcaacttaagggtcaattctccaatattcataaggtagtctttcaatcttggactatgtggacaaggttcaatccttagatgattctctgatgaattgggttctctattaaagatcaagctgttatcttgaaaatgttgaatggtcttgctcccgaatatgacacagtggtatctagaattattggatgcagtgatgccctacatcttgaagaagtgaaagctcttctcttggctcatgatagtcaattggaccatcatagtgttgggttttgtgccctaaataaaatctattttaatataatcagatatactaattaataaaagatcagaaatcgttttatgttgcatggttcacatgatttatttcatgattatacttaatgtata

SEQ ID NO: 380006 - DNA, 3273 bp, Cannabis indica
  modified_base (2953)..(2953): a, c, t, g, unknown or other
aaaatacaaaatgtattaaatggtgcattttctttattactaaatactcaattggaaacttttcacatgaacaaaaagtaagaaactcaaaatctaactttttaaaaagtagattttgttcaacaccaacaacaataataataatggtagaattatgaaaagaaaagagaaaagaaatagaaattaagatgaggatactatttaaagctattgtttaaaagtaaaaataaccaaaaccaaccatataattaaaataagtattggattattaattatgatagttgttaattaagagagagattagaaggatggattattaattagtggtggtgcaatgaagaaaagtgagtatttaaagattaggtggggcccagaagatgacacgtaagcagtgtcggaatgagaaacaaaaccaatataaatatacgtacctcatgtgataaggagtaattggtcaaatgacatgtctccacatgcactcccaacagctttctcacatctaagatcctgtccgtagatataccctaccatatgatatcccataaatataaattaacaaattattacatacaatacaatacaaccaaattaattaattaaataggtagtaataaagaccatttatcatctattcaaaaaacaaatactaaccttaagggtcacttgtgactcttctggtgtttcaaccgaaatttcaattaccgttggcaaaactgcaaaacaaaatattagtattacattacattatcattattattatttaattaagaaactacttttaaaagctgtatacatatatataacatacacttaagtctaataaatattaataatacgatttttcaacttggcctgactgaccccatatgagctgaattcaccactaattaatgataacataaccacataaagtacataaatataataataattttggctctttttagaaacaaactgaaacgaaattataatacatgatattacatatacagctatagagagagagagagaagatttgaattgaactacgtacctttctcttctttcttcttcttatctcctttagctttatgtggcttagctttgcttgccttaggagccattgcagtagtaaactatttggttctgtctttctttatcttttaattatatgtatagagagagttgagtctagctatataataagattataagacaatattccaaacaaataataatttcaatattcagtctcaaattcccaacaagagaactaattaaaatatgcaaattccccaagcaatattaatacccaatataggaaaaatgaaaatcttatctatttttccggtagaaaagaaagaagaagaatatagtacatagtgagactgagagtgaatatattggaaaagttattggtttttttttggtctacaactcccaatgggaaagggactgagttctaaatgggaaagaaataaaatggtgaagtgtttatgagaagaatgattattatgaacatttcatttatgataaagaagagagagaaagagaaagagatagtaataagagaagaaggttatgtaatataagagagaggagagagaaagagagagtattagagataggataaggtaagaggcaataagagggaagggaaggcagtggcttatgcaaaaatacagaccaaaacaagagctagagaatataaggctagcaatttcgggcctctcatttttccacaactctataaccttctctctctctctttcttacacgtcatcatcatcatattttctcactctttttttattgaatttctatctctttctcaatctttttatatggacttagctagatacatatacatataaatattcaaatataaaaagtataagcttattgattaaagggttcaatataaatgtatgtatatatcattcatattctcctaggttggttcttaatttcatgaatgatatgagtgaggaattatcacacgtgtacgtatttttattttttgctctaattaataagaattttcatatatagaatgattttattatatatgaaaattgcatacccttactttgatgatcattttgatcgtataattatctaaagatgaagtgacatgaggggcaatacttctccacgaagtgttatagaaacttattatttttattataattaattaactttatttttacactcaaacataaattaataaaattaataaaatcataatgtaaaccacctccctatagtcaaacaaattaataaaatgtcttaattttctatgtgtagtctttttcattcaaagtagtttaccaccactcaaatattttgttccactgtgaacttctttatcattttaaattttattcactatagggtaaactcatccggataatttactaattaatgattcataatttagtgaaatatatacttatttatttgtctataatttactaattaattagtacaaaaaatcttaaaattataatgtgcgcgcaacctataatattgaagtatcatcatcacattaaaaaatgagcaacgtttgttatacaatataatataatcaaccctagttattaatcatgaagttatatgttattataatctctatttgtgatataactacatatgaaagttttaattagagtgtattagtgaaggtagttagttagtacaggctatcctttttctgttagttagttataaagttgtgtgtgttagggagtgtaaaggagattagttggttatagttacattgtttattacagttggttagtggctaattagttacacagttatatttactttgtgtaaagcctgtatatatatatatatatttatatatatatatatcaatatatatatatatatcaatgtatctaactcataataatatgaagttattctttcagctcaatcttttttttgtctttcttcttcctctttttcnctttctttttctgtcgttcatcatagttagatacaacactagatcaaacatggtatcagagttttttcctccattaatggcgaatgtaactattaagggtgctggcactacctcctctgatcttcaagcagctcaaacgattcctaatccatcaacaactcctggaatcgaactcgtgaaataaagcacatttactcatggtcctatttacttcagccatacactctcagtaaagctcaatggtcacaattttcttctttaaaaacagcaagttcttactgttggaaattattttaccaggatcttagatttactcacaa

SEQ ID NO: 380007 - DNA, 2989 bp, Cannabis indica
tgttgttgagaagtttgcttatgacagggaaaacatgttaactcagtcaccttttcttgtcctacagatttatggccgatcatgatgcctggagagacttggctgaaatctacgtctctcttcaaatgtaagaactctttgtttgctcattaatgttattatcttccgtgataccatttgttactttccaactgataagctatgtctaggtacaagcaagcagcattctgctatgaagagctaatattatcacagcctactgttcctctacaccacttagcttatgctgacgtaagtggctaattttttacttgtctgtgtgcaccaactgcattactgctgtgactttgatttcctatacttaagatttgagattttcttattattttcttgtcttcatggtcacaggtactttacacactgggcggactggaaaatctacaggcagcaaagaaatactatgcatccactattgacttgactggcggcaaaaatactagagcgctttttggggtttgcttggtatgttctctcttgagacactcatttgtcatttattgcactaatttttgtgtcagttgtccccatgtagttgtgattaatctccatggatgcttagcactattttaagacatttgatttttgtatatgaccgctgttccaatgctgccaacttggtgactgaaacaaagtttacttcatgttactagtgttcctctgccattgggcagctcgcaaaaggtcggaataaggaagacaaagagagcgagctacaatctctggcagcagcagccttggagaaggactacaaacgaagagcacctgcaacactgtccttgattacgaccgccttaaaaagcttaaaagtttcatcataactctaatttaattgaaactttgtttaagtatttctcttctctaaagttgtgattggcaacttgatgctaaaggcctagaatttacacaaggattttcatattattattttttgcattttgtccccaaatcagtttaagggtgtgctttattctctatttactctgtagtatgacaatgacagtctaggattgtacaactcaattgggatatcttgtcaattctccatcttgtgtgctctccctgctaatttgtttatcttatatttcttggaagaaaagttcagagtagcttggcattgttggtttgtttcatggctctaatttggccttctgaacttcaggaattcctttagtactgttttttttttggtctcatagagcaaactgtcagcttaagctttttctaaacaactattttttcttcaatcaatcaatattgtggcgactatattaaaaaacacagtggagaagagctttttcaatcaatcagcctagttgctaggtgcccaggttgatatgtacacgaagtttcgtaaatgcgattgtgatttcgtcttggacattattgttattttgtttccaaaacaagatatgagacttggaattaggagaaaatatctatcaagtggtggtttagtcccaaacaccacactaggccctaggttgacatttggtctggggctcagtattttgtccatcaaacgatagttttgttctagatatcactcttattctgcccccaaaagaagatttgaatgcttttgcaagtttatacatgtgttaaacgcaagttcactgacacccatgtacactagtgatcacccggttgtcacctagtcctcactagtgattcattaggcatctcccatgcacatctagtgaaattgccaagagaacttcaccggcatcaaagaatgagctaaggatagttatcacatcattcaagcatctcaaaatatgtctaaagcccaagaaaccaagttttgggcgcctaggttgaccttttatgtcaatctggtaaaatggctacctcactcaatttttatccaaatgatgtgcttatcgagatttttaaaaactaattaaatgaaagctttagaaattaaataactattaagtaactaagacgaaggattttacgtggttcaggcgttaattatccctagttcacgagtcagtatattgggcttataagctttttaaatgtattaagtagtgtttacaatataaaaccctaactttgtttctctagatttttcttgaagaagaagaaagcttagaggatatttttggctgagcttcggctatctcctcttgcgatcccccattatcaagaaattaaggggtttatataggctaaacttcgagtttgggcatacccgtgacccgtttggagttttttgtaaaatttgacccactattggggcaaaatacacaatatacatgactatgaggcccactaaggatgttaggttcgtggggcgacgattatgtactgatgagaaggtcgtttggtacaaggcacgtgttgcacagagatcacacctgtcagacaaaggtgtccatcggacaaaaaagggtattggtggtacacacactactatggtctgccgtaggggacaatatctgatcttgtgtcagagaggaggacactgttgggaatattttaccaagatctagatttactagcaagtatgttaaattaacatcctaaatatgaatatctttaaaacaatgaaattaaacacataagagtttagaaaactttacattgattgtagcggaataatatgactccttccgctcagatctctaacccttgttcctttttgtcacagagtattataaagatctgagcctagatctctttctctccttcaggttggttaccaccgtcttccgcactatgattgagtacttgacttgctatgtgtgggcatgacactctatcattataggctgactataaaaacaatgaaggggcttgaaaattgtatagaaggtgtctatcatctactagttgtctgacagagttagaaactagatttggcaggttgaaagtattggatgagatgagagcatcatgttccttttatagtgtttcaactagg

SEQ ID NO: 380008 - DNA, 2648 bp, Cannabis indica
cttactcatatcaagtttcattgatgcataatattgattacctcttttccttgttttaagtgaatgaaggactttaaacgctacaaggatattatctgtaatgagtctttgagatagaaatgcggtttgaaattcagatattaccgtggataggtgtggttgaactcgtagaataattgttttggagacaagtttgtataagacattacacaaattaatcgactgaaattgagttatctttgatggcttcttgacttttggaataagggtgataagggtcttattaaatgtagagggatcaccaccattgttgagagcatccaacacagtagaagtaacaagagagccaacaatatgccaatagttagtgtagaacataacagacatcccatctattccaggactgctgtcttcaaacatagcttttaatgcatgaagcacattatcagaagtaaaagagagagataaagcagctcgagattcaggtgagatggatactggaatcgtgtcaagaatagcctcaagagcatgctggtcaagaccttgagaggtgaaaatatcagcaaagtaaagttccacctgctccaaaatgtcacggtcactgttgtgaatacaaccatcatcacttatgactttttaattttgttgttggaatgtctagcattggcacactgatgaaagaacttagtatttgagtcaccagattttagccaagagatctgagatctttgtcgccaatagtcctcttcctgtgcaagtagttcatctaaaattgattctgaatttttaagagccgtgaagtgagcaagatccgtgttagatgaattttgaagtacttttacatgtttatgagcctctttaatatcccttttcatatgtccatacttgtggtggtgccaagattgtaaatgagtagcacaagattgcaaattactcatcgtttgcgatatagaattcgatgaagagctgacctaatttctgagaataatgtctaagcaatcttgatcattatgccaaatcttttcaaatctgaaccgagatttgtaagaaggttcaattacttgcacaccagtcattgtaaccttcactttgaaagctctatgattcgagtggtaaaaatcaaaatgctgaatagttggtttctcaaataaaccagaccacaaattgttgtaaaagccgtaatcaagtctctctttaacattactagaccttgacttttattggtccaagtaataagttcaccttcatatgtagctgatgtgagatgacagcaatctatagttgtttggaaggcttgaacttgagcattatttcgaggaggaccaccaattttatcttcatgtgtgataatcttgttgaagtcacccaaaacaagtcatggttgatgaggagcaatgtcataacatcttttaagaagtgtccaagtgtggactcgttgactattgttgggatgaccataaaacccaacgaaatggaaggaagataagtcttgggattcaataaaacagtcaatgtggtttggagaaaaattatttatggacacctcagtatctgatttctaaaggagcataagaccaccaccaagaccattacgaggtacctcaataccattgggaaaatgttaactattacgtaacttattattactactagcttgtaattttgtttccattagaaagagtacacagggagcctactcggagataagcaagcgtaaaaatctaaatacagtcgggttccctaatcgccgcgtattccaagttatgagattcatggtgagtcgcggtggtgcatagcatccaccgcgaaaaaaccaagttgttgctgggctgaatttgaagaaaaaccagaaacaaccgaagcagaagaagggtcagcagaggctggtgtggcagactgaccggagttttgtgaacgacaacgtttgagagttttgcgaagagactccgattcaatttatcgtttagaagtgttgttgtgcccgagaaaatcttgataacagttggagatccattgttagtagggatattgccactgtgatgaaataatctattggtaatatcagagaaggggatagtggtggatgttaactcagtaaggatagctttatttttttggaggaaatggtattgttcgataaatgttggttgtagagtgaattggtcgtgggagggtaagtggaaaagtgagaaggagattctgtagtgtggaaaggaagtgatattggaagataggaaggaaatggaataacaaaggcatcaataacactctcatgggatgaattaccatgaatttggtgggattgatgataaggaagattcacattagatggagatgaaggttcagtcccagtgagaggatacggatgaggattcggcctatctacgatgcaaggaatggttgcaaaagatttttttactaatccagtcatgagaggccatgcattgcctttgaaaaaaactcagatctgaatcgatcataactcgaagaaggcagtggtgctccaatatgaatgattttttttagcagcataaatattaatgttagtaaaattataattttgttaaagtttcatcattataaactttattggtataaattgaatatttttttaacagtatcaatgttagtaaaattataattttttt

SEQ ID NO: 380009 - DNA, 1304 bp, Cannabis indica
ctctctctctctctcactgggtctttggggacgctattgttttaaagtcctcttgttttcaatctcatttgagtgaaagacttacaaagacgtccttgtctgattgtctgtccctctaaaggtgagtaagggtgtaggtttgggacttgaactttgtgacaaaaataaaaataatattaaaacgaatggtaatatttagatactcatacatacaaattacaaagagaaactgaaagaaaaggaacgttgtggccaataaattaaaaataaataaaacaatgcacagttaacgaggaacggtcttcttttgctcttggatccacttttacgcacttaatctacgcgcccacgctccgtgaggtcttgtgagttgtgacaccgcaagcgacaatcaatatccaataccatatcatatcatatggtacggtttgtaggcgataattgtttggagacactaatgtattttacgattttttttataattattattaaattaaaatgagtaggcgttaatattaaactaaactaatagttatattacgaagaatactacatatcatgaatgttttttagcatttttattttgtaggctgcagtcatttccatcatgttttttacattacttgcactattgataattttttttatttatttatttgaacaatgagatgtgaattaaaataaagagaggtattgccacacaagtacataatatttttcatttcatgcaatttggtttttcattaattaaatacttaaagttactttaaatttaagtttaaggtccaatgcgtaactttgttctctctaatgtttaattttcttgtttgtgtttttttgttttggaggttgggattatcatggtaactgaagaagttgtggtggataatttgatctctattgcaagtaagctaactgtgaaaattgaggaggacataggcgaaatggaagaagtcttgtttgatgaagaaatcttgaataatgaagaggatgatgaatggctgattaagacagagagtactggggagtttcttgaaagatttgtggtgacaagagtcttctccaaaagacagttcagcaagaactttgttagaactatttttgaaagaaaatgaagtttactccaaaatggaaggaagagattctgcaagtacctatgtgggattcatgttctcttgtgttattgaagctaaaaaagttattatcataattcttgtactatgacgtggtatctgactacgtgacacatgtatcatattttataatctgggtgaatgcttctgtaacaccctaacaattagaca

SEQ ID NO: 380010 - DNA, 5070 bp, Cannabis indica
atgtagaatgtagtgtaaaattttaaaaatcttagtaactagtaactagttaataatttattcatcattttacaaaataacttcaaggagttcaaaacttcccacaataagttacaaattaataactcaatttactaatttaagagtgaagatcaatgataagttacaaattatatgatcatcaataaaaggatctatatagctctttttagattattgttcacacatttataatttcatatttttatgttacaatttaataaatattattttttaaattaaattatttattacttaaatatttaatctaaatattatattatataaaataatatagcagtttaggcactaaatttgttaattatgtatatatatatatatacatttacgcctattgatggaataaaataagtgaccacattgcatatttaatatttaattaatactttaagtaaaatatataatatatatatcaatagtttatattatatttacatttttgtagttttaaatttattttttcttattttgttgttattttattttgtatatttatttaattgtctttgtttaatatttgtagttatgtattttgttgaataaactacatgatattaattttatgggtgtctatacatttggtactctgtgtattatctaaatacaagtttggtactctgtatttttaataatacttatttagtaccctatattttaaaatcatacctaattagtaccctaaatttaaatttttttaataaaattttatcaatacaatcatcagtttaaaattttattaattatgaattcaaatttaattatttgattacatataactgagaactatttgattaaattgataaaactgtattgattaaattttactttaaggtactaaatatgtaaaaattaaaaatatgaggtatcaattaagtattattaaaaatacaaggtaccaaatatgtttttcatgaaaacacaagatactaaataagtatattactaaataagtatattccctaattttatttatatttaataattactaaaattagttagcgtgcaaaccgctcacattgcagcgcagtgtagttttgtggtgtggtttgtaaagttttgaggtctatacagtgcgtgcgaggacagtttgtaaaattactcaaacgacatatgcgatgaagtttaagaaattagttaaaaagtataccttacattacaacacccctactagtattaaatttatcatttaaataatatgcaaagagggtgaaaatatctttagataaaagtcctaatatgaaagtaggaagtgtgatgatcacttgcgaaattgcaatctaagacaatgatttgtaccaaatgtgcaattttatcatatcatataataagcttacaaacagagtctgacagtctttcaaccccattttgcttattctgacaaactcaatccaaaacgacaaaaccattagatttgggactgtagagccactcctacttggactccacgtttaattaatgaaaaataaaatatagcaataattattattattatcaaaaatatattaaaggcgtgttgtacacgcgcagtaacctaggcgcctcttctatcattttcaaaatgggccattgctcatcgcgcattccggctggtgtcgagactccacgcgctcaagagaggtgagtatcacacgcggcggggaatgaataagaaaaccaaactaaaaaagcaaaaaaaaaatattaatacatagagagagaagagaagcgtatatagggttatagctcagtcatgtgacttttttagagagtgcccgcgtaagaccaaaaactagagaacaaaagtctttatactctcttgctcttctcttcttctattgctttgttattgtgtgattgattattggagagagagagaaagaaagtgagaggttgagagatacccacctcagttttcgctttctagctaggaaacaggttgaagagagaagtaatcttagagagagaaagagagttacttctgttccgaggagaaagaaacaaagaaagaaagctatatttattccaaagaagaaagaaagaaagaaaagagatctaagatttgatgataatataggagaggagaaagggttcacaacactagtagttgaaaaaaaagaaaaaattggagaaagagagaaaaaggtcgttatttattacatatatttatttaagctactctattatatataattaatttttatatcttctgctggtttataatttattgtctgcagctatggcagcagcagctgctgctgccgcccggaccctctttttcttctctttatctctcttctcatatgaactaaacttttttggtcataaagccaaagtgacagtgttagtaacagcagcagtagtcttacagagaagatagaaagaaagaaagcaagccacccaacaaacaagatctctttctttccctctttctctctcaagtagttttaaactttttttttgtttttttatttaatttttattttaaatttgttttgtctttcttctcgaaaaatctctctgatacaatttcagagaccccacctttcatatataacacctacatagatacatccatgttttagttcgagacctcaaaaattccttctcttctctctctctctatataaatatatttataaatacaatacatatttttatgtgtatatatatacatatatgtacatatatatatacacacgttatttataaataatatttgaggagaaaattgagattggatttgttatcaggaacatcgtcagttgtggctactacaaggaggctgccttcagattctggtgcctttgcagactgggtggcttcatcctcctctgcagcagccgcagccgcagccgcagcagctgcagctggccgtcccactgttccagacgatttatcactgagcttcaatgctgggcccacagccggagccacctcctccgctatgtggtccggtccatcttcaaggtccatcaactacggtcttccacccgagatgggcatggtgggtcttcgagacgtcttcgtcgtcgcaccagcctcttctttccaccacaacaaccaccatccccaccaccatctccaccacaacctcaaccacgacccaaacctcatctccgaccactctctcaacggctccaaccctgccacagccctcggcgtcggcgttggtgttggcgtaatcccattactaacagcagctccttgtctcggtccatcacatctcgatgaagctaccgaggccaatgcactaggctcttcctcagctgcggctcgaagccgaaatggcgggattcagctgtggcaaagtcaggctcaacaggcggctgctgtctcggcagctcaaactcaactccatccgcatttctttaagaagccctcgattcacgaccacggaaacagcgaaatcgggggtaatttggtaattcagagcggtggaggaggcggaattaatgttgggtctggatcgacgtcgtcctccacagcaacgtgtcaagattgtggaaaccaggccaaaaaagactgtacccatagaaggtgtagaacttgttgcaagagtcgaggtttcgactgctccacgcacgtgaagagcacatgggtcccggccgctcggaggagagagcgtcaactcatgacttcggccggtcctggtggtggaaccggacctgggtcttccgggtcgacttcgggtgcaaagaaacctagactcattgcctcccaaaccacttctcacacttctacttccaacactactccccctagaagcttcgataccagctcaagtcaccaaggtttgattttagagcctttacatacactactttttctctcactcattcaatttaggtcaaggtatatatattaggtttagggttttcattttatacttttttaattactaatttattttatgtcacagatgcgagcttcaaagaaacgttgccgggtcaagtacgtgcaccggcggttttcaagtgcgtacgagtgacggctgtggaggatggagaagacgagtatgcttatcaagcggttgttaagatcggtggtcatgttttcaaaggctttttatacgatcaaggtgtcgaaacaacaacccgcgataatagtacttttccaaatctttcagaattgcatttgggtggcggaggaggaagaaatggggcgtcttcttcgtcgccaatgctcgatccctccgatgtctacgcagcctccacagcaggtttgctcggaggttccacctatggtaatccaataaattaatcaaaaattgttgcacttattgggaatgaaaataacattcttattgtatttttttgaaatcttattttcattccttcacattttgtttttccctactaattaatgattttatgttgatcaatttgtggacttgcatttcattacacctgtcttttttttttacctattattatattaataactcctttgttatcttataacatataatatattaatagctagtcatataatacctttctaccactgatgatcaaactggggattatcactgttgtgcagaagtttcttgactgaatttaaagaagcaaataattgttggagacgatcctgttcttgtagatatatatattattatttcttatgaaaaaacattaaaaagaaatgaaagaagttaacttgtgatagttgtgtctattttgctttattgtagttgctgcactttcttagctttcttttcttcgccagacccagagttattgcattcccaaaggtgaaatctacagtgtaaagtatattttcctctcccatcatagcaagaaagatgtcataattatttattaatatatatataaacacatatattgtggtaacgttttttggtctttgtcttgtacgcgctagttttctcgtgagttagacgtgtatttaggatctatatcatatcccaagtattactaaatttagattttatttaaaatggaatttagaatttagaattttatttgatcagttcttgtttgtttcttcctatattattatatatcatatccc

SEQ ID NO: 380011 - DNA, 1653 bp, Cannabis indica
aatacaattgctattttttttttgtatgattttataaaaaaatatctacaatagcaaccgtgccaacattttatacattatacatattagattatagaatttaggaccaagcttaatggtgctatagttttttttttttttcctttttgacataggttaaatgaaaaaagaaaaagtcagcatacacataataattgattgagtagtgtaacttgtgtgtatgaattttgacatgacaagaaagcggaaaagaattaggatggatgaagttccataaattgaaagctcaacaaattgttaatattgcgttaacaattcagaaacagttcagaaatagagacaatgaatttggtttaaaagtatgtaaaaataattgtggggaagacgacaaatgtgacatgttcatttatgcctaaaagattatattagatgattaattactccatcgtttatgtgtagggacgactgacaaaagaaaagatacacatgagcttcttcagtttaatttaataattggacaatgtatagctaaccatgtataaaaaaatataaatcaaatgtattaataaacatatttattacaaatagacgtaattatatatatttagaataaaaaattaatctttaaattttatttattatattttagtttaacggttgaggatatgatcatgaagcacttaacttgataatattcttattcaatatattatacaaaaagaatgttaaaaaaacaaacattgtttggcgctcgtgtcttaagaaacttgaacacaaaactagctagatgcactaaattttaacataaacaacaaaacaaaagggacggcaaatttaacgaattagtgaacgattagggagtttttatatggttttagtttgcatatatgaacaccttttgacccttttcaacgtttgaactcggatttgaatttgaattgggtaagttttaacttttcatgaaatacaaacttaaaataaactatattcattccttcaaaaagaaaaaagaataaactatattcaatatgtcgtttagtttttaatatatatgacataaaatgtacaaaagttgaacaaatcacgatgtaagaggtacaaatcttatatataaaaatatattttatttagccttagtaaacattgtcagtacaatatgaaaatctagtgattataagaaattcatttagggtttaattgagaggccatgttacactttattgtattatttagtattatattaaattattttttatgtaatatttttacataaaactatatgtaatattaatttttatgggtatctaaatatataatattttagtataaattaaaatttaacatacgataattatataaagtactattttttgtaaaaaaaaatacattaatacgtgaggctttcactaagttctgcaaagacacagggttgtctgcaaacacctcgaagtctcacatatactttggaggggttagcgaagaggtcaaatccaaaattcttgatatggttcaaatagaagagggaagcttccccctaaagtacctaggggtcaaatggaaagcagctgattgtggagttattttggacaagctgaataagaacctaaactactgggcaagtagaaatctttcttttgcaggtcgtgctcaaat

SEQ ID NO: 380012 - DNA, 2183 bp, Cannabis indica
tgaaccagaaaagtttgggtagacccggatccatagttgatcctattttcgataggttcagtcgacaattgaatttaatttttctcattatttcgtattcgtaattgtgctaaaagaaggcctgactctaagttgttcactcagtttcatttctattttctcttttgccacacatataactataaatgtatctgtaagttgtaattgtcacaactaaaaattaagtttttaaggaatatatacagtatattaaaaaatgattgggcaataattatatttaattattacatatgagtatattttaagtaattttggcatatggataatatttttttttgtattatttttacatagcgatttataatatagtcacaggagatctctaaagagtttttagaaaattttagacatttttcgatgtcgaaattaaaagttaaataactaaactgcacatgagcttgttttgacatttatacatgcgtacaataaattgtttgaatcataattttgataccttaacttgttctaaattttttgaaaatttataaaatagtcaaagtaaattgcttgttatatatttgtttgttctaaaactacctataggtagtagaggtcgaattatttatttgagatggatccaaaaatagagaattctagttataatcctaaaacaattcatgtatatatttcacaaaaatgttaaagaaatcgaccacattaaaattacctgttggggagatccgtttgatacccaaaaattgcttaacaatagttagataagtgcagaatgttggggtgaaccagaaaaatttgggtagagctgaatccatagtagatcctattaggagcttggttatataagcccatggtccccatactaactgggataatattattttgtagtctcgattaattaatttatttaatcaattaggattctaaataataactatgtcttatttatgaattttactaaggaaagacataattgagaagaaaagagaaatagaaacttatttgttaatttgtacactttgtgggtctaattaataaatatatttaaattatattttatttgataattattaaattaaaattggtatttaaataattagaagaaacaagtgataaaataggaaaaatacattgtttcatttaaatgaaataaaatggcataaatctaactctaaagcccatattgattcaacccaagtctttattttaatcccatctcttctaaacttaatcctaggtaaaacctataaaaagaaagagaagagagctttgttttatgataattttctaatctagaaaattctaaaaagctcacttcttatgtaatatttcgaaagttatgattatgttaaactggacatattttattaaatatgtaattttatgaatattagggtaggattataatcttttttttcttgaacatgaaatagcaacttcaatgaaatttagcattcagcatacaaaatggcttgaagatcagtcgggacaccattcacatgaatgctacaatcagagaaaacttgagatcgtcttgctacaaatgagctactcggtttgctgatcgtctaatgaaacataaactaacattttgtagaaaggataataaaattttacaatcattaataaccaacccaataacagaagtcattttgtaggataagattataatcttacttaagctaattatgagttaattagtgatctttgagtaaatgaataattaagcgtaacttattaattacggaggttttatcggaacatgtgggtattataataccatttttgaaataaaatattttcgagtttggtggtagcggaaactcgatgggttggtcagagatgtcacgacgacagtagtatgagatatattggaattgtatcggactagtttagaatgttgagtttttggtttactcgagataattaatttgaccaaaatacccttagattatgttttaatttaagtgcttatggagggtaaactagttattttattaggtattatattattttgtccgtaagtggtttctaggctgaaataggtttatattaatatgtttattttattagatttaattataagtgtacataattgaagataaaatcaaattaagaaaaaactggttctcatctactctctctctccttcccttcgagccctagaa

SEQ ID NO: 380013 - DNA, 1258 bp, Cannabis indica
gaggtcgtagcacaggctgcctagcaggtgcgcccttgtggaaaaggaggggagagatgacccagcaacatatctgccatgagaattttgggccaccttcgccctcactcgcccgtcagctcatttgaaagtgccccggtgacggcctcgcagcctgcaagacatatctgcagaaagaaattagcaaagttagaaagcaattgtagacatacagtgcaagacaaaaaatatcgtgttatcaactatcaattaccatcatcattagatgaggaactattagagtcctctacaacaacctttcccttacctctaggtttagtcacacggcgagcaactccctcagaagctggcctctaggcctgatttggacagaagcttcaccaactggagcgccactggccaagcactgacgtagagccctctccttcctctcaagattctgtgtaatgcaagataaaggtacatcatcgtcatcactattaagaacttgtccatccctagaacaagctcccattggagttggagctcccgcaaccccaagaacgggaggatacaaccaatactttcggaagttggccacactagtcaactggagtatgtttctctactctgccgagagagataggatatggtttgctctatcccttatttgcaaggtgggaatagaatgcttgaagattgggactctctggaaacaccgatggcgagcctccttaacatcccagacaatgtatttatatgcatactcaccaactttgggcataggtaaactgttggtagcatctaaccactgttggtcaacttgtctaaagtagaagtatccaggtcgatgttgctgcggaatagactccaaatcaaggaaatatccaatctcataaggagtaggctaaggccagcctaactccttatatagaacaaacatcgatgaaaggtacttgataccttccggggtgatttgtgttgggcacatcctaaaataagcagcaacatcttgaaagtatggatgaagaggtaatgcagctccttgctcaatatggtaccctgactagttgagggtcgatctatgtactagttgattccacagaggcatcatgcaatggatatcacctactagcccacaggcccatatcctctcaaaactgtcagtagagatggaagatgttgggttttatgccctaaataaaactccatttcaatgtaatctggattattcaatatcaataaagaaactgaagtattttttcattcatttgtgtat

SEQ ID NO: 380014 - DNA, 4184 bp, Cannabis indica
taaatagaaaccttaaaaaccacaaacaattgaggcatcatctcttcagcctctaagtaacaaaatcgtgacagactcacacttactatcatccttaccaggtttatgccttctttatatgtttagacttttacctcctaatcctcacagactcactattaatttaagatttttcgttttaaatttaactttttatgaacttagtttatcattttaagacttaactagtaatttttatgattttttttggttttgttatagaattatgacgtgttatttgttatgaattttatgagtttcgtgatattttgagaaatttgtgcctcgaagcttatgcctctcgcagggctaaggaaaacgccttggtactcctttttgcttttaaaaacttgcatgagacaatacaaattttaaactcatgaagacacaaataaagcataatagagttataatatcgtacataaaatataattttcaatcgtaaaattaattttaattagataaatactattaacatataagtaagatttatatttttctatatatattatgacaatgacaatatagaaaattcctttccaaaaaacaaactacataaaatttatattaagtatatctctttgagcattgctattgggcatcagtggtacctagcaccctcaagacgtgtccccttgtgattggttagcgatactccctcaaagctattatattaaactacatgggatccgatacttaattagacccatagcaatattaacacgtaagagggtgcttgacattactggtgcatagcttttagcatttctatctctttagtgactggcacacatttggtgattaagagactcaatatctagagatcaaattccaactttggtctccccatttcccaaccccctcacccatgttctagaccaaccaattatcattacctgtgtctctctttcacaaatatccaaaattacttcttgtttttataatataatattgctattggatacactagtggtgttcatcattttttatataggtggcgatttatgattagtttgtaatatttcttaaaaactattttcttaagttatataagatctatactttttttttttgaaaataacagtatattactactacaaaaatattaagcataagtagtactttttaatatttctctgattttaaagaagttaagggacttaattctttaggatcgaaaaccttaatgaaaaattcaacattatttcacacttccaaaacattattaattcggtattaaaaacaagtacgctttctatataaatatttatgcatatatatcatgcctaattaaagagactatttttttaaaatatatattatatgtatctactttaaaatttatgtaagggttatcatttgtccacattaacacctcttaaaatccatttagtaataagaatgaactacacgtacctcatttctacatatggttaaataacttgcatacttgttactgtagctaatttatgtttggatttatcatgggttcggaagaaaatactgaaagatactcgagatgtttaagtctaatattagcaatttaacaaacaacacaattttgaaggttttcttattatctttgatcaaaagagctgcataaaatgtcaattatataagaaagagaaaaagaagttccataaaatctaagtgaatatcccatatatatatatataagaaaagataaaataaatataacatatatgcatatatataatagaatatgtatcttgttttcatacaaaaattgtatttgttaaaaaaaatacaacatatactatagaaattttaaattttgttgatatcattattactatatcttgatatcccttttggcctttgtgatgatggaacttctatctaagttgtcaatttattaattatgcagaaggtactactttgtaatatctttgtaaaaaatattgtactatacggtagctggtaattaaaaaaagaatacacaaactaaaaagaagaagaaaagaaaaataataagtgaaattataagtgtactataatacaatagcaataaagagaaacacggtggatttgacgatatttattaatattattattattattattattattattattattattatattaaatataaaatcaaaccaaaagcagctataaggtacaaaagatagaacagctagttatccccagctggtactcgaggatatatggaatcaagttgaagattatacacataagattactttatatatcttgagatcttttttgctgctgctatgtattttttactggcttattatttgatcctaattgatcgtgaattagagaccaaaagtgatcaaatattaggtatgagtaagataaagattagtctatactgatacttttgtactaaatgtgtcaacacctaaacaaaattactcagtcttattagagatacataattaatatatacaatcatcataaactaaagcaatcagtacaaacacatcccgtacctttaattgtaagcgaactaaaattaaactttatatatattaaaacaaacaatacacatatgaacaaaaagggggaaaatctcagatcaaagcatttttattaaacagaaattttatagataatgaaagaaaaacttactcggtagttgagaactcatagagtctgcctttctgagaaaaaatgatgagaccaagttggacatcgcaaagaacagcaagctcctgagctttcttcaacaacccacttcgacgtttcgagaatgtcacttgtctgctggttgcattctcgatccgtttcatttggattttccctctcaccatgatctgccatgccaatatcaagtaataattaatgatcagatttttcaatatactcaaaatggtatgattttttttaaagtcatataacgaaactatcaactcaatagctctgtacaaatacacgtacggtcgaaaatctgaaatgggagaaagatcaagcgtaacaaccaaaatatcttatctcatccacaacgaattttactcaaaagagtttccattattaggaataaaaacacagatgggtttgactacccaaaacccactacgccaaatctgtcgaaaaaaattccacaaatgatagatcccaaaaaactctactggacaggtatgagaactatagatatatatagaaagggtacaaagatggaaaattagaagatttgacaaaaaccctagaaactttcaggaagtgaatgtaaggaagaaaattattatatggtatgtagacatatatgggaatgtacaaagtaagcgtataaatatgtctattctaaaccacaaaacttctattttggattccttattcatccacttctccctcgtttccattattgtcctctgtctatctttttcaaggtcttacccacccaaaaagaggaatacaatttaatataaataaatgaaataaatatggacataccaataaaagaaaaaatatatatatacatataatgagagctcttaaattaaagcgcattaactaccttgatttagtaaattaaactgagaaaaacaaagtttacttggaagaaagacaaatggagtgaaaaaaataattaaaaaaatatgttttaagatatttattaaaataattatataatgttaaaccttattattcgtaaaaggataaaggaaaccaaaaatgtggagaataagttgtgtaagatggcaacttcatcgtacaatgacttgcgtgaaaggccaatgagtcagtgacaacacatcagtgtgtgtcagcagaaaatcatcacttgcaccaatcacaaacgaccgtgtcacatggctctcttgtgtggggagtccactcttgtactatcccctattatttaattattatattactcttaaaagcatttaatatttttacatttattattgtggaaatataatagagaatggtggagagacaattcaaatttcttattatttgaacacttacgtttttttgccattttcgggtataattccctctttgtgatgataatgtcttatttatttaggtggcgtctgttaacactttattttctaattttttaattagaaaatgaaagtaaaatttttgtttttaaaaattttgtttttgaaaaacaaaaatgcgtcatgtaactatttttgtttttcaat

SEQ ID NO: 380015 - DNA, 6131 bp, Cannabis indica
ggccaatgttgtgagtggaacaattggccaatgttgtgagtgatgtgcaaaaatagagtaattttcctattgatacagttgttaacccaaaagaataatgtaatgtcatctcactgaggaatggtaaaatacttgatggaggtgtaaaagacaagtcaatcggtcctgaagttgaagacacggtagaagtaaaagaagagattcttaaaaagaagcctactgagaagcttatcaagaaagacaatcgtccaatgtataagccgccaattctttgaagaaacttgatgaggactttgctaagttattagaaattttaaataaaatcaacattaatattcctttcattgatgcattagagcagacgcccaattatgttaagtttatgaattgacaaagaaaaagaaatttgagaaatatgaaactctaagcttaactgaggaatgtagcgtaataatttaaaaaaagttaccttaaaagcttaaagatccaagtaggttttctattccttgtaagattagtggtttaaaatttgagaagtttttatgttgggggttcacacaacaacgacagtgagagtcagcataccctatcaagccctcgttgggacatcaaaccttgttggatcgaactctcttcgtttgacagcaacaacccagatggctagctattgaaggttgaaaggtatttttcaatccatcaaatgacagatcaagaatatctgaaaactgttgtagggaaactttgatttggtttcaatgggagcatagtcgtcgggcatttgtgacttgggaggatctcgagatgcaaatgattcagagattcaaaccactgccggtgagtttcttgctctcaaacaggaaggatccgttcgtgaatatcgtaaaaaatttgaactcatagcctcatcgttagatggaatctcaaagcaaataatagtcttactaataggctcaatccagatatagagcacgaaataacagttttgggcccaagtgggcttgagcaagttatagaatcggctcaaaaagtggaatccaagttgatggcccaacagaagtttaagtcttccatgcgaacccctaggtctcaatttcctagagttgcaactagagctagtgcaatttattccaaacaatttcgctccttgttcaacaaattttagagatgaaggtcgactccttagggttaggttccggcgattacagaatctaagaatcaacaaaagaggtcttggggactttgttttaaatatgatgagacattctctcctagtcatcggtgcaaaaaggcagagctacaagtcattctcgtctaagaaataaatggtgacgagaaagaagaagaagacttagatggcctggctgaggcagctgaacaagaagatacaaggctggaaaatcaagttatggaagttcccttaattctgttataggtttgacagccccgataactctgaaaaattaaggggccacgttggttctcgattaatagaggttcttattgatagtgaagctactcataattttatctcaaaagttctaatacaaactttgttgcttcctatcacagccacagctccctacagtgtcgtattgggtacgggacaatcaactaagactcgaggaatatgtaaggggtgccactaactatgcaaggagttgaaataattgaagattttattcccttggatatgggcaacactgatataattttgggtaaacaatagttggaaactttgggtgtgaatcacataaattggaagactccctctggagttcatggagggtaatacggaggtaagtttacaaggagactaaactctacataggactcttatctccttaaaagctatgatgcaaacaattaaacaggagggccatgaattaatcatcaaacttggggctaccaccattgaggaaaggaacgatgaaatacctgttgaaattaaagaagtattgaatgaggccaaataagtgtttaaaatgccaaatgaacttccaccattccagggacataaacattcatggtcggcacacgtcgatagtaagtgttcgtccatatcggtatccacatgcccaaaaggatgtcattgaataactggtgaaggagatgttagttacaagcattgctcaaacgagtgtcaggccgttctcaagtccggtgttgttggtcccaaagaaagatagtagctgtgggttttgtgttgattatcgagccttgaatcgtgaaatagtgccagaaaaatttccaataccaattataaatgagcttttggatgagcttcatggggcaaccatttatacaaagttggatttgaaatctcactaccatcagattcgtgttaaaccataggatgttcccaaaactacttttcacacacatgatgggcattacgagtttcttgtgatgctatttggtttcttaatgccccgacaacattccaatttgcaatgaatgaggtatttcgcccatatcttcgtcgttgtgtgttagcctttttgatgatattctagttttagctgcaatgtacaagagcatgtgaaacacctcactatggtcttacaactccttagtaagcatcaattttatgcaaaccttaagaagcgctcttttgccaaaaagcaggtttcgtcgttgtgtgttagtctttttgatgatattctagttttagctgcaatgtacaagagcatgtgaaacaccttactacggtcttacaactccttagtaagcatcaaatttatacaaaccttaagaactgctcttttgccaaaaagcggttagagtacttgggtcacatcatatctgatgaaggggtggcggtgaatcaatctaagattcaagctatgtttgattggccaattcctaaaaacattaaggagctccggagtttttgggtctcacagggtactactgcaagtttgtgcaaggttatagtgtaatcgcttggccctaaactaagcaattgaaaaaagataagttcgggtggaatgtcacagctgaggttgcttttgaagctcttaaaaaggccatgacttccgttcctgtgtcaacacttcccaattttgagaggcctttagttattgatacagatgcttcgagtcatggtgtgggggctattctaatgcaagggcagcaactaatagcatattatagccatgtcttagggactcaagctcgagccacgcctatttatgagaaagagttgatggccattgtttgttcaataatggcgaccttatgtccttggtcgacgttttgtggtccgcactgatcagcaaagtttgaaattcttgctggaacaacgcattgttgcttcggaataccaacgttggatggttaagttgatgggttatgactttgagattaagtatcggctcggagttggtaataaggtagctaatgctttatcttgagtgcatccaccagctaagtgtcagaatttgttggtttcccaaggaatccattgggatgcgttacaacaggaaatacgacaagatgccttcttgagtagaattatttcaaatttgcagcaagggcatacacttactgttggctttacaatggaacacgggcagttgaggtacaaggggtggttgacgctatcaaaaatgtgctcccttatacctatattcctacgcgaatatcacaactcaccgcttgggggccgttcaggtgaggacatgaccctcaaacgaattgcatctgatttttattggttgggaatgcgacattcaatgactaattgggttcataattgttaggtgtgccaaaaacataaatccatgctacttctccagccgggttattcggcttattgcagccaattgctttaccaactttagtttgagacaaatttaccatggattccattgaagggcttcctcatttaatagagtatatattgtgctgagggcacaccaaccacccagagaagaaaaattatagttcaactaataaaaaacttcaccaaatagatagaattcactggcatcacaaaagggaagtgcaacttttctaattggtaatataaaatgcaaaatgtaagaaaactaatttttatctacaatcaagtgccacatagctaaaatactgaaaattttctttacaaaattacataaatgacacggtagcattatagcatagttaaatgttatacagttttcatttaaaaatttcattagacttgatcccgcttgtgatccctcaagaatcctagtatgtgtctagaaggatctcaaagatatacaaatacataataagataaataatgctatctaaaacaaataaaagtaacataattagtggaatcccatagtaaaggtactccagatagtgcaaaacaggcacaccagtgatatgtaatgttcttttacgataatctaacacattaagatgcaaccatggcaataagaaaatgtcaaatatcttgtagcagctctctgtaaaataaatgtgaaaaatttactaaccatttggagatcacggcttcctgaagtactttcgactagatgaggtcgggctcggacatcataaatgacaggcctctcaaaccatggaataataatgtgggttccttctggatatacctgcatacccaatataaagataaaaaactagaaaaaatataaccaatgtaatacaagtatccctgagcaataataacaggtttaagaactcaatagaaaagaaaaacagtaatcaattaagtagaacatccaaccaataaaacataattgcttttcctttttcttcaacaatctctatttacctcaaaaagcaaggtttataactctcagcatgcagcaacctattaagagagactactacaaataggaaaaaagttaacaaccttgtctttgacaccaacgatacggttgaaaacaatagctctgtgccctccctcaacattgtagagactgttagttgcaacatacagaccaattccaccaataataccaatcttaagcaaagccgaagccgcaccacctggaaccttaggaactttaacgttgttcaagttcatttcttgttcctggatgtaagcaaacttcaatatttccgcattacaagttagaaaagataatttttttaaaacaaagtaccaaattgcagctgctagacccttaggagctcttagctgctcctgggctcttactacgaccattagaaatatgctatcaaaattggaaaatccgatcctttctaaataatgataaactttaaactattgttattattattatttgagaaaaataaactttaaattctaattcacaagaagttaatcaaaacttagtaatccagacctacatgtacatcatctaaacaaatgtggacttgcaaccccatcaattttaactccaaaaaagttgtaaaaccaatggtattgatcaaataatcaaagggttcatatcaatgagctgattggtctactgaaacagaaccaactacaattttttttagctctccaaaactagaaccaaaatgaagcataaaaaaaaaaaaaacccaaattgaatttgtcgaattatgtccaacaacagcgtaagaaatctaaacatttcggtataaaaaaatatatacagatttcatttcattagatccaaaagatgaagtaaaggacttttcaggaaaatgaatagggaagtgagtgacaaagaaaagtaaaattaccttcaaagtctcaaatgctcaacttgtgggagaggaaagggttttaggtcgaggagttacaggcagggtaagaaggcgaagaaagggttttaaggtgcagagagaaggggagtggggataaagaatagggctttaggtcgcttaaggtccaaatgggcccaggtaagccgtgtccagcaaacaaaattgtatttacggcccaattatattaggcctatagtagaagataataggtattattttacaaatacacaaaaataacctagggttaatttcacaaaagcaaaaaaacaacaaaaatacggtttcacggaattttaaacatttttaagatttttttaattttatttacataaaatacggtcttttatgttgaaattttgttcatttgttgttaattttttgttatctatatattattttatgttgttattttcatgttacttttatgttatttt

SEQ ID NO: 380016 - DNA, 4752 bp, Cannabis indica
gagattgacatggaaatggtaaaggatgcagcacaaattgcaaatgcgatgaatttattcgaaacttccaaaaggttatgaaaccacattggaccagaggctcaaccttgagtggaggccagaagcaaaggttgaagtcaaactcgaactctttgatttctaacattgagcacaatcgctagggaatcggccatgattagtgattcagaaatcgtttactaacatctctttgtatgctacttccaaatgcagattagctattgctagagcgctctatcaaaaatcttcagttctgatattggatgaagctacttctgctcttgatagcaggtccgagttattagtgagacaagcattggaacggttgatggagaatcatacagttaagtaaacgaggaaatctcgatctagctctcacttactagtacaacctaaccccaccaaagaaagagttataaagaataatcttgattgctgatatatgtttgtactgtcacaaccaggtgttggtgattgctcatcaattggagacgattttaatggccaaacgggtgtttcttttggagaatggaacgctacaagagctaagtcgcaatcaataccagtcaagtgtatcaagagggctagtaatttgattgacatcatacagcaatatctacatgtaaatacttttataacaattcatatttcataacaccaaagtcataaaaggaagggctcattgcccagggcgaaaaagggttttaacaacctcaaaagttagaacatatgtataactgtattctaaaagagagataaccaagaaaaataaaagagagttcaccagtatcggatcaggttattggggggtgcgtgtgtgaggaggtcatgggattgaatctcagcttgtgtaactcaaaattatgcttcgataaaaaagaaaatatggtattcattttacatgttctagtcctttttaagtataaatcaattcaagttcatcttcgtaatctgttctgttgtgtgacttggagttcaacctgtacggagtgattagtgaatatattgctctggtcaaaacaacacaaaagctaactggtattaatccgattagggtaacatttgacataacaagctactaaaattatgagattaatacaaattacccttgaaaatagtgaaacaagtacaagcaagttattctaattattcatctccagaagaattcttgaacagattcttgccatgaaagtacaagcatgagcatgattaagaccccagcgagtccccatgatgagctcccaattctaagtacccatgacggatcaggagagagaataaacgaactgcttgaaggcgaagatgaagaagacgatgaaactgttttaatggcaataataagccctgctagaaccataggcagaacaaatccagaactccatttcgtttcaaaatttcgagtggtctctcttttccagctaatgttgtataaaggagaaagcactactgcagcaactagagctagtatcatggccactgatctaagagatgatgttggtgatgatgatggtgagttttggtatgtgcaagaattgtaggcactagccattgttataaccgtagaaatttccagtcttttttctttgaatgaaatgatttaacttgatggtcaagaatgtggttttgtgggtgatttataagagtaaaagaatacgatggtatgaatggttaaggaatctagttggaaagctttttatcataatattagaaaaagtgagatgatagccgtccaaaacgtgagaaaggaaaaaggtaaaaggcattgttaatagtatatattatcaagatgtgaaagtttttggaacaggaaaaggaaggtattttgaaaaaaaatgtatatcacaattacgaaaaaataagcattacactaacttgaaaacatcaactaacgaggaagttattttgttcaattaattgcacatattttattacatgattaattgatattagtacaagcatttataaaatcccaaacaaataagttataattatggtcacgatagatgatatgatttacttacacacgatttccttatagtcaagtttttaaatgatagagtacttttgtaattaagtttacataaatatcatgtataagaaaattagtgctagtttaaataaaagtagcaatgcagtgcaaaattaaatctctattttgttttttagaatatctgtatttagcttaagctgtgtcttaatatttctatgaataaatttgtggcacatatcattactcttccaataattgtgataacctgaatcagtggtagtagttagcattttgttcttagaatcaatactttttttgatactaggagaggaggggtttgaatttaagaccttttctgtttgaggagaaaggtggaaccactatagctatgcctgtgaccacttttagaaccaatacttctgcattaaaaataatcatacaaatcatcacttggtggtaattctattcacaagtacttctcatagactaaagttcacttggtacgtttgaggggaaaggacaccctctgtgactgcggcggcacatctgttgtcttctgttcttgttgggaaggtgtcgttgtcaccgcggcaggatcaatagcttcgtcatcttcctctatttcttcagctgcctgagcagattgtctcctcgggagtgccagctggtaattggggctgatcaatgtgtcttgttcgggagggagtggaacactagcaggccctgcaatagaccttggcaatggaaccttgtttcggtttctagcaagctccagtaggacctggtggcaaaagagtggtcaagaaaattcactatgtagtcctatgttttctacgatccacaacaatgtacattcattttttaagtatgatcaagaaaatacagttcagcaggagccggttacaaactgcgatcctattcaagcgaaatttcctataattccaaataacaagctccaagtatataaacttttcattgttgagtacatgataaatattcttcggttcttaggatcaaaattcaaagagcaattgctcaacattaatgaatcaatacaggagatgataaacataacagtaaaagaaatccttattttagtataagctcagttagtaatcatcaaagcctgctaaatgttcaaaaacgaaagttttaaagcatcgaggtgaataaaagagttaaagctaaagaaatttacctcccttggaggaggttgtgagaagctgaagttgactttggattgaatggcaagcttgacatcgtcagagtcgattgcacctttgcccgcatgctccgagtaaacctgtgaatcggttagaacatcaacaacatagcgataccaaagctccaagaattggtgaataacacgaggttcatagtcctccacgcccattgatttcaagagcgatttcacaatctttgcatccctgggcaaatcttcctctccttctgccattttttttagtgggtccttctcaaatcgaactgcagcataattttagggatcagatttctcaataaagcaaacaacccaccaatcaaaaaaaaggtagaatacccaaaactccaactcttaagatcgagattttaatggatatcatctctatgttttggtatcgctatgttttgaactccaccaattcaaaacaatacaacaatgatcaaaccaaaaacaaattttttgacaaattgttaagctacaaccaactcggactagctactgagttatcaaatcgcttccttttgcactgtacttcccaataattattttagacccaacagaatcattgcagtaacaaatatcaagccaaagataaattcaaacacctaagtgtcagccccaatagatatgcaaagcacaaagattaacaactttctctctaaattattgaattaagaacaaaatgaggcaagttttatcttatccatctcatctttgccgtttttatcaacaaaggccgatctatacaccaaaaacccagaaaatataaaataaaaataaaaataaaaacatgaaaagcaatactataaactgtaagcatgaattgaaagagcaccacagatgagagatacaacaagatttcgaaaacaaaaagaagtaaaaatggttcactaagcctgacctgcgtgagagagagagagcgtaggaggtggttccggtggtgggggaagcaattagggtcggcaccggcggtgtgagggcctgagaagaagacggtgaccgtggtggtgagttagagtgactcgattgagctcagagagagtagagagaagatgaaatggagtgagttagggtaatcccccaaaaaaaaagggagcgaggatttgatttttggttttgtcgagtatgtttggtaggaaatattttgggatggaaggaaaagttgaaggatagagagaaatcatttgtttggtaggaagaaggagggagaggaaagatgaaaggataccttctccatacaaaatctaatcctatgcacgggtgtttattgaatcacatccaatatttttatgcctatccagatccgatccaatcatatattggatgtcagattttactatccgattcgatccaatcaatttcagtcatccaatcgattggatgttggatttgattggttctattatgtatttcatatatactagttaaaagttaagtgccgaagtaaatattagttttattaaagtttttttttttttatttttttttttttttagttatg

SEQ ID NO: 380017 - DNA, 3743 bp, Cannabis indica
aaaaaggtatgttgggccaatactactacgaagttacaggcccaagagtcgaagaagagagaagagtaaacctcgcggtctagagttgactcacatccccacagctcgttcgtcttcgcatcttgggccacataccaaaggaaacagaataaaaagcgcatgtgtacgtggcaatctttaattggacgaagcaaccgtagtctccctgtgattggccagtgtatacaaaaaccacgttgcatatcgtagtcacgaaacaaagtccgtcagtttccacttcggaccccattttttataactgaacaaactttcacgcccagctcccccggagaaaggaaggaagtaaggaaaggaaagtgcttttgattttcctagaaaacattttctaggtaaccaaacaaacataacaaacatcaactttatatctcttctcagacgggtcctcatccattttaacatttttcggatctgagctcgcacgtcttcgatgatggcgcgtcgaagctcgaagctactcttcttattctgcgctctctgctacgttctcgccgtcattgccgggttcgctttctcttatcctagtttccttttctctcttttgaacttttatgcgcagattgaattatactgatacgtgttagttatgcgtttattgctgtagaaagagttattatgatatacttcaagtgccgaagggggcatcagacgatcagatcaagagagcttataggaagcttgcgttgaagtaccatcctgataagaatccgggcaacgaagaggctaacaagcgattcgctgaaattaacaatggtaatttcgttgtttaattgtggaatttttttgtagatttgtgatggtttagggttaattaatgtagattgtttttggtttttgattggttagcatacgaggttttgagtgatagcgagaagaggggtatatatgataggtatggagaagagggtctaaaacaacatgctgctagtggaggaggaagaggtggaggaatgggtgtgaacatcaatgacatattttccaagtaagtttctttcctttggggcttgaatgtttattacatggaaattattaaagtggaaagtaataaagtacactattagcaattggaactaggagattgtatttgtttgttttgttgttaatgcactaactcaattgctcagttagtttcctgagctgcttcccttagatattgtaatgtctccactttgccatctttgtatcttatggttttgtggtgtggatattttttctagtttctttggtggaggcggcggtggtgaagaggaagatagagttgtgaaaggtgatgatgtgattgtagatttggaagctacactagaagatttatacatgggaggatcactgaaggtgagaagtgaatgtaattaagagatttgtgattttacctgcttagtaattagtatgctattgccttgctatatttccactttgccatgttttgtgtcttcatcatttatgtgaggctaagtcattgagttgaatgttaggtttggagggagaagaatgtgataaagccggcacctggaaagagacgttgtaactgtagaaatgaagtctaccacaggcaaattggtccgggaatgttccagcagatgacagaacaggtatgcataattatttagaaatgtatagttagaacttggtgaaatttatgctgttttgttttagatgtccaatagatcctattctagaagaaagcttttatccatccgtaaaacttgaactttctatgagttgttttattctattgcaatacttcatcagctaatgtattgcaattctctataatgtccactttcaggtctgcgagcaatgccaaaatgtcaaatttgagcgagaaggatatttcgttactgttgatattgaaaagggatgcaagatggtcaagtaagccttcaaacttcattttgcaatttgtgctggatacttcgctttctttgcatttattatctatcatcaatgtatggcatgttaccttgttagagtagttcacccttttttctcatttatctgtcttctgtactcgtcatagtactttaactccaaaacatattctcactaggaaattgttgtgttttgttcccttttttcatgtaaaactgtatatgaatagagtaatgtatacacataaaattacacctaaaagttacacactaatgtggcataatttctgaccattttaaatatagtatagtgctactttgaaaaaatactagtgtctgtaattctgtgtccgtcatataagatcaatactttgtgaaaattagagcattaaaaacagactattgtgtagtgtgtaaaaggtttcttttatttggtgaacattcacacccagtattttcttgagttaattcactgacctaaagtgaataataaagaaataacgggtgatatgctttccccaggaggtactcttctatgaagatggtgagcctataatagatggagaagctggagatctaaaggttggttcatttgatggtagctctacttttgtgatgctagagtgttataagcttttagtttgtactgacagtaaaacacctcatttttatggcagttccgcatccacactgcgaaacatgaccgcttcaaaagagtgggcaacgacttacacgcaactgtcactataacactggtaattagaacattaatgctaccttcgtgctggttaatattaataagttttgtgatgaatctaagaccgaagtactgtctcttggcaatttgtttcttttggctgtttggatttataagtagccaacaatggtcttttgttattacttgtgtatcagttagccttggttttttacaaagagttcatttttaaatccttttttttttcaggttcaagcactcgttggttttgaaaagacccttaaacacctcgacgaccatttggtgaatatcagctcaaaggtaaacaaaaattcaaattttctcacctgctagaggcctcgttttcctcttaaattaagataacacattttttctacatgactacttttcagggaattacaaaaccaaaagaggtgaggaagtttaaaggggaaggtatgcctctacattttagcacaaagaaaggagatctctttgtcacatttgaggttttattccccacttctctaacggaggaccaaaagactaagatcaaggaaattttcggttaggtcatatagtttaactttttcactttttttctttcttatgggttaacatttcccattgtaatatgaggttcgcattacataaattttatggaggccagaggcttttctcccattttttgttgatgaggaagaaatagtggtattaattaatatatgaagaaaaaaaaatgataattgttttgttctgtaatactttcaatacctttcttctggctttctcttacttgtttaggcatatggttccttctcttgctttttcttcttgagaatcaagaaagaacccacgcttggaattgaccataattaatcaaatactacttgtttggatcaaaagttacttattgtgcctataattttttatttcctttcctcgttcaattcaatcaaatccccaaatgcctctaaacatgattacctttctcttacactttcatttcaattttcatgtttgtttgcttaggatattttatatttacagtttttggacactttttattacataatatacaaatggctaattaggatttttgc

SEQ ID NO: 380018 - DNA, 888 bp, Cannabis indica
tttttttttttttttgaatgaggggctggttaacattcttagttgcggttattctgctcatctgaaaaccactcaacttgttggttgatctgcataaaattgaataatttatgaagctatattaagcatagagagcattgtgcgtcgttgatgtaaaataccataaaagtcggatacaatggagtaatctagatttatcttggcagtatatcttgagttacttttaataaactaattaaaaatttgtgcagattaaattgttaaatagaatagctactttgaaagatgatggaaccgtggaatttgaagttccaggagacgtggattctctatcacttgcatctggacctgaacatactcacactgaagctagtgatagtgagcctcttgatgcaactgaccttcaatatataccaccgctgcaaattgtaatgcttattgttggcacacgtggagatgttcagccatttattgcaataggcaaacgtttacaggtgataaacagagtctatttgtattatcttagtcaggatctatttgttttcttttatacgtatatataacagtatgtgtgtgcctagtatatatatctatacacacattttatatcactgatgtgatacattgcagcaatattattctctcaaggcatatcttgaataatttgacttcatattttattttgttttatttccatttgcctgctattcgattcataagatgagaatgaagaactaatcttaatctcttgactattgatattaatgagtctatctttttttttttttattttattttgttgtgttgaatgttattttggatgatatggctttattttaatgcattggtaatgttgctttgtttttattttttattttttttctttta

SEQ ID NO: 380019 - DNA, 2280 bp, Cannabis indica
aaaaagaagaagaataagacatggccattacccatagctaatcagccagttgaccaaaaactacaatgatactttgctccttaatgacatgatgatgatatgagatcgagatcactggttttggcctcctttactgagcttgagtccataattttcccacaagtgatgatctccttctcccatcaagaaaggaaagcaattatcatgaacattattagcattattagaaggagaagaaccatcgttgacttgttgtagtgatctcgccccagccgtagtttgaccatgactactcatttgatcacatgaataaactcctcctcctcctccatgattatagttattattattattattaatattatcattagctgatgagttttcattagtagtagtagtattattatgaaataagtaattaccaatactactgcttcttgaattatcttttctcttcttactcaactcattattattattattagataccttcacataatggttgatactttcccacttgtctttgcacatcaaaccactcctttcataacccaaacaagccaatttagcagctatgtcctcccacaaaacctcctcaggaaaaccaccttgttcgaatctcgaatccatgcttgtccggaactgaatcagtctagaaacctcagattccggccaagtactctcgtcgcggtttggtgttaccctctcatcttcttcctgatcagcagctgtagctgttacagctgcagctgctaacattaaaccttcctcctcttcctgatcgggcgaagaggaagaaaggttgtaatgtacttcttttccagttaacttatgcaaagcatccattaaagcagcatccctagcttcaatccaagctctctctttggcccaaaacttgtgttctttattgattcgggccgattcttgtttcctccattcctcttcccttaaactcctctctttctccttttgttcgagggttctcatcagtttctccaaccaagtctcttgcttctccattagcttcctcatttgagaatcaatgaactcttttatcttcactttccaccggctgcttccaccactaccacttctctttctcttctcgttgctaaaatcatcttccgaggaagacgaatcgaactcagacgaattcgagaggcttaggctgctttgataaggtccttgataatgatgatctaataatttatttggttgagatgttgtagtagtagttgtagtgtttaaggttgggaatggaagattactgttattattgttgatgaaatgaggttctgggatcgaagatgatgagatttgatgatgattattactggttgttgttgaatctccataaagagcctcaagttgacgaaagaatctgtagtgtttaccatcttgtcttccggctttaccttcttttgtcttcttgtaatatttatacaagttttcaaatttctctctgcatttttttccactcctttggtacccatgttcttcacacatgatcctatataataataataataacatatgattaaaatataataaaataaaagtagaaggaaccctagctatctaggtagctagctagtgttataataattagttcaataatagttttaaataataaagctcataatagtttgtggaggatgtgatgatgatgatgatgatcatgatgtaagaaaatctctcattctctctctcttctgggatttaattaaaactaggagttatagtgtatgactgagatttatcccaataatatatatggatatttaaacttgaaaaacgaagacgagtagtgtagtagtagtagtagtactcggcctgcgtgcagagctgggcagctttcttacaatttttacagacatcttttcattatatcagaagaaaattgaaaaaaaaaatgataataataataaggcagaaaaagatgagtacttatacttaatataagctgtcaaaaaggtcaaccattctttcggcaaagccagaaaaacttgcacttaaaagaggagacacattttcaaatcagaaagacttaaccaagaaatacagtcttactcagtccctatcttattgagaaaatcaaaacacaccatttttttttatttagtttatactactcaattaactattattattagtatagtgtaactgtgttttaaccctttagaagaagaagaagaagaagaagaaaatagaaaccgtttgaacgtaacggctatataatagtgatgaggtatatacgaccagggccggccagagggtggg

SEQ ID NO: 380020 - DNA, 3327 bp, Cannabis indica
tttgagctggttttgattttgtttcccttttttggtttattggtgcagttactacaaatggttccaggtctaaaaaatcatagagagagtatgagtacgaacctctgtgtacattttgtaggtggtggcatggcagggataacagctgcaacagccacatatccattggatcttgtgagaacacgccttgctgcccaggtaataaatttggcttgcattgagtcactgttttcgcttaccattttgccggtactaattccttttttgggcggaaaggatgggttgacaaaatatttggaaatttagtaccaatgagttaggtccagtgatcagacgcatggtttcttcctgcgaggtctaggttcgactctttatgggactttttttctgtctccgaaagattgtagaatttgataaggcttctgcaggaggacttcatcatcttatataaatatatgtattattgtttgaaaattactttgttgctgctttcaattcattgtgtttatttgcatcattcttaagatcttggttttgaaacttgcagacaaatatgatctattacagaggtattgggcatgctttgcgaactattacgagtgaggagggtattttgggattatataaaggacttggggcaactctcttggtatggttggaagtagtttcacttttttctttatcttattttcattgcaaaatgctgtatttctcggcataccttttttatttctaggattataacaaattagaattctcaattctatacaacgtctaggggctaaaagcgtttcaggagcaaacaaatcataatggtttttgtctctattttcagccagttcacttgtgctaattatcctttaaataaacatctgattgctgctttatatcaatgcagggtgttggccccaacatagctctgagcttttcagtatacgagagtttgagatcttactggcagttgcataggtaatcagatatttgatttagtttctgaggtgttaatacgacttttcctggttgtcgtttgtaatattcttattgtttcgtcaatgctaatatctttagaattccgtatttttttttctcaggcctcatgattctcctgtcctagttagtttggcttgtggcagcctttctggaattgcatcatcaacaggtgagtgattgtttgtgaaccagcttgattgatatctagtttgaagcttttatgggattttctttaatgtataaattattgcgcagtagcttttattcttaaacttcgtgttcgtaccatattcccattgttagatgttttaattttcgagctttgttgtctctttgctgtcttgtttcttcgggtaaatatttgttctagttaatgatgacctttctttgtttttaatttttagactagcctcaaacaagtgcatccaaacccactgctaagtgcaaatgagattttggttggattacatttattttcataattagacatattttgtaatagatagttaatacatgtagctgtctactatgcttttgattgcagagaaacaaggtgtggtgcaggctctgcaccaattatctaaccagattgacccctagaacctgagaccagactggagtggtttttttagatcttggcatttgaaagttttagtaaggatgacgataagaaattgattttatttttctttgtcaatcatccaaattaattttatataaagatctttgctcaaattaacctatctttccacatttatacaatgacgtgtctccaaagccttgcagtgggttcctttattgggtggcactactttcaggtgaacctatgtcatctcaattataaatgtgagaggtgtcctctttgaggtatgcttctcacttggctttcctttcccaatgaatttacgggtattggattttgcaagccttgccaccgcatatggaagcactcttgttcagtgatatgctaatatatagattacactgcacaatccattatcatcataaaaattgttaatctaattttaatcaagtggtctctttgcatgtatgtgctggatattgtgcagtagagaaaagaactttcatgcctcaatcatatctagtggcttgagagctgaatatagctttgtattgttgggtttattgttcgtataggttctaattttgaccctctcatttgaacttcgttttactaactattaatttgtagaaccgaaactctattacggtagtatcctcttcttgaaaatgacctacacctctgttttctcacctactgaaatattagctggactttttaagtctgctaagcactttctattgcatgctgatattaaatgatctttatgatgtctttaatttaatggtgtgatatcagctgtatatatatatatatatatatgtatatagtaagctcttgttttgtagatttttattttaatggattttttctatttctctatattctaaccttgagaatataaaagcttttttctaaccttgtcaaaacaagtgcattggaagatcccatttggcagtactagaactatcttcaggtcattatattttgctctttactataattgtgcagcaacttttccattggatcttgttagaagaagaaaacagttagagggagcaggtggccgagctcgtgtctacaaaacaggtcttctaggtacatttaagcacatttttaggactgaaggtttgcgtggcctgtaccggggaattctgccagaatactacaaggtggtgcctggtgttggaatttgttttatgacatacgagaccctaaagatgctcttagcagatgatgatgataatctatagtagctgataataacactgggaactgcaactaaggtggggagactatcggaactgactgtttcataacgacagagctcattttctttatctggattctcatagtagttgatcataatattgtgacactaccgtgggaattacatttttccatgtatagatttcatacttaacattacacattataagtttatggcagcaaacttgttctccccttttcttgatatttcatacttgctattagttttagttttagttttaattgtagatggctttatggtctttatcctataaaataggaaaaggaaacctgtgttggatttgttcaatttaaatgctggaggttttgtgtttactccaagtaacttgtagtgctataccatttgagtctttatcccgaaacatgtatgtgcgagtggtactttccaggtccacctcttactgatacaacgccttaatttcagattctataacacttgccttactacttctacaaagggaaaa

SEQ ID NO: 380021 - DNA, 2966 bp, Cannabis indica
ggcgaattctggagcaacaatgacaaaactggatactatgttaacttaggaggaaacttaattacctgatgttcaaaaaacaaaaggtagtagcaaggtcctccaccgaagctgaatacagggcactatctcaaacagccactgaagcggcctggcttcatgaactgttcaaagaaattggcttaaatcacaaaataccagttgtaatttggtgcgaaaatgcaggtgctaaacaactctcttccaaccccattttcacaaccgaaccaagcacatagaggtgaatatccattacatttgagacttaattaaacagaacccgattgaagagagacacattccaacaactgagcaaacaactgatgtgttcactaaagccatctcaacaaatcaatttcattattacaaggacaatcttgttgttgttattataccagccaagcttgagggagcatattaaattgtattactgattcttttggacaggtatcccaagagaattctaaaattaggaacattcttcgtgaaaatcctaaaacacttgtcagcataatagcaataaggaatattttatttttagggttgtaccctctcattgtactatatacacatcattattactgtaccaatttgagcactgaatatagagtgaatacagagcaaaatttttgcctcttttctcttctctgtttctttttattttctttctgtcatgaaactcaaaacactagtcaagatcatcacctaactcgggagtgatttatcttcatttgaaaggacggaaagtccactttcatttcattcctcttcctacaacagacactactccattggtttggcaaccctgtctcacaaagtgttgtacttaaaacaagcgacatttgaaatcttattgatcataggttatacatgaccatataattttttttctcatgggttcaaccgtagcaaaaatttgatcatttaaatgctttggtcatctgtcgattgtttctgacaacaaagcatcagtttcgtactcttctttttttttcttttggttcattagtggtatatttggaaccaaggagcttagtgcgcgccattgtttgaaaattggatcgtttttattagcaccgaacgcaactttgttgacttcattagaaagaaagaaaagatgcaattgtacgtaggctaattaatattttacttccaaattttgaaatttgtaccaaatcatgccccttgaactttttaaactattgagattgttagtttcaaggaattttatccaactttagtaaaaaaatttaacagatgaaagttcaagtgacataatttagtacatgtcaaagttcaagagacataatttagtagatatcaatgtctggaaagcatagtttagtacataaacaactactgaaatagtaaaattgaataaaattaggcaaaagtctttaaatctaacaatctcgaaaaaaattttaacggccaaacaaatttaaaaacataatttaataaatgttaaagtttaaggagcaaattcctaattagccttgtatgtaatactgtcacaatatttgtaaaaatagcctgtgagtccgtgactcattatccttaaaacagagatttcaatttacaatactcaattcaaacgttttacacatttatagtcaaaacatggttttttaattgaaacgcacattcaaagaaaatgattacatttgttattcaattttctcatgccaagattaaaaattcatccatcaagcaagattgaaagattatacacaccgagaaaaattatttcgcatttatacagtggggattacataagcttcttaaaaactttaagctaatacaagtagaaaagcaaatatataaatatatatataacggttttggatacaaagcaaggattgacagtaaaaacataactttaggacatatggattgggtgattatcacatcaccttgtttttgtttttctttttctatctatttccacagcaagaatatcgtcttttgctttatcgcaaagtcataacaggccacggagctactcctgtggctggaagtgaaggtcgtataatgggaacacgtctcaccacagaaaatgcttcgttaagccgtgcagcacgactcataaactgggacaccttctgcaaaataaataatcattccaattttaaaaagtagttcttgcaaacatcgatcaaatacgtaactaaagaagctctatcaattaatttttcagcatgaacaatcccagaatccgttttggtgagtggataaatgttagtggtgtgattatatctatcaaaaacaaaacttgtgtgtttcgagataggattttggtaattagataaatgctactggtgcgattaaatttataaaaaaaacaatcccataatctagatgctattttcacacaaacatccacattgctactgataaaatcagcccaattaagcttagagattgtttcaaacatttgactacaacacatcagaagatatatacaaatttcgatcaaaattactgacatagaaaaatgaatgcaataactgaccttgtcatccatcgtcaccttgagctgcaagcttcgggtcttcctcttcatcttatacaatctccttcccaacataacgatacccaacatggccgccgccacagagaaggtccaaacagggctaaccctgaaagcacaatacttcaacacctcaaatggaaccttccaccaaaccacagtcctcttctctacctcaccatcattcgatttctcctctgatttcacttcatcaattgcagcactttcattcgaaaaagcagctccttctccttgcaactcggtggtcgaatcaccaacgctcataactgtttccttggcaaaatagccaaatcccgtagccgaaataccatcatctccaccagtatcagaccagaactcgcgggtctccttagttagggtttgaatctccccaatt

SEQ ID NO: 380022 - DNA, 2053 bp, Cannabis indica
aggcgcacaatatcttgcttggggaaagctacgaagcttgtttagctgattttggtcttgccaggttcgtcgaagatgatcaaaacggttcgttttcggccaaccctcagtttgccggttcctacggctatattgcgccaggtataagcttttaatcatttttcaaattaacgttgaaatcatgcatgtatactaattaactcgtgtttttggctttattatataaatgatggtttaattattttaactcaattatgattggtttaattaatatgtgatggatgtgacaaataattacgatcgagttcgagtggagtggttattcaattattcccttttaattattatttgcatgcattttaggcgtagacaaaagcttttctttttagcctaatatataacataatgatcattttgtttgtccgtacgtaccatgcagagtatgcttcgatgacaaaaatcacagaaaaaagcgacgtgtatagttttggagtagttcttatggaaataataacaggaaaaagacctgttgatccttcattcccagaaggccaacatgttatacaatgggttcgagaccatttaaagtgcaaaaaagacccaattgagattcttgatccaaagcttcaaggtcatccagaatctcaaatacaagaaatgcttcaagcacttggaatatccctcctctgcacgagtattagggccgacgatcggcccagtatgaaagacgtcgccgttttgttgagggaaatccacaatgagcccatcacaggaaaagaggcccaaaagcccaataccaaaaaaatagataattctactaccaccacaacaacaagtactactaactcttcttctgctatgaatgttgtgaacccagctgatttgttgctcctccaaggctcttctcgttgctcacttgcttattcatcgtcttcatctcaagaaacagtcaataataacgtttgaaagtatatatatatatttatatttatatatgtacacttgttaggggtaaaatcacttctttgtttttaattatgatcattatttgttattagatatagctataggagtagagaacagagctatatatgttttgaggcagtgtaaaggtaggggtatgtggtattaattatttagttttttgagttttcaagaaagaagataaaataagaaaattgacaagaagaatatgtatgagaggagatattcattattatttactttactagtgtgagtgtacagctagaaggctatatttatgcttcttatttattcatttgaacttaacttaagatttaactatttacttgtggatgttattagatggtgaattaaataaatatatatagatgtatttactaagctattcttttataatgatatgaatttgcttgaatgtgaagtcatttttaaaacatgattattgttgttgctacaaaaagaatgtgtttgatggagatttgtgcatgtggtgttttatagtttcctcaagtttatattgatggttagttatagttagtacatttcttgggaatgtgaattaatggaaatagaaagaggttgaattgtgtggttgtgaggaaatgtgtgcaataataatgtttgttcttcttatgaaattaccttttctaattcaaactcaaactcaatctgtacttataatttataaaaataataataagtgtgactttgttcttattcacctaccccatgtgaaaatgaagagatcaaaagccctagttcgattgattaggattagaattgaaaaacaatattgatgcaaaaaaaaatctcattctcttctagttctactattctaatgaattagataaggtcaaaataatttattagatctttttttttcttattgaacataatttattagatcttgttataatagtattcacatcattattgctgtttaattaaatagttaatatttattggattgaaaaccaagattaatgttattaatgagactgactgaaatgagctgattcatattttcattaaaagattattttccctttttttttttgtcatatatatt

SEQ ID NO: 380023 - DNA, 2822 bp, Cannabis indica
aaaaaagaaaactatattcccttttcaaataaatcttctgtttatactattttactgtacgtggttacttatatgtgatacttgaaaacgtacaatgttttccacatacagctcgatctaacaacttttattttattcacttgagaattaagttatatatcataaatcaataataagaggctttaccatatatttaatatgattgatatgtattacttaaccttaagtgtattgtgtcggtgattgagtttataagtttatttagatgtagactaaagtaacaaaaccatacctttattctacatctcattaattaaattcatattttaactcaaatccaaaaattaaactttactaatctgttttttattttttattacggaaaagtcagttaaaaaaaattaattatttatcttcattttaaattaattaattaatgaatgaataatgagaaaggccaagaccataccacgttagcatattttcattattaagttggcctatttaatctgtcccattcctctctgtttcctccacactcactcttcttctctcctcatatctctctaagctatttctcagtgcgcactttaagcaagagagtgcgcacattaatctcatcatcatcatggatcgtaaaaatgtcatcttaatcggctttcttttagccattgtggcttcagtctcggctcaatctcctgcaagttctccttcggctacacccgcggctcaagctccaccaacacccacaactccctcagccgcgccgccgaccaatactcagccaccaccaactccagtcgctgctccaccacccaacaaccagccaccaccagctccggtagccactcctcctcctgcctcatcaccaccgccaactgtccaatctcctcctccggtcgccgccactcctccacccgtaagtgctccacctccggctactcctcctccagccaccccaccaccagccactcctcctccggccactcctccacctgccactccacccccagccaccccaccaccagccactcctcctccggccactcctcctccggcaactccacccccagctactccaccaccagctcctctcgcatctccaccagccgccgttcctgctccagctcctagcaagaagaaggcttctccggcaccagcaccggtagcactcagccctgctgatagtccaccttctccacccagcgaggctcctgggccaagctctgacaccattgcaccaactcaggatcaggtacattaatattttccaccatttttgggattcagatcgttattgatctgactgagctcatttactctagaaaatagttacattgttattcagatccttccataatttcttttttaatttttaaaattaaaaataatatttttactattattaaaattaaaataatttagaaatttatataattcttaatttactcttaaaatattgttttttaaaaatattattattagacacggtggtattcaacaatttttattgtgcttttacgatgtttaaaatattattttataattacactaaaaatttaaccaagcagaatctaagttagaagaagacgcggcgcaatgtagttgatatatagtgggatttgctatccaacgcctggggtatgaggtctcgtgtttctcccaatattagatggactcagattcacgtgggccttaggatgtgtccggatctgattggatctagatttgtatagtacaaataaaaagtctgtcaatattgacaatggtctgatttggtactagcatagcataaaatatcgtactcttttcacagttttcactagattagcataatacgtactagtactactaggggtcagaacacactacacaatgtgagtctaatttaataatgtcatggagaatgggcccaaaatgggcccaatatgtataaaagtaaaatataaatttttgaaataataattgttttttggtgacagagtggagcagagaagatgttttcagttggaagcttgttgtttggatatggtattctgagtttggtgctgtagaggaagagaaagagagattattaacatctttctctgtctttgatttttatcacattgggagctcagtgttgtgatttccaacttccacttttgtacttgccttattgcagtgttatttcattttttgtataaatatatgtattaagtatattattattattatgatcgatcactattggttggcagtcttagcctttgtgtctgttactacttttgtactttgaactaatacaccattgggttgggttgggttgggttgggttgcattctttggaggtttatgaggggagcttttgtatttctgattattggatgaggacttgtttttctattgaatttatttagacttacctcttaatgtctttcctttttatttatttatttatttattatattaagctacttttcatatccaaactatttacaaaataatgatttgtatttgctttcaaaaacttgtgttgaaaatgaataagtgaaacttaaacgaaagctcattaaatttaaagttaaaaaaaaaataatacgttttagatgtataattttgttataatgtccaatataaaatttaagatgtatactaaaataaaggaaattacgtcatttcattaataataaaaggaatatttttggtgaaatatttttaaggctaattaaaataaaaactttaagagtaatttgcggcaaaactctcccaactatcaatttacttacaaaaaaccatcgaaccttaaagttttttggatggttttttgcaagtaaattgat

SEQ ID NO: 380024 - DNA, 860 bp, Cannabis indica
tagcatttctcttattttaattaattttcgcttgggatactacttggtcactccaagtggacttctctttgactttcgtggtaacacgtgtcttatttgaaaagtgtgtacaacaattagtttttgtcatcttagtatttgtgtcaatcattatatatttactttatgcgaaatattgttcttttaatacatagaagcataaatttaaaaaataaaataaaagtaaagataccaatggtgatcaaatttttcgaaatcattatgtttcaacaaaattgtatcggagggttttctataaaaagaaaatattattacgtgcaattgattagctagcttattctagtatatctttttcccttttcttgacacgttaaaacttataaaccaaggaagctatcattctattttttttttaccaaaacaagtttgacacctagtcctcatttttgtgaatttggaaggcatgtatagtatcaatcattctacacttgtgccatctgttgttgaagaaaagtagcactaattgaacacataggcccaactcccttttattttccacttttcaatcacaccaaaatatagggtccatgactttgtttgtccttcaaagatcaccaaatctttttttctttttttcttttttttttaagtacaatataaaatgtgggcaattaataatataattaccaatttcatcatctagaagtctaccaatgaacagttataataacgtttgataacacgtttttttttatcagttttctatttttaaaattgaaaaagtgaaaatatttttaaaaaatatgttcaataaaactattttcacttttaatttttttttaaataagaatcaaaatttt

SEQ ID NO: 380025 - DNA, 5023 bp, Cannabis indica
tattgtaacactataaattattttagatttttttttggttttaaaaaagttggatgataatctaaataagatttcttttgtccataggatttactttacttttatttatttgttttaacttgtagacattaggtatgagtgagaaagtatttagtaggtgcttgcatcatcatcttcacaacttgatcatcaaaacaaaacaaaaccccttttcctttttcaatttaattatttatttttctatatgagaagtgagcacagaagagtacagagttagtagtagtagtagtagaagtagtagtacaataaatactgttcacaacagtactctctcttgttctattgaatcagcttttaaagctctttaaatggcttttagattcgcaagattttactcttttattaatttgttctctcttcttgtctttgtacttttttttattttaattttttctacaatatatatatataaatataacataatttgtctggtaaaatgatggtgaagagacctggcataaaaatcccagatatatatttatttatgatgattttattgcagtgaaaaaacagataaaatatagaacaaggacaaaggcatgggcccctatttaaagcctgcaacacaaatgagtgctgccactgccactgcctcagcctctgcaacacacttcactttctctttttcaattttcctttcttttaaaaccccatttatttcatcatcatcttcttcttcataatctctattagtaataagtttacttgtatggtttttagtattattacatgattttctgagttgggttggattgggtgttatgagtttgagtaaggtggggaataataatgcatgaggggggttaaaagtaagaatttttattttttgaattttttgaaaaagatcacttatttatttatttatttcttttgcgtacaaagataaatcaaagcataaccttctgaagtctgaactttgtgctgcttattttacctatttttggtacccaaaagaaagcaaaatacattatatctattattatatgactgtgttgtcaatctgtagtatctcaaaaaacagaacactttatcttttgaaagattggaaattttccaagggtctgatttgggacaatcccatgaatcttcccttcattgaacattcccaactctctccatctccatcatcattttttgcctttgtgggggtcagctcagtttgattcttctataaacacaaaggtgagtgagcctatcattcttcctcttcttctttggttttacctgaaaacacttagttcatgatgattctgaccatttcaacttctttttcaggtgtattcatgtcaaaagtgaacaactttgtttgttttgagtgaagggtttgattcaatgacagtgtttcaaggctgagttttttttttcctttctgatatggagagtaataataatcaaacctttaatataccacagcaaatgatcatgacaagccgaaactctctgctcacagatgggatttcacctcattcttcagccataaactcctcctcctttgatcttcagtcttatctatatgatcttcagtattacacaagagatgactcagatgaggcctcctcacttggtggggttggcaatagttcaagtgccatatgtaataatagcactggccataatcatggccttcaagaaaatctcaacaacttagccatttcggttcctcatcaaatgtattcctcaaatggtgtcttgtctggttttgtttctactgaaaactacaacaacaacaacaatggttatgttacttataatgatcagacttcagcatttcatcaaacatttgatcaaaatgtatggaatagtaatagaaataataatcacattggttcttcagaattcagtaatgaactctctctatctctggccacatctcagccctctgtcatcacagggatgactactacaattccaggccaatgctctgcatctgctatgcctactggaaacactaccgaaacaatgctggtttctgaacaagcttcttgtagtaacaacagaggtgaaaatctttcgccgagtttcggctcttacagaccactgcaactctcacaagtgatattaggatcaagatatctgtctgcagctcaagaaatacttgctcacattgcaagcttttcgctcgaaaacatcagttatgatcatcattatttgagtggtaattacttgatgaactcttgctcattctcaacaatgtcaccaatggattcaacatctgatggtggcagcatacttgaaggagaaactgaatccgaaactcgcagaagagtaaccgaaacaaagagagcaaagttgctgtctttactccaaatggtaagtagttttttgactctaaataatgaatttcttacaaaataaactcattgaatttacaaaaagcaatattttttgagatgggattttcaagaaatcgttgaaaatccatataatagattgttaagctaacaagtatttctctaatagtcattttaaaacacttaatggtctccaaatggcaagtagtttttgtactctaaagaatgaacttttacaaaataaagtcattgagtttacaaaaagcaatattatttgggatggaattttctagattttgttgaaaagccatatagattgttttactaaccagtatctctctcaaagtcattttaacaaaaacacttagagctctccaaatggtaagtagttttttgacactaaagaaagagtttttataaagtaacctcattgaatttacaaaaagcaatctttttttgagatgggattttctagaaattgttgaaaatccatatagtttagctaacaagtatatctcccatagtcattttaacaaacacttaaaggtctccaaatggtaagtagttctttgtctctatagaatgaatttttacaaaataaatctcattaaatttacaaaaagcaatgtaaattgttaagctaacaagtatctctctcataatcattttaacaaatacatagagttcattctgaacttaccaggttgatgagcgttataaccaatgtatggatgagattcacacagtggtatcagctttccacgcagcaacagagttagacccccaaatacacgctcgttttgctctgcaaacaatgtctgtactgtacaaaggattaagagaaaggataagcaagcattgggtagccatggaaatggatatggagaagaacaagtgttgtgttacggagaatgaatggggagttgaagaagtgaagaagaagaaggaacttctatggagacctcaaagaggtttaccagagagatctgtgtctgttcttaaagcttggatgtttcagaacttccttcatccgtaagaaacataaaccctttcttaatttttgttttttcattaggaatatttgcggctaaatttctttaacatttataatttgttatatatattatctacttaaactttattttataattttattgcagatatatattttttagtcattaagtgtcaactcaaaaacatgtaacgatatattattagattatgtaattaaatatactaaataaatatatctttacgtgtttttgagttgttacttaacggatttaattgtcactgaacaattacaaaagagtataactgtaataaaattataagataaaatatattctcggtatttttttgaatagtataatatgtgtaacaattataaatgttaatagaattgcaaatattttttttttattgttattaaacttgattaaattatgtttaaataacaaattttaattgagcgagtaatttcgagctacaattattggtcgagaatctacaaaagtattaaacaataatttatgcagattcccaaccaatctagttagttaaaatgttatggtaaattaataatttttctaaaatatacatattgatgttggtgaaaagtatgaagtttaatattaaatttaccaaactaaataaattaaaagaaaaataaaattactaaactatgtattataaaatatatatctgaaattatttaaaagatatattaagttgtttgataaaaaagatggatagagaatatttattaataaaattattatattattcttattcaaaactttttaataataatatattaaaaaggtatatttgtaatttccaactaatgaagatggagagtgtgaccttttatctcaaataagtagtattattaagattattaataataataacaatagtaattatatatgtatctttgatgggttttgattatttttacagatatcctaaagatacagaaaagcaagtgctagcaatgaagagtggattgacaaaaaatcaagtaagtatgtttttctatcaattttgattgtcgttttttgtatttgttgtcgttttgatgtgtaaatggggtttattggttgtcgtttttgtttaaacaggtatcaaactggtttataaatgccagagttaggctatggaaaccaatgattgaagaaatgtatgctgagctcaacaaaagaaaccaatccaacaacaacaacaaccaaagaattagtatcaaccacaacattattaatcaaattcaaagatacaattaattaattaatggatatgaaaaaaaaaagaagctaatttttaagttagataacattataatttttaattaggatcgttgtattatatattattggaatattattataaacttatctaattttaaatttcttaggtggtgttcaggttggaatgaatgaaaatataagaataagaatgaatatgggaattgaaataagaatggaatagaataatatttaaaatgcataaaaaataggtttttttaataaatgtactataaaaacaacataattacaaaaaatgtgcaaaaaaaattattttaaaaacttatacattttgaaaacttattacatgaaaccatacattaattttaatcattaaataataaaatatgtttattaaaactcaaaata

SEQ ID NO: 380026 - DNA, 3333 bp, Cannabis indica
aacactttccgccattaaagtggtttttctcttattgtattatgcttaacaagttctaataatcaacattttctattcaggttggataaaggtgtaatagtttacatatgtgataaccgtggtgttcgagatatatatgatacggatggaagcaatgcaatagcagcttctgaacccctacgttgtgctggtaaaatcttctttttactttgcatgttgtgttctaatttataattatttacagaatctgatgtacttgagttgagctgtgttcgttatccaccatcaacttgtgctaaaagatcagtaacttgaataactgacccaactgagctttctgtaggttaacaagggaaccgctagtgcgagtgagatcttagccggagcattgaaagacaataaacgtgctgtattgttaggagaacctacatttggaaaagggtaatctatttaattatttatgatccaatccaaacagtgcattattgcacaaatcacatattcctgacacactgcattctatccaacttcccagcaagattcaatctgtttttaagctctctgatggctccggattagctgttacagttgctcgatacgaaactcctgctcacacagatattgacaaggttttacacaaacaccaaaaacatctcttacatataaatgcattacacaagcaaaaaacatctgtgtctctctctcatgttgatatatatttttttttcttataggttggagtgattcctgaccatcccctgccatcattatttccgaacgatgaagatggattttgtggctgccttcaggactctgcatcggcttgctatttgaaccaagttcagttattttcccgatgacgacgtcttacgttgattcgaagaaatactaatcttttttttggctgtgttactgtattcttttgagggttcgttgtatcggttaagctggacagaacccagaactggagattgctgaattactaaaaatatcatttgggactggatggaatggagctattagttgttcaaagttctactagcttgatattttccatttatttcattgttcaaactaatccaacttggtcagatactaaactaatttaactgtactctcatgttaattttatgtctaacctaattaaaacattaatttttctggacaaaacaccacttccaaatttaaattttactctccttaagataaaactctattgagcttaattaaaacaaaaatatcacttaggccaagtctaatttaccaaaaatatctcttaggcccagccttaatcctttgagtaattttttttagaggaaacagaaatatcaaaattgaagagaatcaaaaagccaatgtagtggatgtataatggaaaatatatgcagtaaaatataaaggaaaaggggactataagatttagcattagcaataggaagatgtatcctttataaactttcattagttacataagcttattattctaactaaatatattgttattagataatagataatataatacaattacaatgttcatttaaataattttgtataataaccccatcatccaaattggataatgggaagaagaatgtatgtagctaaagcatgctccaaccaaaaacaaataaatcatcagtaagaacatactttatcaaaacatcttagtccaagatcccagaaatgggaagaaagcaatcaacaacctcaacaacaatggggtgtcacttttcctttctcttcgacccaacttacccttatcacccgatgttcttcttgatccacctctcattcttgatgacctacccgaagatttagctctttcgagatcatcccatccaccaaaactggttccactttggccacccttttcaacaggctcttcatctccaactacccatgattggtacccggttttttgtctaccaggttcctggcggtcttcatcgtactcttcttcagtttcggtatcagttacagtgctgctggcagctcttctctttctcactcttgtcctcctgcgtttcggtttactctgagactttccccatagtttgtcaaatgcaaaagccaatgctgactgaccgagcgggagtgctaatgccatgagaaaggcttttggaccagtagctagtaaccaagatgcaaatataactggaagcatccaaccataggacttgaacacctgcaatgacccaaaaaacaacacaacattgtaaatccaactaaagaatttaggaaatcaaaatctaaaaaataagaaacttctaatccttaaagtaagttaaaaggaagtatgcaattgactagaaaccaattacaaactatgggagcccttaggcccctttgatgcaaagagttttactcaatacattccataccctctctatttccttactcacctatatatagtaatttcctcactcaaaactaccctcccaacaaaaactcatttaccctttttattctagtacaccatattattcctagggcctaacagtaatgtaattcatactaaagactttctcatagtaacagagcattaaaaccattaggtgatactcatcaaatctaaatgttcatattcccaaaccacacaataagacaaatatatagagtcaaaattcctcagttagactctgattggatttggaccaaataattacactaagccaaattagccaaagttggtgttgagaaataatccctgcaaaacacaaccaagcaaaggcaaagaacaacaaaaaagaacttgacagaaaacaatagatcaaatcaaacacaatgaaaacagaataaaacaataaaaaaaatgaacaagatttacttggttctgacacaatcaacctattgatgtaactcagaatgattacacactcaaagtctctccaagcttcttcttactcgattaagagaatgtctaattgtagtttgttcttgatgttacatcaataggttgatccctcctaaagatatataaaggtgtaagacaaggctgtaacttaacaaagactcttaaagaatagtctttgtacagttaagttagttataattggtatttaactaactgatgaatcaccaaaccaagtagaccaatctgatccgtttgagttgatgaaatcactagtcttcacagttggatactacataagacatgtcaaagaagaaagaaattgtaaccaacagaagatcacactatattgatcaaagtaaggttactagagctctcaccaaacaaaccacaatgaaaataaaagacacaaaattttcttcatcaaagattacaaaagacccatctttcaattcaagaaaaatcaacataattcagct

SEQ ID NO: 380027 - DNA, 1177 bp, Cannabis indica
acatctcaagaatgaaaaacataatgaactgtatcccctaaattaaagtgtacaagtatgagagtaatgtaaagaagaaaaaaaattatgaagtgagtgatgctgtagtagtaactccaggcaatgctggtgtagcagttgcattgtctgtccaattcttctcaccccaatgccacaacatgctctcccagaaacagaattcctcgaaacacgctttcaaacgcgtgtccttgatcttaatcttccagtgaccgtctgtgtaatttgctttctcggcctgccttcgatcccactccaacgctgctttctgcttcgaccgaagtaagcagtacttgtgcaagttttctggcatggcgtcgtgaactttccaccatgttttgtgtgcaacatcgctcgcgaactcctgtagaatgtcaacgttccagttgcagtcatagtctcggaaacaaatccacggcttgtttcccagatagtgtatgacataaagaattggtggatcagcaccgaagagtcgagtttttgtttcctttttctcgggctcatcgccttcccagtagtgttttaagaagttcatgtgttttgggatcctgtgccaccatgtaaagatctcattaaggtatccttggtccccaccattgtaggacacaatttcattgatgtgatccattaacagctgaaatgtacaatttgatggttcaataaccataacacctgagttaaatagagtagcattgtttccaatggctgatatttcgggcatctcaaacaagaaatcaatgttcctaagaataagcaagtcagcatcaatgaaaataatcttgtcataatccgtcaactgccaaaggcgaaacttgctgtagttccactcgttgtatgcctctggttcagctttcgggttcctaatcctttggattgtgtgaatcttccaaccggctgcctctaaccctcctcggtgatagtcactaattgtatcatcaacaagtatcacaagatctcgggttgaaccagccattcgaatactctgtgctgcaacaatggctccacaaacatacacatgggcggagtgaaggattgtagcatatgcttctcggggcgctctttccgaatgaaagttctctgcttacaactacttggttagttttccaaaagaattatcaaagaaacaaatttacaataa

SEQ ID NO: 380028 - DNA, 2730 bp, Cannabis indica
tggcatagacatgtttgatccactgcagatcccgaaaaagacgcctctgttactgcaaacactattctatctattcgttgcagctgagtatcctgtggagaagctggcgtgtatgttctgatgatggtggtgcgctactaacatttgaggccatggcagaagctgctagttttgctcatttatgggtgccattttgccgaaagcatgatattgagccaagaaatccggaatcttattttaatataaagagagatccttacaagaataaggtacgccctgattttgtcagggaccgcaggcgggtaaagcgcgaatatgatgagtttaaggttcgggttaatggactccctgagtcaattcggagacgttctgatgcttataacactagagaggagattaaaatcatgaaaagaaggcgtgagcttgattatgatgaactggaggaagatgtaaagatcccgaaagctacatggatggctgatggaactcactggcctggtacttggacagtccccaccacagagcactccaggggtgatcatgctagtatcatacaggtactagttttacattaattctttttttagtttgtttaaattaggctgttcattatctaaattaaatttttaaattaacatgattcaaaaatttgctttatgcaattccctattttctgttgtgctgttatcattaatatgggttatcatgtttgcatcataatatgatttttcttttggcatggaagagttagccgcgttgttcattcgagccatttctgcgtgaaccatgtcacttagttattgatcgtcacttagttattgatcttggaaatgtaaatcatgtgattaattgcgttttagaaatatgtttgatctatattgacttattaatatcattgtaggtgatggtgaaacctcccagtgatgaacctttgacaggcacagaaacagattcaagctccatggatttaacggatattgacattcgtcttcctatgcttgtttatgtttctcgtgagaagcgacctggctatgatcacaacaagaaagctggtgcaatgaatgccttggttcgagcttccgccatcatgtctaacggccctttcattcttaaccttgattgtgatcactacattttcaactcacaagccctgagagaaggcatgtgcttcatgatggaccgtggtggcgaccgaatttgttatgttcagtttcctcagaggtttgaaggaattgacccttctgatcgttatgctaatcacaacaccgttttctttgatgtcaacatgcgtgccctcgatgggattcagggtccagtttatgtaggaacaggatgcctctttcgccgtactgctctgtatgcttttgatcctcctcgaacaaaagaaccaagcagttgttgcgactgtttctttacccgccgtagaaagtcttctgttgcttctgttcctgatggtgcctccatagaaggaaaatcagtagactctgatgatgaagagatgaacattgctcttattcccaagacatttggaaactcaagcttactggttgattctattcgggtggctgaattccaaggccgacctcttgcagatcacccttctgttaaatatgggcgaccgccaggtgctctcacccttcctcgtgatcttcttgatgcatccacagttgccgaggcaataagtgtcatttcatgctggtatgaggataagactgaatggggtctaagagttggatggatttatggctcagttacagaagatgttgtcacaggatacagaatgcacaacagaggatggaaatctgtctactgtgtaaccaaaagagatgcctttcgtggatctgcccccattaatctcaccgatcggcttcaccaggtcctccggtgggctactggctctgttgaaattttcttctctcggaacaatgctcttctggccagctctaagatgaagtttctccaaaggattgcctatttaaacgtcggaatatacccttttacatccatttttctcattgtctactgcttccttcctgccctttcattgttttctggcgagtttattgttcagtcactcaacataaccttcctggtataccttttgggtatcacgctgactctcattgcccttgctgtgcttgagataaaatggtctggaattgaactagaagattggtggaggaacgagcaattttggttgatcggaggaacaagtgctcatcttgcagcagtgctccaaggccttctcaaggtgatagctggtatcgaaatttcattcactttaacatcgaaatctggtggagatgacttgaacgatgagtatgctgatctttacatcttcaaatggtcgtccctgatggtacctccaatcaccatcatgatgataaacttgattggaatagctgttgcagtttgcagaacaatatatagtgtcataccagagtggagcagcttgcttggaggtgttttctttagcttttgggtcttggctcatctttacccctttgcaaaagggctcatgggaagaagaggtaggacaccaactattgtttttgtatggtctggtcttgtggcaatcactatttctcttctttgggtggccattaatcctccatccaacaatgaccaaattgggggctcattccagttcccttgaatacatatacaactgccattgtttttttaaacatttttttctgtgtccaattgttattcaagtttatctcaaaa

SEQ ID NO: 380029 - DNA, 2920 bp, Cannabis indica
aaagagtatagagtgtaatttctccttttttctttttacaaggaagaacaactgaaagaatcgttaactcgaaaaaacacacacatttgaagaaagacgaaattaggtacacccactttactttacttattttcattttacctctatttttatattttttaagatacacccacttttatagatgatatccccattagaccccttaagttaatgtaaattatatgctagatttaagtagagagtgaaggtatattgggcaacccactcaaaaaagtgagtatattttaataaaatataatatgaaggtatttttaattaatggatacaatatagagatatttttcaacttatctccatttgaaaggttattaataaggaaatcttacaaaagtactcattttttttgtcacttttacatttttactctcatatttttcttttacatttgtattgtataaagttttcaaaaatactatattaaagttttaaaattataaaagtactgcttaaatgaaaaaaataactaaaacatctaaaaaaacaactctagaacaacttaacaaataacatgaaacaactataaaacatcaaaaaaataattacaaagcaacatagaaataacaaagcaatgacatatttgcaatatgcaaaacaatatcaacttctcaatatgtgtttctattacaaatttttttacttagttttgataatttgatttatttttttgtactattatataatttttttgacaatttttgttacaacttcatacttttaacttttttgtttctctttttcttttgaattagtgacagttaaaatgataatttattttttaaaagttaaataaataattacattaataatagaaataataaaatcttatcatttcaaaatgtagtatataataactcagcagttttaaaagagagtaataactcattcttaacaacagtaattaccgcatcttattttgacatgcaaagtagtgcaattgacttttcttacctcaaatccaaagtcaggtgtgcgggccgacttgagtggaatgatgttgatgatctcgggtcttatgtcacgactacaaaaacttgatatataacttaaccaaatcctgtaataggccctaaactcaaaagcaaacacaccctaatcaatactagcttatgaatagcttaaacatcgataaaacacataaaactaagttctggaaaaataccccaaacaaataactggtttcaaaaaatggggttccccactacatcaatcggttgactggttccacaatgccctgtagaaccgattaaccagtttctactgcagaaacgggtaacccctagtttttgcatcaaaactaacccaaagctcctccaaacctattaaacttttcagaacaattaaacaacataaaatcaacataacctaacactcaaaactcacaaatgcaacaaaattataaacttaccattattgaatgagtttttgagttcttgaactcaactcacctaactcttagcacaacagagcctaaatcataaagttaaagcttaaacaatcttaattgaacatctaaaaacaagctataacaaataaattcaaacacaaaacctaatcatcaaaaccctcatcaaaagctaaccttaaaaccttaaaaccttcaagaacactaaaaaaacatacctcaagtatggataactcctacggctgaagaaattaacaagaaattactgaaattgagctaagtttttccttactttctatcggttctctttcaactgaagagaagagatagataggataatgctagatttttcttatttttttttatttatcttcaaattatctaaaactaataatataaatctaataaatccacctttatttcagcctaagttacaacaattcaaataggacaaactaagatatgacttagcaaaatgactattttactctcaatttaatacttaagctatttataacttagggggtactttggtcattactagctaccctgactaaccaataactcaacatactaaaccaatttgatacaattctaataaaactcattctattaccatcgtgatatctctggccaatccattgagtttctacggtcatcgaactcaaaaatattttatttaaaaatagtatatataatacccacatatcccaataaaatctctgtaattaataaattattctaattaatcatttactcaaaaatttactaattaactcataattgacttaagtaagattataatcctactctaatattcatataatttcatatttaataaaatatatctaaattaacataattataatttttaggatattacaaatagagtctaagtcaataccactagtagtaaagagataagtataggattgaacaaaactattggtaatatccataaagttactaataatagaattatcatccaatgtgataaccttaataatattattcttcttctagtagaagctctattgtaaaaatacttggtgttcttgtcactaattttaagccagttgaccctagaccactgttgggattttatgccctaaataaaactcatttcaatataatttatttgttatcaatagaagattagaagtcatttatgtttacatgtattatttatatttatggtttaatatacaatttctgttaaattcagaacatattgtaactcacaattacagtgatgtcaatacggtggaagataattgtgattatatgcttcaaaagtttatgtcccatgattcatcaatgcactgaatttatattgatgtgatagtcagcgataaagtttacttacgccattagataagtatggtaaagtatgctagtatcggttatataaagtatacattggaccgagaccgatattgatcttggtaaagatattat

SEQ ID NO: 380030 - DNA, 3969 bp, Cannabis indica
ctcaggttgagtgtaccatacctaaagatgatggtactttggcctcatttgttggtttcagggtacaacatgacaatgccagaggccccatgaaaggaggaataagatatcatccagaggtaggtttgtttgtttgtttgttcctatgttgttgttgttgttgttttgttcttgagtaattttatgatataggttgacccagatgaagtcaatgctttagctcagctaatgacttggaaaacagcagtggctaatataccatatggtggtgctaaaggaggaataggatgtaatccaggggacttgagtttatctgaattggaaagacttaccagagttttcactcagaaaatacatgatctgatcggtattcacaccgatgttcctgccccggatatggggacaggtccacaggttcatcatcatcatcctaacattttctttttgaattggaatgacaaaatggggttttgaattttgttccttattattagactatggcttggattttggatgagtactcaaaatttcatggacattctcctgctgttgtgactggaaaacctattgtaagtatattgtgagtccaatgtgcctaaagaaaattattataactctctaactcttaattgttgctgttaggatcttggtggatctcttggaagagatgcagctactggaagaggagtactattcgcgacagaggctttgcttaacgagcatgggaaaagcatagccgggcagcgttatgttatacaggtattgtagtaaactaactacacaaattcaatggaagaacaaagcagtaaaattagaaaaggaaggaaaaaagaacgaagaatttatcctggtttggatctcaatttgagtcttaccccaactctcccccaaggagttttctccttagttctgactcttaaaatgaatagagttagagttataaaagacttgagttgttaagttcttgaaccttgattatctttggattacaaaccccacaaggtatgtagtccaatgagctttacaatggtaacatgtggtgttcatggacaagattatttgacaatacaaaaatgtaaagagagaaaagagtagttagttagttagttacctctgcagatgttcttatgtttttgttttccattgcagggttttggcaatgttggttcctgggcagccgagttgatccatgagagcggtggcaagattgtggcggtaagtgatatcagtggagctataaagaacagcaaaggacttgatgttccaaacctgctcaaacatgtgaaagaaaacaaaggtgttaagggattcagtggtggtgattcaatagaaccgagctcgatattggttgaagactgtgacattctcatccctgctgctcttgggggtgttataaacaggttcttttcataaagttttcagctttattcttcctactggttttagtaataataatgtatatgaataaagcttctacctttggtttattgaatgaagggaaaatgcaaatgagatcaaagccaaattcattattgaagctgctaaccatccaactgaccctgacgccgacgaagttagtttctttcttaaaagacagttacaaatcagagaaaggaaattctaatctaaattcacttttttgtagatcttgtctaagaaaggagtggtgattcttcctgatatatatgcaaactcaggaggtgttactgttagttactttgaatgggtgcaggtaataaattttcaaatttggaactaactttctaccgaaacagatgatcataaaatcatgacaagttttcggtttttgtttcctgtgcatttatgtagaacatccaaggttttatgtgggatgaagaaaaagtgaacaaggagctgaaaacttacatgacaagaggatttaaagatgtgaaggaaatgtgtgaaacccacaattgtgatcttcgaatgggagccttcacccttgcagttaaccgcgtcgcacgagcaaccgtcctcaggggatgggaggcctgagctgatacctactttcaataaaagatgagaactttttacaagttcttctcattctcttctaatgatttattaggcttttactcatttggttggacaaacttgaaccaaaagttcacatttttttttcctcttctattggtgttggcattaattacattagagaaagagaaacaaaaacaatttaaatcaattctaaaggcatacgagggaatgttggtggtcttatgttgatttgagattgtattgccttatagttccaccatattatgattaagcatcatatatgtgatgaaataaataagattgttatctcatttataaatgttctatcccagtttgcctccttttaatagttgttgataaaagatagcagaagcttaaatataaccaagttggtgcaacatcatataggtatattactcaaaattttaatttaacttgaattgagatgttcaaaacaaaattaaaaaccattttgttgaaatccgaagaagaagctattgaagttcaggttgcagttaggataaaattacaatgctgaagaagaaaaagaaaaataacataaaaacactctattgcagtgaagccctatgcatatccttaactgacaacacaaaagaggaagaagagcactagagaaattacaaaatgttctaaaatctccctcttccacccctaaagccaccaccaccacgacctctggacggaccgcttcttcctcgtggagcacctcttccacgaaagcttccacgtccacgatcaccaaagccacctctgcctctgccacgtcctcctccgccacggccagaaaatccttggcccctgcaaatgaacaaaataataacaaccatgagaaaagaattgtcaccattgaacaatgctttaggttgcataaacatacaaattacaaaacacatatggaagttttaaggcatagaaaagtttactttggctgtggaagaaatcttgcaagtggcaaaagctttgctgggtcaatgtagaacttgtcaccagatgaatatgaagttgcaacaacaccttccatcattttaacagagaaatactgccacaaacaaacatatagtcttgatgaaaccaaaacttgtattaacaaaataaccatacataagctacatttcaaattgttattctgccacttttacaatttagtttggcaaatattcacatacataagctactttcactcaacaaataagtcagaaaactcacagactcattgatggggccaaagatttcatcaactttccctatctgggtcttgttctgaagataaattggagcattaaagtaaggtatcttttcctgtgtaagctttgttactgcatcaccctcacaagcatgaaggaaagtagcaacctctgtaaaaacaaacaataaagatcttaacttcaacacaaattaaacaaaacccagtttttgcatttcaacaaacagattgcagagtcacagaaaaacactttcttcagttttctcagtagccaaacaaacttgaaacaaaataggataaaaagaatactgaccaacgacttcttcaggaggtccttcgtcgcgaaaaccaccacgaccaccgaagcctccgccaccaccgccaaatcggcctcctccgccgcggctaccacctctgaatccaccgccacctcttccgggggctcctccacggctacccctgaaactaccgccgccacctctgggaggtctcatagttgagtgggttaatggaagtgtttggaaatgagaatcggaatgggagggagagatatgggcgaagtaggttttgtgggaaggctggcaatgtaatgtagggtttaagatgtttagggtttttggttccttcctctcccccaaaattactaaatgccccttcttcaaataataaataaataattctgaaaataataataataaagggtaaataattgaaaaaaaaaaatt

SEQ ID NO: 380031 - DNA, 4515 bp, Cannabis indica
aaaagaattaaaaggcccatagcaatgtatttgggcttggtagttttgggctttgggctttataaggaaggtaggggaaatgaggaaagtaaagtggtggcgatgatatttggtattttataccaaaattctgaaaacaacgaaaaaaaccctaatttctcactcttcttttcgttttcaacacatttcttctctctccccccgccgatgaggccactactctaagccaccacgaagatacaccggattcccttctctcgccttccctccttcccaggtttctttcgttctgattttatgtgtatttatcgatttctgcattgaattattgcgctttttgtttcattcggtaccttattcatgctttgtaatactttctcaattataattctattcttcacttttcaagatttgaactgaatcacatgttgtgtgtattgttcaagattttatttctgttcctttcgagcgagaaagtagtttgcatgagttggcagggaggctagtgttgactctagattaaatattactattcaacttttttatttttgtgggggtaaacgaaaaatttagttaattatgatgtgattcgaaataattgagaacattatggtgtggaagcaaccctttttatatacatgtatggtaatggttgagctctttatgtttatattagtttacactcataacccatttgaaaaatgtcaactttcttacatatttgtgattttctgtaactttttatgctaggactaagctcagttgaaccttatagtgcaatggtaaagtgattgtaaaaaatgataaaagatgacatcgaaagtaattctcttttgttttgaatggatgtggtttgttatgtattggtctggatggtggttttgtttctttctaccattgaatagtgatttgatatgattgattgcaaaggattgatcttggttttctgggtgtgtttaatttatgcagaagatatgactactcttaatgtttttgtgaactatgatgggcattgggatgataacaaatgctacgttgactttaagatgactggtatattagtgcctaaggacactacctataaaaaactgttgggattattgtccaaagagttgaatatcaagccttcagaacaatccataactgtccaataccaagtgagtccaggttctccacccatcaccatattgactgacggcggtgtcttgttttacttggagttgaaaaagaaggatcctgtacttactggcttcccattgtgcatcactgttgaggatagacggttggccgtcaacaacccagcattgccaataaatcaagttcaaccggttgaacaaccaaatgaaatagcaaatggagaggaacaagatgaatcaaatcatttgaacgcgatgcctactccaacgaacagtgataatcacacatcagataatcacatatttgatgatgtttatgattctccaatggaggtggaaacagtagaagcagtcaacaaaaatgaccactctattcttactcgctcacgagctctacgagaagcaaaagctagttctagcaaacgacgaccatacaagaagcggaagctgaagcgcttggctgttagtgattatgaaacgacgaatactatcatatcggagtaccattattcagagattgcagctaagcagctgtataaaaacaaggatgtgttgaagaaggtcgttagtatgtttgctatcagaaacaattttcagtataaagtcaggagatcagacaagaggttttttttggttacttgcttggatcaaagttgcaagtggcttcttcgggcatcgaaatatttgaaaactgacatgtttattgtgagaaaatatgttccgacgcatacttgctctttggatgttaaaggggatcatcggcaagctagtagtcgagtaatcggtgaatgcatcaagtccaagtataagttgttgggagaaacatcttattcgccatatgacatcatgagagacatgaaggatgaatatggtgtttcaattagttatgaaaaggcctggagagctcgagaatgtgccttggaaatgataaggggagccccagaagaatcgtatgaaaacattctttcttatctttatacgttaaagaataagaatcctggatctgtaactcacctgggaacagataatgatagtcattttaagtatttgttcattgctttgggagcatcactttgtggttggcctcattgtcgacctgttattgtggttgatgaaacattcctaaaggctaagcatagtcgtaccttgtttacagcgtgtgctaaggatgccaacgacaagattttccctttggcttttggtattagtgattttgacaatgatgcatcatgggattggttcttaacaaagttaaaagatgcatatggtgaacgagatgggttgtgcatcatatctgaccaacaaagtaatatctgtgcgtcagttaaaaaagtttacccgaatgcaaaacatgggttctgcatgactcatgttcttaataatctcaaggccaacttcaaatcttgtggaaaagaaattgttccgacttttattgctgctgctagatcgtacattaaagacgattttgagtactacatgaaacagcttgacaacattgatgttggtattcggccttatctagctgaagtaggacacgaaaagtggtcgcgagcgtttttcactggtgggagatattcaataatgactgctaacattgccgagtcaatgaatattgttgatggttcggctagagaaatgcctgtggcggctttggttgagtggctaattaattggacggagaaatggtttacagaaaagagacaagaagctgaatcaacagtcacagtacttgcagcagctacagagaaggtcttgcgagaaaatcaggttgcagccctgcctttggtggtatgtctaccaacttatcaattcttttttctttctttcttttgtctttcaggttaccaagtaataattggatgcgtacattacatgaaccatatcatttgatttgtattgctttgcaggttttgccaatagattccaacttatcacgagtctatgatggtgacagcctttttattgtgaatttagatgagaaaacgtgctcatgtcgtcgatttaacttggatcaaattccatgtcgacatgctttggcggtgatagcaaaaaaaaggttgaatccttatgcatattgctcgcgctactataagagggaagaattacttgcaacttaccaggaaataatttatcttcttgggaatcctcgaacttggagtattccggatgatgttaagtcgatggaagtcttacctccaatttcgacggagaagtcaagcaggataaaacgaaagagattatcttttagtggagaacacaactctaaaagtaggtgtggtaggtgcggacagcctgggcataaccgaaaaacatgcaaaagtctctcaagttcacgatcctcactgtcagtgggaagaagatcaactcggttgtcaagaaggatcacatctgatgaagaggatccatctgatgaaatggacgatgaatttcaatctgatgaagctttaaatgaagtcccatttgatgatgctgcctatgaaactgaagttgtgaaacagttgacgtttgatgaagctgccaatgaaaatgaagttgcccaagtaaaaccatctgatgaagttgccaatggaaatgaagctgccaatgaaatgccatcaaatgaagttaagactgaaataccatctgatgaaattgccaatggaaatgaagttgtcaacgaaatgccatctactgaagttaagaatgaaatatcatctgtaccatctgtcaaagtcaccagcgaattgccatctgtcgaagtcgccagtgacataccatctgaggaagtcgccaatggaataccatctgaagttgcgaatgaaataccatctactgaagttgcccaagaagtaccatctactgaagttgcccaagaagcaccatctgctgaagttgcccaagaagtaccagttgcctaatcaaacatatttttttttcttttagctgttttactcagtactttagtagggttgtcatggtttgtttcgttgtgttttgttttgtttgtatagttcaattgagaacttttcttattgttagaaggattgctttcgtaggattgtcatctatgtttaattaagaaacattgcatgttattctagattgatattgtgaaggaaactgagaaaaacacaattgcttaaacagtcttccagcaaggtatccccccttatcagcaggtacataatctgttccttgagccattttgaaatgacatcttttttacactctggcttttgtaatgatttataattggttgaagttgctgtcttctcttcatatagatatggtgattgatgagacccgagaactccaactcaagaacacaataaaacagtaacaataataggagtagaatagtagcaaacaataggaaatgtatattgaatgtacgagaaac

SEQ ID NO: 380032 - DNA, 3081 bp, Cannabis indica
ggtatgctcatactaggtataatatttacttttcttacctgtgtatccaaacaaatgttctagccaacttaagtgtaatacagtttagcgtccaatatccctaagtcacataagcagtaaaattgaaaagtgtttatccaaaacactaacatttatcaaaaatcaaaatctaaaatttcttttttgataaatgtggtggaaataccctagaaaatcaaaacatgcaaacggagacaaccctaaaaaattttaatcgtatgtccaaaattacaaattggaactctgaaattagaagccaactggaattctggcatgtaagaaccagtagttcggatgtcccaaaccaaccggaagtctgatttttgctaaccgaaatttcagtttataggtaggaaccaaaactttgaattttctaacttttaaatcccaaaaacctattaaaagccattcttactgcccaaaactatttctcaaattatatatagtccaaatagtagctcaacacttcaattaatctacaaacaacactaattcaaacataatttcataaaatatgctaaagagggtttgaaaatctcttgagtaaaaacaattcaaatccaaaatatacttatagaaattataacttaaaacatttatagtaaatccctcctaagatcttccaaaatttaatgatattccaaaagtacccaataactataacaaaaattattaaaatacttattaaaggttcttcatggtagccctaggagataatctttttcaaaatcttcaatacccaagcttaatttagagcttcaatagaggatagaggaagaaaaataaagatagataattgttgtgacacagtttctttattttggatttgtaagcgagaaagatgagaatatgatatatgttggtattgtttatcaataataaatgaatgataatgatagtaattttacgctaggtgttaaaaagaggaggtaagattagttcaattttaattctaatcataatattatttaactaactaattcaattactaactatacttaaataaaattccgaacaattattttagtctaattagtctctcctggtagagagtgttttgtctctcttgatcgagagtattgatctgttctgctattgtttttagtctgttccgttagagattctgttttgtttctgcatttctgtatctctttgttccaatggcttcatcaagcaatgaggaacaatttactaaaagatgggctgatatctgcttggatgatgaagaagatcatgaagtcttattcgacgatgactgcataggggaggaagaaactgatcttgatgaccgatggtgcctagtaggacgattactatctgggaaggtttcagattttaagatatttcagaatatcatagcagacctatggaaacctggtaaagggatttcaataaaaatccttgatcaaaataggtttttattccaattctatcatgagatagatatccaaagggtgattgatggcagcccatggacatatgatagaaagcaactcatcattgaaaggctgaaacaaggtgaaaacccaaggatggtagctctgaattccttggatatgtgggtgcaaatccatgaactgaaatctgggttcaaaacagattgggctcttcgtgaagcagcccgttatatcggcaccctagtagtttctgatccaaacaacttcaaaggactgtggagggattaccttcgtgtgcgcgtcaggattaatgttgctgaaccactcaagaggcggatgaagtttcgcaaacgtaatggcgactggttctatgcgtatttcaagtacgaacgagttcccactttctgtttcatctgtggaattatgggtcatgctgaaaatttttgcaataaggtttatgatactccttctgaccagattgttaagccttacagtcttgagatgaaagctcccctgaaaagacaaagcttcctaaccgcttctccatggcttcgcacaaacatggacgacaaccgtgagatgcaccgtgaagccaacccgacgactgctacggcaaatcccgagattaatgacatgcctacaaatcagcctcaatcatatgtcaatcacgatcccatgatttctgattcccaaaatcatgggactaaaaatcattctcataatgactatgttattttggtcaatgaaaattctgccagcttttcaaatgagaatttaattgagatagctgacttaaaaaggaaaagaatggaattaattgcttcaagtggggccgtaaatcttccaacagatgcatctgaagctgaggtggagaaaaaccaaaacaattctgcagaaatgggtaattcaaaaaacttgtacaaggtgggtctaggattccaggcccacccaacattatgagtacaattagttggaattgccgtgggcttgggaacccacgggcccaacaattcttaattgacatatgtgtccaaaagaaacccaagtttgtttttcttagtgaaactttatgtaaaagagatgttattgagaatgtcaagaataaattgggctttcaagggtgtttttcaattgatgttattggtagaaaaggtggtttagctatgctttggcatgtctcttctgaagcccaattactcaagttttcaaataaccatattgacatgattattcaccttcctggtatgaacccatggcgcctaacagggatatatggagagccaaatcgcacattcaggtatcaaacatggaatttgctgcgtgatatgagaaatgaatctaatttaccttggtgtattattggagatttcaataatattctgggtaacgaagacaagaagggaggccggccttatccatcgtctctaatctctggttttcaagatgctgttcgtgactgtcagcttattgatcttgatctcaaaggttatccatatacctgggaacgaagtagaggctcttctcgggcggttgaaattcgtctcgacagagctatggtcactcaaagctggttggacgtgtacaatgaggtatcactcactaatcttgatttctcatcttctgatcactctcccatttatttact

SEQ ID NO: 380033 - DNA, 1334 bp, Cannabis indica
tttccctcctaaataaccaatggcggttcaatcattaactgaaaaaatggatgccttaaacaagttgatctcaaagtcaactgataatgtttgccattcttcaatgtattatgaggcaaaaagcggtttgagtggacggaggaatgtgagagggcattccaggggataaaagaacatttttctactccacaaaaactatcgaaagcaatgactggaaaagttttgtatttgtatttatcaatctcagaacatgttgacggtgagaactcatcaattaacttgtttgctagaaaatcaaactacactctaagatcagaattaagatgaagagaagaaggcaatataaattgaaattattatcttgaaatggagagaagaataataaaatctatattgctctaaatgtagtgttacaagtatgattttctaacccccttttaaatatggaggaggggtatttataggctgtaaaagcttgaggtacatggtggtcccaaaaggagaaagtgttgctttcaccctgaaacctacaagcataggaggtggtgttgaacctcgtactcttgtcttgtgtcaagtggtctcggtctccagggataatggctacagagtacccttggtcaggtcctcagaacttataggtgcagtgctaccactcctcgtacctccttgaattaagaacttgtatcctcacatgcttactctatcctcgtgttcgtattcttgttgcttcattcttcttttacttgggaagattacacctagttctaaactatcatgactgagtgacttctcaagagtcttggctgaatgacttctataagagcttggctgagtgacttcttaatgatcttgtcttagtaacttcttaaggagcttggtcgagtgacttcccaaggaccatggccaagtgacttctcaaggaccttggccatgttaattcttgagggccttgaccgagttacttcttgaggaccttgactgagtgacatctccagggccttagccgagtgacttctcgaggatcgtggccgagtgacttctcgaggatcgtggctgagtgacttctcgaggaccttagccaagtgacttcttaaggaccttcgctgagtgacttctcaaggaccttggttgagtgataattttcgttgttgatttatttttcatctaaccttggaaattataagttttaatttctgtgtttaacacttgcacccacagccttgaaaaattcttttaagtgttattgggagtctagtttttatagtgtcttgtggataccttatgagcctcttttcttggcacgcacttcaagatactgttgggttttgtgc

SEQ ID NO: 380034 - DNA, 4251 bp, Cannabis indica
tgatgtatatacatgtgaagagttgataaaaacagacattctggggctgcaataaaaccaaattcaagctgaaaacaagttgtgtgaaataatttaccttaaatgagcgagcattcgagactgctcccgcaagttcagcaacatcagttcccattcaaacgaggtttattttatacctgagcattcaaaaagctaagaggaaaaaacattcaatttcatgtctctaaaataatacccagtgatatgacaatataaaaaattatttatgacattgtatgaagacatccctttaaacataaatctgagaataaaccaaacaaagctgcgattaaagagaatcattgttcacttaaaaacactaatttagcaaatgacaaattgaaagttgaatgaactactgagtataaccgaaaaggcctcattcttgacatgaacaaatcagtagaaaagaaattgaattgacattaaaaaaagaacagcaacacactgaaaaactaccaaccaataattttcagaattattgatatgaaaattttcaaagcttaaacacttaaattttcaaaattcatcataatagactaaatcatcatttacaaaatcctttaaaattagaacttggtaacagattcgtggaccatttggctacagaacaccctttaagtgttaacttatcaaatcaaagctctcaataattaagcaaacataagatttacagaatcaagtctaaacttactaataactaacatgagagaaatgagacttacttatttgacagaaagcagaacaatgaccaaaaactcctccttgaatcctcaatctgatcaacaattgctaaaccaccacaactatatactgaatagtgaatacagccaaagccacaccccaattcccaaaacgtcaccaaataacggaaagaaacactatgattcagactaagtacgaaagtcaagttctcaaaaccacactcatcttcttttccccaaatttggtaaagtttcaaacagaggtcaaagtccttatgctatcttttcgtgtagccctaccgtaaataagcaaggtaaagagaaaacagtagttcagtaacttcaacccaaaacccaaattcataatcttcagaaaacccagtttgtttctcaaacccaataaactttcccaataccaaaaattctcaatccaaaaagaagagctttcgctacctttcaaggtatataaacataaacccactcgaaagtataaagcttatccaaaaagcacaaaacaattctcaaaagcagaacaacatcattgattgattctccggaaaaactgagccacaaagtcttcaacttcaagaacaagaaagattaaataaatatctgaggaaaaaactagactaagtaagacacaaaatttatgagtgagaaatcgtcaacccgtttctggttttcatggtcttcctccaccataagacgagagagagagagagacagagagacagagagacagagataataggagagagaaagtttgcgccaagataaatgctccattcatatctctatcttgactgtgacgctccctggctgtgacaactgtgatgattgaagtcagcttctgattggccaagttgtctgtgacggaaatgaaaggtgacagcactcactgattcccaatttatttatttatatttatatttttttaaaataataataataaaagacaacaaaggagctgacatttcaaagcgcagacttggttgaacaattaaatataattgtaaaaatgatgaattttatacattaaagaaagaacagagattttctggaacagttggtttttttggtccgaattttcagtctttaaaaaaaaattaaaattattcacatcgttaaaattaagaatttttatcatattttatttaattttattaattaaattttgatatctattaaattatgtctttcaaatttaatatttaccaatacatgttttatgaatttttattcaatgttaaatttttctttaaaaataagataaaaaattttcaatctaataatttatatattttaaaaaaaaatttaacggtcttaaaagtttaaaaaatataatttaatatatatcaaaattcaagtaacaaagtgctaattattttttttattattattaacaaaaaaaagatcagatggtgcatatcccttcctcactcttttagaatttttgacaactttaaagaccacgtaccaataatagagcagggccgacttaattacaaggcaacttagataatcgcctaagacctcacaaaatttaaactctacattttaacggtaatatatattattattagagtattgttattaaatactaatagcacaacacttaatgatgacatcctacaattaattaattatattctctaaaatttattatttaaaattatataaaactcaatatttaattatacttaaaatactatgccccatatatcattttgcctttatcttgttattattattattattattattatatgtggtaatacatataataataagtcaaaacgcacgccaattgggatttattgagaaaataataatcaaaattatgtattattttcttttcatgctagcttctacgtaactgtgaaaaaagtggtcctcttttccttttttcttttactttttattctttgggtctacttattatttaagtgaaataataattaaatgggtagttagtggttgtggctatggttagtacgtagtagaagtattagatttagtggtaatcttatagagatagattaatattttcaactattacatacgtgtggacttttatatatgtcccaagaataattcaaatgataaaatgctagatatacgtacaaaaattgtacataattttatacaatgattatatataattttaatggttatattcttgagattaaattatatatattcttgagtatagaaagtgtattctaaaagtatgttagagttactataattatattgttggactaaaataggctcatatgtatatttgtatgtattgttatacaaaagtttgactcaaataagttataatttagtaattgtgggtcataatattaaagtatgatagactaaatgtgtaaatatctttaagaatatttttaatttattaagtgattaaattaaaagtacttaaaattaataacctagcatatattggtagtagctctcaagaaataagagtaatattattctcatctttcaccatgaagagagaaataactaaagaaccctaagtcatatatactcgaaagaatattatttactatttatgaattaaggtacgctctcattatttgagttattttctttgaatcaacaaatatattatttagatttatgcctatacatttatataaattatattattaatagataatatatttatttataaaattgaatcttgttattgttataacttaggtcggatagttattagaggtttttttattcattttaacataatttggaaaaaagtgaatgaggatctatcttaaaaccaattgacaatagaagaagtaactcattcatccattcatcttatataatatattatctttccacacattaagaagaattctaacatatattagtttactttcattactttatttaataatatttattccattaataattactttgaaattgtagatagattggtccgggcataaatatatatatctaacatctgtaaataaatggatctccacaaaaagacaaaagaaaagacttgtttttgtcttttttttaagttttttttttacaattttttaaattttttttcacaattttttagaatatttattttacaattttttttataatattttattttattttgtggtttataagtttgtttttttttttaattttgtctttattttattttgataaataattttttttttacttattattggtacttttaatgtgcttaatgccttatcattaatgtgttaaatgtcatatcggtatggtcccatttttttgtacttttttaaatttgttttaattttattttttaaaaaaactatattttttgtacttgctattagtatttttaatgtacttaatatcatatcggtatgatactcaataattgatttgtaatttttttgtctcttgtattttttttcatttgtatggatgatctttgtactatttactattatttttgattaaataattattaattagtttagtaattttt

SEQ ID NO: 380035 - DNA, 2948 bp, Cannabis indica
caaaccaaaaatttcaacaaccagactaaattatccgaaccaggctcgaaggctctgtttcaaaccatataatgattttcgaaagacgacaaacacgccttatatccccctaagcaacaaaccctaaaggttgctccatatatacttcctcatgaagatcaccatgaaagagaaaagaaagaaagcgaatacctaagaatgaacacccaaacacgaagaaggcaaaaaatacaaaattacaacctgagacagaagcgagtaggcttagaagaaccgagaaaagaactgaaaaaaagaacgttgtcgaagatgccatcacacgcgcctccacgcgctggcacatagggatgtgcgcagaagcttcacgcggcgcgtaagccccacgcgcagagattccggtgactaatctttggggtttttgagatcggaggctaggtaagttgtctgagtgggcggtgagagtagaaaattactccaaaggggttttacaaaagagaaccccttaagaaaagaaaaactccaactataaaccctaattttgtaacagcccaaatttcgaatttcgaatctaaagtggctctaatcacatgtagagaatggtaaagagaattgtgtgttgtattaatatatattgatatacaaagctagaagactaaatggaaaactactaaatacaaataggaaactactaaatacaatttactctaatattttacaattaataatctaacaattactttatacaatagggatttatcttacaaacaaaatctccataaccatttcataacaaaagctttgttccttatctccaaattaccaatgcctagaccaacttaaagtctgggttggcacactatttccaagccacccaatgttctcatctaaacaagttccctcattcccaaaagaagtctagcatcatctactctagtattgtaaattcatgcatgtcgtgcaagcctggtccataattatctatgcttctcaaaatacggtcgtgtcgtgccgttgcacaaaaaaatgtaggtcgtgtcgttgcacagaaaaatgcatgtcctgccgtgtcgtgccaatatttttcaagggtaggcctgtcacagcccgtaggcatggtattttcgtggcgtgcttggattcgtgtcgtgctttgctcgtgctagcccgtatttcttaaataggctagcctgttctcatatctgggctcgaattcgtgctttacttattcatatttttgtttttacaattactaaactatatatattttttagctttagttatatttatataacttctcaacgatattttatagataatcatatacaaaaatgattaatattattagaatttgaatatttaactataaatactcaaattttgatattactctaaaataaattcatatataattttagttttacatgttttaattataaaagtataatatttagtattatatttaagttttattgttattataacttaattataattgataaatacatctattattattaataataataaattttagtattttttaatatatcgtgcagtgtttttcggacttgtcgcgtactgtgcctttcgggctagtttattcgtacttacgtatcgtgcctttcgtgcttaagcatatttttcgtgtcgcgtcatgcccaaatttatatttttttcgtgtctaatcgtgccgtgtcaaaaggtctaacacgtatttacagcactaacctactctaatagatttataaccgttttaggcgctctaaaaagtgacaaataataactggtcaatgaggataagattgcttgaaagaagtcaatctccaatctttagataggtaagcgattagactggaaaatttggcaatcactagctcccaaaataatctttcttggattttctcctagggtcaaccctaaatatttcaaaggccactgtcccaccttgcatccaatggtaaaagactcgtaacatgtcaagcaagatctgcataaggctatcattgtctaccaaaaatattgtatcatctacaaaatgaaggtgacacactctaaacaatttttttcccacgaagaaacgcttcaatataggcaattcactagctttgtctataatcctcccaagtacaactagaacaatagtaaactgaaaagaggataaaagatcaccctctttcagccccctagaactgtgaaacttgcctcttggcctcccaatgattattctaaggagactaaagatgagcatcctttcatccatcttttccacttcgatctaaattccttgttctcaagcaccatatccaataagtcctactccacgtagtcatatgctttttcaaaatcaatcttaaacactaaaccactttttcctttgcttcaatattcctccacggcctcatttgccaccaataccaagtttaaaatctgcctatacaaaagaaaagaaacctacgtttaagagattgagtcaaccaccacacctctgattgttaaggataagactttagatattatcttaaacaagctactgatcaagttgaagggtctataacaaatatgcatttctttggtataaggaaaatatatgtttcatctgcattgacctggataacactatcttctcaaaatcccctaaaaacttccattaaatcttccttaatcacttcctagtttgattgatacactgacattgtgataccatgtcgtccaatttatccccatcgcattcaaagaacgcttgtctaacctcctcctcataaggtatattctaaatgagtagctataagatggaattctctttcattcaattgcttcaatttcaacgttttgtttctcgaagaatttatatagcatggcttacaattgaattgtcatcgttttcaattctagacataaaagtttttgctttccttgcactgtagaaaagcttgaaattggcatcttct

SEQ ID NO: 380036 - DNA, 4165 bp, Cannabis indica
ttttccctttgattgatattgaactgtatctgtatgttatgtgccttacatggtatcagaaatttccaatgcttgattttaaattgtagtatcaggagatacaaattctaatgtcaatatacgtcaaatgatttgtttccattcctataattgacgaccgcactacctactgtcagttaccaagttaaactctgggactgtattgggtaactctaggattaaaatgtgtgtgaaatggaaagattcgagctgagtaaaattcaaccttttaggaaaggtgggagggtccttgagaatgaatagattagagccaaatagaaacataatgtgtaaacattgttcgtaagtgataatatcactatttggttaaagaaatggtactgaaaaaggattgaggtgcgtttggttttggaagaacgaatttgaagtatggtctatgagaaaagttagtttggatgccctttaactttcccacaaaaggctagaataatttttgagaataagatttgttcatttgtttgtgtcatgcagatttcttaaatttcaaacgtttatattttatttttttagttgataatagcaattaaacaatttattaccttgtcaagttttacaacaattggttttcgagtagttaaacattggaatttcttgactgattgcatcaatttcaaagacatataacagtcaaaagtcgagttttttcgtatcaaaatcccaagttgtgattagttatagttcagtgcaatgtgcattattagatggtactctatgatgtttctatgattacaacttcataataggcttgatgtttttaaagctgaatatatttaatttcatccctaagcatttcgatgacacacaccagattacataatgtgtgtgctgtttgagggtcatgcattgattaaaataattatttctaaattatgttagcataatactaggtactgatgatgttatccttgaaatttcaggtgactggggatgtcttgtatgaatcggtatgcttgattttaagtcttaactttaagtacatcatatcataatgtatgttccatgctatccaatggagccaaatcgtcctcagaatcctatatttatctctttattatgaagacaactgtccttaatatactgtaactctgttgaaaacaccgaataaataaatagtacaatcgatgagtgcagaccagacctttatgttactgttgagcaaaatttccactggctgttatatttgtgggccttatatgtccggtataggctataggaataggattcgctcattaaatctttctgttattatttatttaattaagtatcgagtctcgtatagtttaatataatatttaaaattacagatttaactctcatgccgttttcttctatgagtcgaggcgtaagccttaaggcgtactggggcgtcaattgagacgtaagcctcaattatttaattaaaataatatttgtagagtaactaacaataaggagaaaagcacactgtgcgattgagaagatgaaggagggtgtctcatggctactaagcctaagaaaatagttttgttttagtttttagttggacttttcttagttatttgttgttagatagtgcaaatggatgcaccaatgcagttgttgaaaactctcagccttcagatcataggtaacagaatagtcgataaagaacaaataaaagaaagaaaacaaaaaaccttcaatgactcttttcagtcctctctattttattttttctggtttaaaactttgtagagacaaaacatcaaaatatacacatttcaatttaatccacgactaccagtttctggtactcctcaccgtcgatggcaacctccattacacccattggatcaatctcaccactgttatccaaaaacatcttcatcaaattctttgagaaaccactcaccaaagccacccctttctgattccccatcaccggcgtcgacattgaatccctcaagttccagaacactatctccggcaccgctttctcgtaccccttctccctgaacttcctccttatcacctcgtaatcagtctcccaactattcagacacgcttggtcaaactccatgtcactaaacacaaacaccctcttcaccatttcctctgctttcaactttccattctccgccactagtaaaatttgatcaaacaccttctgaaaatcagtgttcattccccaatccatgcttctcacaaagttagtcttggattcaagattgtcaccttcgataatgtgcagttttggaaactcgctgaaagtgatgatctttcctttccaaggctcctcgctcagctcagagatcattaatcccaatgcaatagcgacctccatgggagtaccgctcatgcttccggaaacatcagaaactgcaaggcagttttttaactttccttcttttgacaaatctttaaccattctcttccactgaagctccgcgacttggccgccatgcgagttaatgatctcgtggggaagtagagctccagcagcgatcttggacttaccctgtttaacatcttccaaatattctctaaacctttcgccatcgtgcttcaaaaacttatctttgtagaatttcatggctactgaagccacacggttatatgggatggagttccattgattggcacctatgtaaacctctggcaattccaaggcctttctcaggggaacaagcacttccttcctcaaccggtctctgactctgtacacgtaatgggcttcctcaacgtcttcatactcagggcacgattcacgcggaaacaccttcttagcaatgctctcacaaagcaaggtggaacgatcgaaagaagaatcgagagaaggacaccacttggccgccagactaaacgtaaaagatttttctttacaattgttcaaattctcgatatcaattttcaaacactcagcgaaatggtctgtgatcttttcatataagaatcgaaattcagggtcatgaatatatctgtcgacaacctttttagccatggcgattctcttctcttccctcaacactctggctctctgcttctccttctttgctttctccacatcgttcaacactctaatctctctaggcacagtggattgagcccctttgatcgacggtttcgatgtcttcttagacttgagaaatcgaaacccaacacctttcttctgttcccactcggccttttgaattctcctcgcatcaggaccttgtaaaagtcgatatagaatctctggtaaatccttaaagtacccaaaatcagccaatgatgccacgttagaagcaagagtcttgggatgatgtttgtgaagccaaaacgccgccgtatagaaaccttccttgtctgacttaccggtacccctaaccccacgaagattacaaacgagctttagcgtaatcaagggattatgagcccaggctaaccggagcctctcggtcagtgactgagctggagtgtccggtaccacgtggaagaagaagtcaaggcaaggattgccggaggagagaaaggtgggggattgattttcagttaaacccctcggaattgtttcagctggtcgcaagttgttgaagttggccactaagagatctacaaaagggtccccggcgccggtgctggcttgggatttttgtgatggggttgggttgttgtagagctctggcggaccgagaaggcttggaggagccattctcaatttggccgccgtgaagactaaagattcgatgagagttgagctgagttgtgaaaatagcagatatattttatgtaataatcggttgtttgatgaacgaaaggaaggtttgtctgttaaatttataccacgctcgattacttgggcactacgtagtacgttctaatcattatttttttttgggttaatttcacaactgcacaaaaataataaaaatacggtttcacaaaattttaaatatttttacgatttttttaattttatttacataaaatacgatctttttatgttgagattttgttcatttgttgttaattttttgttatatgtatattattttttgttattttttttattgttattttgatgttatttttatgttacttttatattttttttattgattttatgttattttcgtgttattttttgaaaaattgtaaaaatgtaaaa

SEQ ID NO: 380037 - DNA, 2864 bp, Cannabis indica
tttgtttccgctacatgcctagcctgatttcattaagcaccaagtgtatttaaacagaaaagataattggtcaaacagaattctttcatctctactatgatctggtgttcaacatgtactttgcatgtcatatcatcatatgatggtgtgtgagaagtgctttacatacaatgattttaagatgttatgtcattatattttggtaggaacattttgagcaggatagttttttagcagaagaaattctgaaatttgtgcagcagtgagcaaattcacatttttacaatttatgatgcctcaatactggtttcatatttcttataatttggaagtaagattagatgcttgaaattttgtagtgataggctcactgaacttgctactatatgtacctaaagaatcatattgctaatcttttctttgagatgattggggctgtgactccatcaactagtttattatatatttggccttatgtttattggagctcagctttatttccgtctcttttcttttgtgaaattacaggtgcgcctaacagtttcagagcttggaaatgctgttcgtgtatttaaacagttgtctgcttctgctgcttcaaaccttcacttttatgggttcgatgaaaagaaaattgacactcatgttgagtactgtaagcacttacttgaagctgcaagagttcacctaaaaaatgctgaacatgaagaacagaaaaaccggcataaacaagaagctcttcgacaaatggcattggctgaggaagcccgtcgcaaggctgaagaacaaaggaaatttcaggtttgctgatcatgtttcgtatatattatatatatatatatcgcagtaaagatatatttagtagtcaaaattttaacacgttactgatacctctgtgtgggtagttggaaaggagaatgcgagaggatgagctaaagcaggtgaggcaacaggaggagcattttgaacgagtaaaggtaaatgttctgatttatattaccaacatgcttaagaagcttaatatactccaagatatgtcatctcttgagttactaaagtagctggcttgcaaattttttttctcaaccttagacactagaacaaattacgtttgcttgtttcattacaagaaattggaaggtataatgaaaagatacctgcttgtgtgagggagcacttgacattttttccagggacagatcatagatcatagttgatctagggaaatcatagatcttggatttctgttcttttaatatatgaaaaactaacttaaaagttgaatgaaatacttgtaaacattggcaacaattttttctttctaaacttatgcatatactttgtcaatcttcaggaacaatggaagagcagcacatcttctaagcgaagggatagaacagaggtcgatgatgaggagggtggtcatagtgagaagaaaaggagaaagggtggaaagaggagaaagaaggacaagagctcaaggtcacgttatgaagcagatgatgcagaagcagagatggtggatgatcaggaagaaccagagtatgatgacaccaaagtgaattatggggagcctgctcagacaaatgaccatgaggattatgcagaagaaaacgcccacgatcctcttgcagcagcagggctagaagattctgatgctgaggaagaggtgaaaaactttttctctgctttcagcttttaacaaaatgtttttttggtacataagccagtcttacttttctgggcggaattagactggtcctatgctgagttgatgactgtgccagtctaaaacaccttgcctctgtctgataaaatgcatattttttttttcccttcattatttctgattttttttactgtaaaggttgcacctaattcaaacgcaagtcggcggaggcgggcatggtcggagtctgatgatgacgggcaattagagagaccagagatgcaggggagtgatggtgagatcaaagaagatgataaggttggggaagaaggtgaaattaacgacgaggattgagatctgccatcttgaactacacaaggccattaacaaacctatctaaggtggaagactttccttgtaaactgttacattgttaatagttgctcttttgtattagttcatttatttaaatactcctttttgtaactttgaaactcatattctaatagaaacaacattcactttagcagtgtatggctcatatcaagttttgtctccttaaagagttcttcagagtccatagtttttccattgagacgaccaaatggcctagcaaattatttcatcttccttaacgtaagatgctcatgctgtagtatcctaaattactaatggcacttttcttagctattaaaacaaaacaataataaatggaaataattactataattacaggaaagtttcctgtccataaaaagtgttgcatttttcctttgtttttgttggacaaagtcttgggtggtgatgtaggacaggagaaccagataaggagtctgtctactgagactgactagtgcggaagccttttaaacctgtaaagagtaaagactctgaattgtgatgtgtgaagtgtgaagattgacagcactgctttcctctttttggattaatgcaaccacagagtgacccactcactcactcccaccaccaccatcagatgcagcacaagcatttggacttgtcttctttttgtcagaacttctcttactctatttggcttggcttttgctcagagacaataattatttcaagaatatctacttaacttaaaaacacggtcactttggctacctttttttcactcttataagtctctctctatatatctctccttttatttatttttaagtaaaga

SEQ ID NO: 380038 - DNA, 4463 bp, Cannabis indica
tttttttttttttttaatattatggatttatggaggttaaagaacagtgtgctgttgtgagtttgcatgtaaagttacacacttcttgttaatattctgctgggtgactagtttaatattctggtgtgcaatgaaatgttgattatttaagtctataatatgtgcaggcatcagatacttcatttgttaaaaagtcagcagcaagcatgcttagtgggaagaggcctgttcaagcagctgtgagttttcaacgcttataataatttacattgtaggtagttgaagttactttgattgtaatttcttgtgcttggcaatattattcacaggctacaaacaaaaaaggggcttctgctaaagcgggtgtgagtaagaagagtgatgcacctgcacaggcaaaatcctctaaatctgctgaagcacccgaagatgttgaggtagagtggtacactcttgttgatctatgaattgtctgatacacatcaaattctaaatcttttgtctcactgcgtttctgattatttgcagccatctgaaatgggtcttgaagagattgaaagcagattgggctctcttgtacaagcagatactatttcccaactgaagagtactgtgtggaaggaacggcttgaaggtttgttttaataatactgcttcgttttataatatgtttggtgatttgtgtttttttaattccgattgtttttaattcattttatcattatactaggcttgacttttacttttgtgtctactcaattcactacatttaagtaatttatttttttgaaaagaatcaagacttcaaattttgacgaaataatacatggcgagtgtgtaaagcactctaaagcagacaataacgttgcaaatgtaaaataaaactctatttccttactaattttcaaagcaaaatactcttgaacacttcacatcgtatgactgaatggcatgtaaaatacctgataatccttcctctgattcctcagcatctgtagagaatcttctattgactccagccatataagccagctgatagccgttctgaccacattattgattacaccacatctttaacgtcctatatctagaacaacatatcctaaaagatctgaatagtgttgcggcttagcccattgcaattttaaactctcttgataacttaaaccacactgtaaagaaaaattacaatgctgaaacaagtgatctactaactctccatcttttcggcatgaaagatataacacacctttttggagacaaaacccagttggccttcttttcgtagcattgtatgtacactgagacaccactaaagcattaactatacaaaaatcttactttagattgtactgagcttttccagtcattttacatttaataattgctaggattgtgtaatttattcttagataacagttttatgggagtggatttcatttggtatggagctgatatgtccattcgattgctttagtttttttttcgaaaaaaataaaatgaaaatctttaatttgatgtaatattgctttaatctactcttgcagcaataacttcatttaaacaacaagtggaaagcttatcagacctagaccactgggttgagttattaattcgtttactatgtgctgtccctggatggagtgagaaaaatgtccaggtacttaaaagttttcattgctgtttatgtgtgtcttttgttttttcctttgtcgatacgtttggttgtgaatatagttatttaaggcatggagtttgaatagtgcaggttcagcagcaggctattgaagttattactttcatagcctcttcgtcaaccaaatttcctaagaagtgtgtagtgctttgccttctgggtaagtgctccctgattttgattaatgaataatcataggtttctagctgggatttgtctgcttaaaactgtgtgatatcttttgcatacttatttgtttgatagttgattagatagttccttatttttgcttgtcactatccctgaattaacaggtataagtgagcgggttgctgacatcaagactcgtgcacatgccatgaaatgcctcactactttttgtgaagctgtgggtcctggatttatttttgaaagagtaagcgtaacatttcaataatttctgtagagaagcttgtttgcacttttcttgtgtcttctgaagcagggatgaaaaatattaggttttaaaatgattttaatgtgcatctcattcctttaatgaacttgtaacttgtccccttgatcgattttatgtttctgctagttgtttttttatattttatttgtctaataaaagttaaggaattctttgtattgtagctttacaagatactgaaagagcacaagaatcctaaggttctgagtgaggggctactgtggatggtttcagcagtggaagattttggcatcacacatttgaaacttaaggtgtttggacttctgttttttttttcctctttgtttgtttagcttgttattagttaccatgtatgttcatctattcacggtatcgatatatttcgttttacaggatttaattgatttttgtaaagatactgggctgcagtcaagtgcagctgctactaggaatgcttctgtcaaacttttgggtgttttacataaatttgttggtccaggttgatactcattttatttgaattgtccacacacctcgatttcattttaaatatttagttgaagtgttgaattgctcccatttattgatttattttattatatatattttttgtattagactgtaactccctcctaccccttctgcagatattaaagggtttctttctgatgttaaacctgcacttcttagtgcacttgacacggagtatgagaagaatccatttgaggtgctccaacttgatcatccaagatgcatttatggttcatttttgtttatttgttactgatgtactcccatattctatctagggtgcagcagcagctccgaagagaactattaaatcagcagaagctacgtctgcatcttctggtggactagatggcctgccacgtgaagatattagtgggaaaatcacacccgcgctgctgaaaggcttggaaagtaccgattggaaggtaatcttttgatcataattaatgttctagggatggagcctgacacctgcttggagctgaaggtccgaaggggagatatttatcagcaattacagtgttttgatgttctgtattttctgatttctaggctcgcttggagtcaattgaagctgtgaataaagttttggaagaggctaacaagcgcatccaacccaatggaactggtacatttcattcacattttctctcccctcactttaatattattattttattttaatttataattcttgtgtatgccatgcaacctcttttatatcaaccaatttgttaattattgttcaaaattttattttcagctgaactgtttggtgccttaaggggtcgtctaggtgacagtaacaaaaatttagtcatggcaacattgacatgcattggcaatgttgcagttgcaatgggtcctgctgttgagaaagcaagcaaggttgatatccaattcacgattactaattttatgctgtatacttccttttaaatttgaatgtgagagtattgatttctttcagggcattttagcggatgttttgaaatgtttgggtgacaataaaaaacacatgagagaatgcacattgaataccttggattcttggctatctgctgttcatctggataaaatggtaagtttctttttgctgtactttgtacaactgtttagcttttgtgtcttgggtgggaatgaccgtattcttcttgcaggttccgtacattgctggagcttggaccgatgcaaaacttggcgcggaagggcgcaaggatctttttgagtggttgtcaaagcaactctctgggttaactgaatttcctgatgctgtacagctactaaagccagcttcctctgctctgacggtaattctgaattaacaaaactctaatttatcctctatacttgtttcaagtcttctagatcactttttaactactcaagttttgcatggttaaaatgtatccctggatcatgaatccagttccctttctgttttttttttcttgatcttatgattttatgaaattttcttccaggataaatcgtcagatgttcgtaaagcagcagagacatgcattgctgaaatcttgagagtttgtacacaagaaactgtatgtgcactaggtacttcttttaacatatggactcattggtcagtcattgcatgaacacttttgtccaaatgtgttatttcaggttgagaaacttgttagggatactcagggaccagctttagctcttgttcatgaacgtttgaagcctggtggtgcttttcaaggtaaggttgtttagtttatgggtcactcacttgtattttgtcttgatgattta

SEQ ID NO: 380039 - DNA, 1395 bp, Cannabis indica
atatatttaaatactcaagtttattttttggaattttttattgatttatgttatatataaaaagtaatttgaagttatttttttaatttattaaggaatagtttaaataaaaaagttccaaaagtgtgaaatattttcttatgactttgaagtaaatatgtaagttattcttgtttgattaattagaatacttatataatttacatatataaaaaaaatatgggtgactaaattgtggattatgtatatattttatattaaacagaacaatttactaaataaatatagtaatttataataatatatgacaactcaatagtttcataaaataaaatttagattatcatgattaaatataaagaatggaccaaaattaatccatccattaacacataacaaaaatatgttattattctacctaaaccaaaacccctctcatttcaacttctctcattgtctctcctcttcctctcattctttttgttctatctaccataaaagaccacctaaactcaccacaatgcatcgctcgccacgatttaccaccgcacatttctcattctcttgctctctgtttgggtgatgttttgttttgtggcacacttaggaaaccatgcttcaactttaagcatgataacccaaatttctttttcataaacaattttaaaagttattaaatatttttttaaataataagatactataaatataacctaaaaaacaattaatagtatattagatgtattaaaataaattttgaaggtaagtaaaaagtatctcaaataatatgatataaagatgaagcttttattaatgaaaaattaacttagaaaacttaaaaagaaatagaaaaaaaaatagaattttaagattcttccattttaggaatattagtttattttttatttttgaaaagaaagtgttaagaaaacttagatttcatggtcattaaacaatcatattaattgtggatggaaacccactttatcatattatgggctactaaattacaagttctgagagtattagaaaataaacaaccaacataatagagagatgtcattttacaaaaagatgagtagttcacaagttcccaactagactactcactatttatggcgtgtttactaaactgtaactgaaatcagaataatcaatgggagaaatgaatcagtttaaaatagaaaataatcgaaaataatatttttttttatactgtttactaaactgttcagaaagaaaactagaatcatattattttgtttacataattaggaaatgtaatcggaatgctttaatttgacaaaattgctattattagaacatgtaattattttctgtttatagatttttaaagggcatatttgtcttctttatttttaattaataaaatta

SEQ ID NO: 380040 - DNA, 1677 bp, Cannabis indica
aacaaattaactcgatcgatcatcaacatgattaagaaaatttacatggtaattaatgtacatgagccacgctgaaattaagtatagtacgatattgaatttatttgagatgtcatctactactaatattacaaattattaactcatctgtaattacacaattttcttccaaaacaagatacataattattatcatttgtgaaatgagctgtaaaaatctgtgtgctacctagtttcaccgtccaaatttgattaggtagtattccaacttcttacgttttttttttttttttttggttaataaattatcccaatatttgtgttgtccgaaaatgtttatcctcagaattttatttgaatattgtaaatgtaaatattttgattattatatatattaaatagaaaatcaacattagtttatttaccatcaacttttgctagcacacacgttaacaattaagttgggatcctttaaattgaactcacaaccaagatacaaaagacaagctctagcaaactaatgagcaattgtctaacaaaaaaaaaaaaacaaaaacatttcttagctcagaaagtaaagttttagttagacattatgaaagggggaaaataaagcctcaatgtatgataaagctagacttaagaaaggcttatgacacaactgagtgaaattttataaaagaagcattgtatgcgttcaaatattcaggaaaattcattgttgattatattatgtgtgagaacaccaaaatttaacctgatgtatttaatggatcactccattggtactttgaggccaaaagaagattacaccaaggggatctaatatctccattattattcgtgcttggaacggaatatttttctcaaataatgatgagaattgggttaaaagaggatttcaaataccatgatagatgtgatgtattgctattttgtcatgggaattttaaatccatatacattatacttcaaggtctggaattattttctcaaacctcagctagattacaactgagcaaagagaagacaaccatttattgtatgaatatggatgcaaaatgaggtgaaaaaggtggttgaagtctctggttttagtcaaagctctctccctttcatatatttgggtattttcatttgtgcaaagagactattagttgttgaatgtgaagttttaatagagaaaatggtccaaaaaatttaaatttggagtacaatgaacttctcatatgttggaaaagtaaaaaataattaactaaattaataagtaaagcaattaattaaaatgagatcaacaatgataaaagtgtaaggtacttaatttaaattgaatttattttacctggtttgatgtaatttgattcttaaaatccaattttcatgtgatagcgaatttactaaagaaacttatatttgggcgaggacatataaatctcaacctatatgtaaattttttattctcgtgataaatttaaacacatggaaggcattaagcatgaaaattcctaatttctacacaaactatataggtactctcgtcctatattagaatttgtgtctgtttagcataatcaatactcgatcacttctcaaatgtattgatatcataaacagttaattgatgaccagacaattaaaaaaaattaagtacgattgaaatagatacacaaagaaaat

SEQ ID NO: 380041 - DNA, 3788 bp, Cannabis indica
actaacatcccaataatttaatgaattgggtcgaattataaaagcgtgcatatgctaaattgatctaataatgaaagtctgtaaaaactgatctttaacaagctcaaacaaaactgtgggatatagactttcttactttttatatcccaaaaaaggaaaggaaaaaaaaagtagcctatttgaattttgacaataattctactaatcctgttcatgtacattctaccttaaaacataaaaatacattccattgcaaatgcccagaatgaaatcccaatttgagtggcaacaaaatcacacaaaaaggtcattttatcagccttagcaatgggatgaaacaatgcttgatcaattcaagccaatcttgggcacaggctgaagtcaaaagtatggatgaactcttacaagtttttccagctctgccaataagaattcccatgtgttacattgaagttgaacactgtgtgtttcaatttaggtttcggtttcccctaatgatgtccagtcccatatctagcttgcaccagtggacgattgtttcttttttctcttgtgcttgggcttcactgcatccttcaaagttttttctcctttagattgctgtcgggttgagctggatcaactgctaaagatccttgattaacaactgtaggaggttcctctagcttgatctcagataaggtatggtctttcttcaattcctcttgtttcttattagttgttgaccttcctgtttccacaattaacaaagttgagggaaaagaaagtaaggcaaatgtaaggttttaaaatagtaaaagaaagaagctatgaagattttcatttgttaatgcccatatgcatttgataggattaatgagacaacaaaatatcagcagaacgtaccacgtgatgctagagatgcttttaagaattctggatcaacacccttcgagtaaggatccctgagaaaaagaagataattttaaaatagaactaaatcaacatcaatggttgcaaaggacatgaaagagctctaatgatagattaccattagccgcaactttcctagtgactactgccttcagaacatatatcatattatcactctaaaatacacataatgaagtaagaagctttgcttttatatgaaactggtttaattgaaaatttgtaaaataaggcttctgacaaactaataataaaaactaagaatagtataaataagggtaaaataggatttaatacatctgctcacacgcaacaataaaaaagtgcaataattgagcacatattacacacttgaatgtaaaaaaaattattgaaaaggtttaaagtgatcaaaactcctttagcttttcctaataaatgattgtacatgtatcaattatacatccaaacatgttttaagtatactgtttacgaaatcctcagcaatacatcaaagtgaagttgagaaaagctaaaatattattatttctctttttaaaaaggaaaactagcagcctaccaggatgaagggcccccgatgaatttcttcacttcatttcccttcttagtttgtccttgttctaatgatttagttcctccctcttcaacattttcagattgaccggaaatgatggtatcatttttatcaactagctcactctttattttctttaatttagaatcaacttcatcaatatccatagcagtagaagcaggatggcgtttaatcttctttaatgctctctgtgtgtcaaatgaatccacctaatagaaatgtattaaacaagttataaatgtagcaatgctagttttttatcattccaaatttgccaaaatgaaccacgatacaaaacacactgcactgcaacatgagggagaaaacaggtttttctcctgtcacagttttataatgaaggcattgcaaccaagcaaaaaagaatggtcattcccctatcacgatactaaggatgaaggctttgcaagcagttatttctctaatgagattcagaatgatctgtatatattcaagtcttgggtttcaattatcaaagagtaatttcatatgggacagggaaaaaaacatactgccttctttatcttctgggttatatcaccggctttcacagaggcgattcgcaaacactgcatgataacactttgcaagacaccttcccctccagccttttgaatagaacaaatatcaccatttgcatttagtgtggttgtcattcgtcctcccataacagcctcttcataatgagttggatctattacctagccaacattcatacaaatttagaagaaacgatatgtgccaaccacataacaaaagctcaagataaccctcaactacaagagacattttcagcttaccacactactttcactaccaataaatgcaaaggttattgctataggaagatgatgtattatcagaggtaaagggtctctctcctgccacaattcaacaacattacaaaattcaaagaaagttcagtttataattcattttttcccctcaatacacttgtataaaaattgataatttacaagttcaaacacaaaattccaatatgcaaacctcaggtggatgtacaatcacttcttgaccatcatctcctcctaatgagcattcgggcctccgaaacgtcatgagagcagccaaagcagcaatatttgcagtatccacaaggtttctattaacaaattattcaaaatgaaaattcaatatagatactcaaaacaaatgaactgcaccttgtgcttgaggggacaagatttacagcttaccctccattatctagaatatgtaggtcaatacgaatggcccaaaccaattttcctggaagaacacaaagcgattcagtgtcaacagccctgctttctctgcacatacatttaaaaattcaaattgttaacatttcctttcagtttacaatcaaactaattactaatggcaaagaatatcaaaccttaggccacggtctataacacggccaagctcaatagcagcctcggtggggcggccaggctcaaaggaaggatcagccataggggagaactcagtgaagatggaaagcgtgccctcgttggagcggtcacgatagggttgaaccaattgacccgtcacaaaacccatgacatgggtttggcccagctgcacctctgccgagccatcgtccttgccgaaggtgatgatgacattgcgatagtcgaaaggacggcgaccgtcaactcggaggtcggagagaagagcgttctcaataaatttcttctcattgactgtgagacgccatgtattggccagtcgttgctccattgttagacttcaacaaaatgaaacttagtacaaatccaaaaacgaaccttagtttaaattggtgacaaagatggtagggggatgccggagagagagagagtgtaatgtcgtcggcgggaagaggagatggcgagtgtgagaaggtagcagcaatggagatgaaaccctacgagtgttacagttattaggctaaatcatatggtagttttctaaactataaatatattttgacatatttagtttctttttaaatagatatggtagttttctaaattattaatatattttgacatattctattatgtattaacttttgacatatatagatacgagaaatgctaatgtctcgagcacccagcacagcatagtaatggaaaagaaatcgattatatgagagaaacttttccttagcattttcacaatgcaaaatactaaaggttgggagcaatgaaaatataagaatataaatggaaataagaataaaatagaataaaattta

SEQ ID NO: 380042 - DNA, 2605 bp, Cannabis indica
tcgtcgagatgacttcttggtcgcgccacaagaagactctgatcacccaaattgattgaacttggacttttgtctacggctgtcggagtagaattgctatcttctgttcttgtagcttgatcttcagtcaacatttttgaatagaaaacaagttatctgcaagaaaaatgcaaaaacgtggaacatgggatagttgggatgtcgatgaagacaattgatcttcactgcagacgtagctattgccggaaaagacgacatggtgatggtgaaggagggagacgactcaagatcaaaggaaagcattactttcctgctctgataccatgttgcggaagaagtaaaggaattactttattaaaatgtgaatgaatgaatatagagtacaaagtagagccatatatatagatatgggaagatgcccaagctagaaaaagttaggctcagatactaaccaaccgactctaacaagaaaaaaaagactcaacatgtgtcaacagaaacagaaataacggtaatacctaacacactataactgtatcaacggaacaaacggtaagtcttaataatagagtatatattttctatctgaacaaagagaccaattttgatttgataggggagtgaactgtgaatacacatatgcaatggcaaaaacttgtttactctttctaggtggagtttgtttgtttgggttttttttttgcactttacacaatttttttggccatcgtatatatcttctaaaaataacatttaaaattaacatcaaaaaccatataattttatagaaatagaaaattttcttacaaagaaatatatatttagaggaatcctttagttaagagtattacttttgcttttataaatgaggatactttttttaattcatttttaatctaatgtagtaatttatttatggaaatatcacacagagaattgatactttttttagggaaattgccccatatattattttttttaacttttttttttcaaatttacggtttgggtttctaaagtggttgcaccgctagttgcagtatgggtttctatacgatttttgttgcaatttaggttgcggcgctagttgcaataggggtttctatgtagaattctgtaaaaatgaacaaaaaaaaaaaaaaaaacaaactattttaagtgtaaaaataaagaagtcccttttttttattgaagaaaagttacttagattgtaatttcaatccacgtatcttctaacccccaatgatcttctctcagttctattctttgccaacttttaagaagagtgtaagttcttttttttttttcattgtatctcccgttaatagaatattctaataaaaagtatcgtcctcatcaattcaaaattcccaaaaatattttgtccccatcttcttctcaattctgtccaccacaagcacaaatattgataattatgtctttcaaccccaaattattatgtatgtaccgtttctaagttgctatcatggaaaatttaggtgaaattctttgcatgaatattacttagatgttgtataagaaaataaattagtttcatgaaaaaatgggactgaaataccaaaatgcacatagggaaacggggcaagggcaagagatattttaatattaaaactattttcaagatgtgccttagattgaaaaatatcactataaaattgcatggcattcactaaattcatgtgccttattttggtgtagactacgattattaagcttgttattcatggttctctaaacgatcgagaagatccttgggaaaaaactcacaaattaactttttttgataatgttaatttatttttttcttttaaaataaactagtgaataggccgcgcttcgcgtgcggctatttataaaaattttaaattatatatgtgaaaatgaattgaacaataaaattatataattttaaaaatatatatttatttgaaaaataaataaatatatattaagaaatgtaaaaatttgaaaaaaaaaattcgtacaatttctcatataaaaaatatcttcaaatgacgaactattgaaaaataaacaatactcacgcaaaattataaatgtaaaataaaaagaagtctcttaattttaaaatttatatttttaaattattattttatatattttcaaaaaaaaatattattttattttaaaaataagatatatgattatattgtttacgtttaagatatttctattacttaattggttatttaacttaaatattatatataaatttataattatattgtttaaatttaagatatttttatttatattagattaattaacataaatatttgatcacatatatatagtttgtttttttaaaaaaaaatatcgggtagattttttttgtgtgtgtaatgttttgttttcatattaataattttgggtgattctacaatgcacccccttaaaagggatgtactggtgcacccttaacttgtttcggcatccagaaaaattttttagtctaactttttttcatattcatgtacatttagctatttaagatatcctacaaaattttgaaaaattcggaataatttacaatatagaaaacaatgttcaaacagtctatttt

SEQ ID NO: 380043 - DNA, 4772 bp, Cannabis indica
tgaattcttccattagtactccatccttctagtaataaatcaatttcaataagtattattatcattagtggtacattatggtgaatatctatatatatatatataaaaaaaaaaaattatatatgaagagcatcaattcaacacaatcatcattcataatattattgttgaaaaaaaaaaaatgtttgatggccttggcagctgagttagtagctcttcaagccaatgacacttggtctattgtttttctccctccccaccaacataccatggaatcaaatgggtttataaaaataaaatacaatgttgatgggacaatagaaatgtacaagactagattggttgctgagggttataaccaacaaaagggaatcgactattctgatacatttctccatttactaaattagattctgtgaaattagtacttgctttagctgcagtccattgatggttttctcatcaattggatgtgaatatttttttttttttttttttttttctataggaacttacatgaggaagtgtttatgactaccctcaaaggtataatcctatgggagtaccatattgagagatggagtatcaaggaatggtttagttagttagggtgagctgtcaaaagttgagtctgtactctataccgtttagtaactattttgttactgttctgtttcgttctacaaattcattccaataatatacaagagaattcttcatcttcttttttctctctaaatctaatagcttctgcactgttttagcataattgcctaacctattgtgatctggctttgcgaaatgatttccttttaaaatagacgtatcacgttttgtgttagcttttggtaatatatgagattttaaatattatgtaatgcatgtaaggataacacatttttgcttagtttgttcatcaaaccgctcaaactgtctgcaccacaccacaccgcaaaaaaatgcggtttgaaattccttgcgatgcggtcgcggttggaacttttcttaaaccgcacggtgcggtgcggtttgcggttttgaattgttaatatgcggttcaaaccgcaccgcaccacatattataaaaataccaatttttatatttatttaggtccaatatgtgaaagtcaacctaagcccactaattattgtattgttaaaacttgaaattttttttcatatttattttcaagtcttatgttatttttgacaagtgttgctcaaattttgttgtatttgtgatactttaattatttagtgatagtccaaaccgcataaatcgcaccgcactatattttgcagtgcggttttttagtttcgcagtacaggtacggtttgagaaattgaaaaaactgtatgtgcaggttgatttgaaaaaatagtcaaaaactgcactacccacaccacgaacacctctactcaaacttgtcacgttaaaacggaaaccgtagcactactgtcgccgcagaatcacaaatttatttattttaaaaccaacaattgaaaatgacattattttgtttatgaaatctggtccatagcgtcgactaattgactcctttaatttattttctgccaaacttttttttaggcatttaagcattttttttaataaaaaaataccaccaaaatgaaagtgcaaataaattgtaacatatttaattcacaaatggatttaataagaaaaatatcgaccacacagaggtggttctttgccgtgttgtgatcgtgaagcaattagaataatggtgtacaattaccaaattaattaataatgtcattatcaatatttttgtaagcttgcgatattgattcacactttttgattttgcctaatctaaaatgaaataatctctgttcatagtcagagaatcactttctcttcccacatgcaagaatcaccattcaaagtcttcccaattgtgggtcaaacctttgatattttctgtgtattgtgtattccaaaacatatacgaataatacattattccacgtatatatatagtagtagtagtagtacaattgagagaaaacgaagttaaaaagaaaatggctttaaattgggccatcaaaataatccttagtctcctattttgtatggtgtctgtttcacaaggaaggcaaacaatttccaactctacattcaaactcagagctgttaatctgggaggttggcttgttacagaaggttggattaaaccttctctctttgatggcatccccaacaaggacttattggtataataattatatatatgagtaaattttttagtaacccattgatacatatttgttataactaaatttaaaatcaacaggatggaactggacttcagttcaagtctgttacaacaaaaaagtacctttgtgctgagtctggtggaggaactatcatcgtagcaaatcgaacttctgcttcgggctgggaaacatttaaagtagttataatttttatttattttaaatatatatattgtgttcttcatttgatacaaattatattttatttaattctgttatagttgtggaggatcaatgaaaatacatttcacttcagagtgttcaaccaacaattcgtggggcttagcatgaaggaaaatcaaattaaagtagtggctatatccaatataacaactatttctgataaattccacattgtaagaaattccaatgattccaaccgtgttcggatcaaagcctccaatggattctacttgcaggttttttttttttttttttatgtaataatattaataatttatcttaacaaaatacatagtggcagccctattatgtgctttaaaaaaaactgcaggcaaaaacagaggagctggtgacagctgactatgcagaggagaatactacatggggagatgatgatccatccgttttcttgattagaatttctggaaaattggaaggagagtttcaagtcacaaatggttatggcccaataagagctccacaagttatgagggtatgatatatatattctactgttataactaacataacagttaattaagcatatataaaattgcaaataaaatgaatataaagaaagagtttgaatggatcaggatcactggaaaacattcatagttgaaaaagacttcgagttcatatcagaaaagggattaaatgcagttagaataccagttggttggtggatagcgaatgatccaagacccccacggccttatgttgggggctccttaacaatgttagacaaggctttctcttgggcacagtacgtaacattgtataattacagtttaattagatatgataaaacatttcaaccaattaaaattgttcctttttaaaattaattttggtaggaaatatggattgaaagtgataatagatctacacgctgggcctggttctcaaaatggtttcgagcatagctcttctcgagacggttcaattgaatggggcaaaactgatgctaatattcaccaaactgttgatgttatagactttctaacagccaggtcaatcagttgttttcatcttcacaatttattttatgtgttattaaatatttaattaactaataacaatatatataggtatgcaaagagtccaagtctacacgcagttgaactcttaaacgagcctctatccccatcagtgaaactagagacactgaccaagtattacgaggaagcatacaaagccattcgcaggcactcctcaactgtttatgttatattctcaaatcgactaggaaacattgacgcaagggagctattccctctagcaaatggcttaaatggaattgtaatcgacgttcattactacaaccttttctcctctacattcgacaacatgacaccccaacaaaacatagattacatctatactaatcgaacaagcgatttgagttatgttaccacttcaaatggacctctcaccttcgttggtacgttaacaacccaaactactacatcttttaacaaaaatatatatatagataatatttatatacattaatttatttgacaaacaggggaatgggtggccgagtggcaagtgaagggagcaaccaaagaagagtaccaaaaatttggaaaggctcagttggaggtttataatgaagcaacatttggttgggcttattggacacttaaaaatatcaacaatcattggagtttggagtggatgattaataatggttatatcaaactttaaattatcacagtaaaaatatagaggagtgttaaataggtgtcttttgcactctcacttcctcatttattctaatgacacatgtcatcttttaaaatatatctacttttataaaataattaaggaatatttctcatcctatttttttttagtaattgaaaacaccaattttattctatttttatcaaaatgtattgcttctatgtcttgcatatttttttttttgtttttacttcaaattaaatttactttgtcgattaatccaaaataatagtcacatgaaattcttttttgctactatgtccacattttccttttcacatatactcgactcgtccagtacctccaccaagacaaggtttaatttgttgaggtcaaattgagacgccagttttgccaaggaatctacattagaattttgttctcttgaaatttgttctattttaaaataatcaaactttttcaagttcttacgaactttctctaaatatctaaccattcttaacccctttgcctggtattcacccaagcagggccggccctaggcataggcgggctaggcccgtgcctagggccca

SEQ ID NO: 380044 - DNA, 2077 bp, Cannabis indica
catggttgtcatgattttaatatacgggtaccataaagataatttctaatttcatgaggggccaaattgaaaatagacaaaaaggattaattactatcttttcagttattattaaacaggtattggtccctatttttacatcgcttcacatatcgtatctttattcttaaatctctagcatcaagaaactcaggttctagatagaaaattttgatgcaaaaatatgttgattttaaagtgaaaggacgaaaggttgagtctgagccctaaaatccacacaaaatgaagatgagttaattagctgaaaatgtaataattgagtttaaacataattaattgatatgtttaggcaaggtgagataagaaaaatttgaagtaatgaaaaaaatcattatatattattattgtaaaaaaaaaaaaaaagacaacaacatgttgtatataacatattttgttttacaaaattagattaaaatttaatatattattacacagtatgtaaataagactactcattttcttagcttgagcctttattaagatatatgagcgtccacaacaataaccatatgcagcagcaacagagtataaaactagaatatttctccaactctacttgtcctttttatccagatattcccaacaatctcatgatattttgtgttaatgatatacattttgatgtactattttttgttatgaaatactcaattgtattgtgccatctattaatgcaataatgactctctcttgtatcaaacctctatataatgaaatgcctcacctcactcatctttgagttgagatttataattaaaaacttgtatactcttttcttttttagtatcagagcatacgctgaaacatgtcaatgtcaactaatcaatattagactccagccaacaacaatagagctccagcatccaataatcttggaattaccaccaatgttccctcagctcaatcgagctttgttaccaactacacacaactttttaacacactaaactagccaattcctttgaaactcgacaggaacaactatactcttaggaaaaccatggtctctaccattattaaaggccattgacttgatggctttgtcaatgcactcgaccctgccccacagagttcattctcaacactattaccgtaggagaagatcgagcagttctccgtgtgcaaatcaactcagattatgaacattagatcgtgagtgaccagctctcgatgaggtggctatacagttcaataaccgaatccataacgacagaggtcatgagatgcaataactctgcttctctttttggaaggccttggagaatctcaaagcagatcattcgaagtccaaaataggacactcacattattattcaaactgtaagaaaatgtaatatgtccatggttgaatgctatcgacaaaataagacatgtgccaataatttagctcttgtagggaatccctaccctgaaaatcatctcactcatctttgagctaaaatttctttaatttagtttatattttgttttgttgaaggattatgtttaatttggtttgatttactttaatatctaattgaccaataataatcaactaatctaataattacagagtagtcaaatacatcctctatttctaacataaaaaaattgtatccatacttttttaataaaaaatataggcagctggaattaatatttgaaaaattggataatatcattttcacttactagatctttcacatagtaaatcttaaactattatttcacaaattaatttttcaagtatatgcctccacgtgcccaaaaacagtctttgaaatttatatcaagattaataatgagacccaacacaaacccaaaccccaaacccctaacgattaatatttgtttgctcaaggaaatttgattttctatacttagaaaatcttaaatttttccctaaatacatacttaataatattggtcatatgtgaccacattcctaatatcccacaaatacccctcccatttgaaaaaaatcaaaaaactcaaattatccatccatgggtgcctcatcctgaacctctctctccct

SEQ ID NO: 380045 - DNA, 3364 bp, Cannabis indica
gttttttcaaaaaaaaaaaaggataactaccactgtcaagtacagtgaaggcttcttcaatcaaccatgctttcttacattttttagcaaaaaatatatctgaagattcgaataagcgttctatgagtaaaacttatattgggtttataatggcatctgagtaaggtgattctctacactatgtttttatgtccaagagctgtatcactttttccttgacaatggaaaccatgttccctttgataacttctcaagcattttgacattgttttagtgaaattggagatgaggcagttctgaaagcactttgggagagatttgagaaagctgctgacaaggtatttttccaaactcttcaattattttggcattttttttgaaaaagagaaagagggcttttatttattttttaaaaacaaaaattgtgtgtggatgtgcaattataaagaaccagaaaatttggggacttaaaatggtatttaaaatattggctttgtctgctttgatttatttacaaaattgatgtttaggttgataaaagaagggcgtttcttgtttttctcaaacaatttcttgttgtatacaagaaatgggaaccagacaattttgggcaattgtcagatgctgcttcaacttctatcccacttgcagagcttccatcacattttggtgatgtagttattggttgttttgctggacatccagctgaaattatttggacattgtctgaggagctgaaacaaataactgctctggtcaccgactgtaagtttaattttgtgtaactggttctattgccctgtctataaaagttgtacctatctattgataacatcagtagaattctcatttcttatctgaaagaaaaaatgtggtggtgatcaaatttcttgtggactatttgctgcatgtaaaatgttttggtactaaattctggttgagtttgttgctgtggtttggtttcatcacaaacactcctttggctgttatgttataatatatccctattatatattgatagaacatgtaacttcctcatcaatactttcttgaccaagctttataatatatcattttacagttgtttttttttttgtttcttccaatgatattcagtaagcaccagcctagtgcgctcagcagcaacagacttctcctgtccttcagcaactttgagtatcacttccgaagggtttcttgtctttgatgcgctgttaattatctctcggtccttgcataattgtagagtttttggatattatggtgggatacaaaagcttattgcactgatgaaaggtattatttgtcatatttatataacttttttcttgtaagtaattgtttcaaaagcctgcggtcagcaggcctttgatatatctacctactgaactgtttcactctagaggtagaccaacctctcttaaatctcaaaactaatattaaaggtgtggtttttcttcttttgataggtttttttgacaaatattttccaagtaatattaatcatcatatatcatactcataattatttgagacttgctaaaggttccatcatatgtccaggtctagttttgttcataattaagggaagcccacaaacaaaggttatgggtttttttttttgaaaaagtcacttgtcttagactgacccctccctcgttatgttattgaaaactcacttgtggcggaagaataccgtggatacagtagctttagcacaaacgaactaaaaacataccgtaccaaaacagttgaatagtaagaagcacaattgcccagaaataaaattaaattacaactaagttctccattctctacttacttaagtctagaaaagagaattgatcaaaaaacttagtcttatacacccaagtagttgtccaaaatctattctttcttatcccaaaggtccttctattgtacactcataaaattgctagaattgtggttctccataagcaagtccttctattaccacccaatttgctaactatcatatgggggaccgaatcagggaaaacccactgaattccaaattcattcagcaatttaatccacaaactatgcacaaaactacacctcaaaaacagatgccccacctcttctccacttttcttacagcagacacaccaacctgaagacaaacacatatacagtctctttttttgcatcacaacatgtacatttaattttcctagagccaccaaccaacaaaaaactttcactttgaaaggacatttgcttacctataagattcttgtccagaataattcacctatgttttgatccgaggtaaaccaactaaaagttgatttataagaaaacattctacccggacttggtgaccatacttgctgtcctccaagatatcgagcaatctgacatgctccaattgttgtagtagttctacaaggctaggtatttccctttccatcaagtttcttttgaatttaaaattccaacttgcaacaaaatttcccacctctccctcaatggccacaagatctttaatgctctcgttctttgccttagatatcacagcaagatctggataacggttcttaaaagaagaatcccccatccaaacatcttcccagaaaagaatactcatcccatttcccactttaaattgcaccagctccaagaattcctcataaagatctgaatatccttccagggaccccctggggacatcctaatacctcctcttgtatcccaaaagttttctgtcttaccataacaactttggatcactttgtaccataatgatttgggttctaaagggtatctccaaagccatttcataagcagcgccttgtttctcatatctaatctcccaattgcaagacctccctcatttttagatatgcacacctcctctcctgcaacaagtgatcgccacccaaaaggtctttgcctttccataaaaaatctcgcatcatctttgccaaggttatgggttatattctattttgatattttcgtttggcttgtactgattccttaatgtttatcgttgcctaccaccttaatacctctacttttttattgaagagctacttgtatgggagttcagtattggaagtatgagagaaaattaaattttgggtagcaacttgaattttttaagtcaaaatattttgaggttttgtcatttttagatttattcagggactgggaaaatataccatctagtaagatttatcctttgggggagttttcaatcccgatgtagatatttaatcttttatattaaaatatctctgttatcatagttttccttcacgagaagctacgttaacttgagtgggggtcagtctaagagaagtgatttctgtctctttttcacacaaaaaaaaaaaaa

SEQ ID NO: 380046 - DNA, 3090 bp, Cannabis indica
caaactaagctttctgatctgctacataacagagcacatatgcaggaagaaaatgaaaaatataagacatgggatatattgtagaatggctaagaagatcgatttaggtccggagatcccaaaactagttcggttttatgaagggatcaaaaagtattgtctttttaacctatgatgaaattgagtagatttcaagcatagtatcatgttaacatacctcatatgtgctagtgctagtggtcatcgcgatgagaaatttgctttagcttgcaatttgcagaaaactttgatcacctacatcaaaaaaagaagaaaccaattgtatattagaaaccaaatccgataatggctaattaaacaagagatatatgttatgttaggagagaacagaaatctaaaatcttcataacagcacaagcttgaagtcctgcaaaatagagattcacttaagaaatcaattcatcagaatcagaacaaaaaagccaagaaagacatatatatatatataaaatataaaaactcctgtggaatgaaggcctggttattcatcttcaacctgttccaaaccgggcaaggtgaaactaggatacattcgatctacacttctactaggtaaattcaaacaaagcctataacaggagtagttctataaatacaataaaataaaataaattattgccatattacagaaccagagccaaaacaaattcaaatcaagtacaagaaaataactattctttcttagccccacaaatgtactaaacataacacaaaaagtgcaagctaatgaatatcccagatttctgtcaaatttaggagaactgaatttaattcaagtctcacaagcaaatgaacattactcgaattcatatcgcatttcaaggagacaactaatggaagatctaaattgcattaaagaagactagaaatatagattgtccctacatacggggcaggacacatcaggtccaccatttaagtatctcacataaagttctatcatccagatttgttccaagaaaagagaaaaaaaaagggaaaattataaagaaacaagattaagataagtaagtaatataacatcttcgcatttatgtatatatctctagctcatatccatgccatctccaacttgactgcagattggactgacagcggtgaaggatctctcgaaaggagaaggctggaactgtgcatcccgtcgtctgcgcttgaaagagcaactatcagttgtggaggtggtgttatcagcatcaaccttccttcgaatacctctcacagcctgctcctctacagctgtaagctgaaatatttgacgactcgctctgcaaagtgaactatggttatcatacaaaattctttggttacagtttttgtcacagatgtgagtaagtccagttagtttgcaacgatacatgtttccacaaacatgttcattttcacacttccaatcgcatttgtgaacaggaatcaacccatctcggcccagaatagtcgacaggtaaatcacattagcaggccctgatgataccatagatttgccacacacctccattgctactgcgaatcgacaagttctaaatgtcaatttatgagacaactctgcatattccaatgctagaggacaaaatagaattggaatatggaacctctgtgttctaaactatttcaaatccagtaaagaacaaggatttggtacaccacataacctattaaattctcttcactagaacaaaaagaaagctactttaaatcatttgatgtcctttcaacctccataaatttaaaatttcttcattttcctccttgaaaatggtttctacaaaaggaaaaaggcctaaaatttgtgaaacccctaaatacagaacgagtacaaaaagaaaaaaaggacaaacgaacaattcttcccacaaaatcttatttcctgcaacagatctgaaaatccaaaatccatacatatatatacaaatataaatataaacaaataagacatatttaattatttatgacataattataactgtacatgtccaaaaatatatcaaaaaaacagataattaaacaaataaaatataaatttttctctctcactaccttttacagttaatcaaaaacaataaatataaccaaaaataaataactaatcaaatcaaatcatatcatatccataacaaaccagacaaaacagaaaatatctcaacacaaaaagttaaagaaagaaagagagagaaacaatgcaaagacatacctcagtgctttagcttcttacagaagaataagaagaagaaaatggcgaaacttgagccacgcgcctccaccggccaccacctaactccaacccaaaactctctctctctttctctctctctctctagctttcactttctctctctaactatccacaatgataataatctgagctttaacgaagaaaaacgtggaaatggaacttggtatttatagaaaatggtgggttgacgatgaggccagaggtcactgtgaatgtatatttaccattttagacacccttttcatactatttctcttttggattacgggggtaattttgtaattttactctctcgtactcacagttacttgacttttgttaaaagcgtatttggaactccactagttcacctacaatattggataatatcccacctattatatatttttttttcatttaataaataattattttctccacattttttgtttttttgtgtttctaaattaggttttattcttttttggtcctctaaatatttattatttagcaaaattagtccttcatattttttatttcatcaatttagaactcttattaagtttcttttttctttctaatacatgaaaatgaaataatttttaaataaaatgaattattaaacaatattatattgggtgtaattattttgaaacaaaacaaattagcatgaactcaattatttcacacattgagattctgggccctcatttaaaatatttgtgatatttttataaattattacaaaattatggtgccgtttggtaacacttttgttttttaattttttaatcacaaaatgaaagtaaaatttttgtttt

SEQ ID NO: 380047 - DNA, 1983 bp, Cannabis indica
ttaagtttttttttttttgtggtttaagatttaagaaagaagataaaaaattaaaaagaaaaaaaaaagagaaaaaaataattatttttcaattattttggtgggtggtggtggttgcgttatgatggtggtggtgggagaagatggtttctgggtagaggatgaaagaaacaaaagaaaagaaaaaaagaagaaaaaaataattatatttttgaagtttttgttattttaaaatttaaaaatatatttttttttaatatttatattagatggatcaataaaaatttgtcacgtgtatacttttgtaaaccgtagtaatccactttagcacttaacagactaaagtaaacgaaaggaatacttttagctctaattatttcagtctaagaagttaattgtactaaatttcaaagtttaaagagtttgaccacaaactatccaaaataaaaataaaacttatgaagtacatttttagttttttattttcaaatttaaaaacaaaaacaattatgaaacacatttttaaaaacaaaaaaccaaaaattaacattcattttgtaatttaaaaaattaaaaaacaaaattattaggcacccttaaagttcaactttttctgtgtatttaccttcagagaaaaacgacaatgaaagacatagtttgaaaaagcaatggaaatgtaaaagcttgtttcttgtttgaagggcaccacaagtaacagtgtgttccatatatcttttttttttctaagggtccataaataatctattaattattactttgagcaaaaaaaatgtgttccgatttgttgagattgtgaaaagtaagaaacagaagcaagaaaagaaagagagagaatggaatcaagctcaacctcaaactgagaaagagaggctttatttatattaatcaagaggaaattacaagaggcagacttagttaaaactaactaacggaaaaactattaaaacagttacaagaaagataaaacaattaaactgatacagacaaaggacaaaaaggtcctaacaccccctctcaagttacactaggattcctaagtgttaacttggacctgaaattctcgaactgtggtataggaagagcctttgttagaagatttgcaatctgatgttcatgagatgtgtcgtatatcaagttgattagcaagcacacgatctctaataaaatgaagatcaacctctttctgcttcgttctagcatggaacacaagatttgaagcaagacaagtggccccaagattgtcacaccagagaacagggcaagacacattagacaagccaatttctgtaaacagagactgcaaccatatgagctcagttgtggcaagggcaatgactctatattcggattctgtgccggagcgagcaaccacagtttgtttgcgtgaacaccaatgaataagattgtctccgaggaacacacaatatccagaagtggatttttgatcatcaactgagctggcccagtcagcatcaaagtaagcaacaagctgaaggttggcagaaggcttgaaatggaggccaagatcacatgtacctgctaaatatcgaagaatccttttacaagcaaaccaatgctcagatgttggagcttttaataactaggagagtttgttgacagcaaatgaaatatcgggtctggacatagttaatattgtagagctccaataacacttatatatagagtaggatcagttagaggtgtgccacttgttatggaaagtttggtaccatggacctgttagaatttattttaccaggatcttagatctactcacaagtatgttattttaacatcctaaacatgaacttctaaaacgatatgaaacaaacacatataaagtataagaaaccttacagtggttgcagcggaatatatgtctccactcagatctctaacccttgtatcttttctgtcgcagagtatcaccaagatctgagcccgaatgtccttctcttcagt

SEQ ID NO: 380048 - DNA, 4312 bp, Cannabis indica
tagtttttgagtcactttccacaatcacaaaagatttacaaataaccttttataaacaattagataaggtgcaattttattaccaaaaaaaatttgtgtattttatttatcccacattattcatgtgagtagttgtgtagtatacttgtcaaatggtgaagagggacgagaggcgtccctaagttttccaagtcactagtatgtgacgaggggatttttaaaaaatgagtaatttcatctgttgatacattcttctttcttcgccttttcaacacacgtaaatgagcgatttagttagtattgtgcatggtttaacttgtacaaattattaagtataaaaaaaataaaaaaataaaatcaaagtttcgaattggatatgagacaacttattatttcttcatttattctcattcaatcaaaaaatatttttttatgggttgatttcttcattttaatgaagcatggaataaacaagactttttctttttgttgaaggtaagttgtgcacgaaaagcccaaaagcaattttagggagcattaaagctttatagggtctttctgtccaggtgtatgtagtccgcatcttcacatacatgtttatttcaccaagtctcttccgagatagtgctcagatcgttacgctttttgtacaggccgaatttgtagcctcaaatagggctcggtggcgacgggactagtggtcgggccctcctcttggggacaagtgtcagttgcctcttgctaccccgacctctcctggtctgatgccacctcccttgtttgggtaccaaaccactttaccaattgcaagctgagcactacataccgtaactgtaacaacaattcatacgagcgacttcttccctcctcctcctctctaactcctagctcctactattgaccttaaacccaagttctaaagcatacaaactaatggtgggtaccaataccacaagaattataaatttggataggagatataaaggtagggtgtatggaattaagtatgtacctgggagcagaggatgaattaaagtaaaagtaaaagtgaaaggacatgacacgtgtgaagtgggtggaacgctccagcaatcatggcaaagagcagctctttggtgctttttgcataaataataaatattatcatcatttaattttaattaatatttatcagacaatcttttttccgtacttttatattatcataaagtaccaaattatcctcacacgcgtggacaacttcacacgtgtttttccaatgtatattaaaagctgttgttgtcttgttgagtgaagataatcctctattttcgtttcaaacggtcaattttttttgagagaaattacgtttatacttgttcccaaacaaaaaattagagaattacactgatatgtagtattattttggtagtatatctttattagtgtaattaaatattaaatttcgtataacttatgaaaatagtttttaaaaaatatcgttaattaattatagggcgttacctattgaaggttgagcactatgacgcctaataataatgttcatttttggataaatgtttagactatctccaatcatcgaaaaagtaaaatttgtattaaatttgacacaaaaataatattgttatatttagcctactatttataattatcctctaatgtagagatgtaagaaaatattattattattgattatcatttaatattttattaaaaatatacaaacatcattgtattttatttttttattgcttaaataatagtaatataataaataaagaaaataaaattatataaaaatcaataaattataataattagtgacattatagtaaataaaaaaaagtagaatttattgtgggttaaatttgatacaatttatataatatgtcaaaattgacacatttttttagaacatcattagagtattattttttttaattaagtatgttaaaatatagcaatacaccatttttttattatttcattgaagatgatctaaaggtcactaatattgtttagtactactatgatgtgtaatatcgttattagtacaatttaatatcgaatttcacatattttaatttaataaagattataaaggactgcttaccaatgttaagatgacatgtcatagaggtgctaagtatcttagtaccccatagcaacactctaaatctaaagtatacatttaaaatggtcattttgatacattttttatatttatgagaatttttgagttatatatataatgattatgtatattgtagttatttaggattattagtaagtttttaaataataatattaagtgtattaatataaacgtgtcacatgtacaagagtatgtacataagtaatttaagttgacagttaactatgaaaagtaaataacaccttaaatttattaatagtttaataatttaaaaaaatttcaacattacaaatttgaatttaaaaacttaaatacgagtaaaatgataattgtggtatttttaacaatacattatttatataaatataataatgcgactcagtgagtcagattcttcaatcattaatatattttattatttatgttatctctcatcaattttgcattaaaatatacataagaaatataatcattaactgctagagctagagaagtttggttataacggataggataatgaattatgaatcaataaatgaaaaataaaaattggagctaaaaaataaatcatcattatttgaaaataaaagaaagtttaatgatgtttttgggttaatagaataatgtgttttataaaagttactaaatgttttgtaaaataacaaattgaactctattttttaaaaaatccacaaaatagtaacttgaatttaattttcgattattttttttaaatataacttacttaaaagtatattatagcatgaacagatacaaaaaatatatatagtgtcataacaactataaattaagttattattaatttttttttttgacaaaaaattaatttaagataattttaattatttcgtctaatttattatttaacacaatagatgatctatttataatttttacaactacaaattcaaaataatatttaccttttaaatatttatggacttgctgagttttaggacaaggaataaataaaagggttggtctcaaaatcgaaatttgtcccatttttcactcacttgcttttgcttttgctttataaagtgatactataaaatcaagtcatttctttgttgctgacaacttttgcctttgcttcattgtttaacactacttaattcttattcttcaactatacaattatttattgatttatttgtttatttttttttatataaaatattctttggacagccattacctttctatctacctcaattgggttctttttacaaattcaaaaatgttttagatatttattttgtattgtttcctaacctaaaatttgaactcataatccttttatgcattatttttatgaaaatgtagagaatcattatttatgagctagaattttatgttatgttagctcacttaatgaaattcttttttaacaacatttctttatattttcacatttatagttatatttttaggtcataaaatgtgagtgcttttatagataacaaaatactttaaattttgtggttcatataaataatgttatctgttacatcgtgaaataaaattaaactctttaggaatcttaaataaattatagcttaaaagaattttagaaatcaaaatacaatttagttacaaacttatcaacttaaaacatactaaatatagttttgctcttcaaagctactaaaattggtttaagttataatagttttttaaatgtaaaatttgaaactgatcaattggttgaattttgtgaaaccattttatagttcattaatagcaaatcaacttctatttttgaataatctaccacatcacttttgtttctactgtaataaaaaatttatgtagaaaaacccgtatcaataattatataattttatgtatggttaatttttaaatatcttgtttctttacaacaattatttttttgcgcgatagtttctgtaagtgttttagaaattgacgtctaaaaatagtttttatttttgtaattacaattaaagacgggaaacttacaaaaatattaaaatttggattaactcttacaaactgtcacacggaaattttttcaaaaatactacgttttaataaaacaccagtagaacacaaaacagaacaactcaaaacaccagtaagacaactaaaaaacaccagtgaaaacttaacaca

SEQ ID NO: 380049 - DNA, 1816 bp, Cannabis indica
aaaacagtcagaattcttaattaataccgacaaatcccgcctctaataattcggtggtataaattttttgaaattttgggcggttaaattcccgctcttaattttaagggcagaattttcgtcgatattaataccaatccaccggtattaaaaattttaatttatttttaaaaactattactggcaaatgacctattccgtcagtaataccctcattaatattggcggtttgcttctggcggtattaattccaccagtaataataaaatttgttgtagtgttgatacatttacctagtccttactttcaactatacttcttatattcacaaaatgtctgaatataatatatataatccatcttgagggagaagaataatagattttaattagcctcttttaaattttctttcgttagttgtgttaccattatgattggtatgtttgttatatttgttggttcaacttttatgatcttagtcggtgaagcctttttgtataaataagtgtctttgcgtactttctaatcaattaattctattgttatcatacataattttttgtcaatctctctgtttctttccgcaatatttacatagtctaattatgacttaattcttcatatatatatatatatatgttttatagtatagaatatatataaataagttgatgttgttgagaacaattagttgtaatagttttttttgttatttgtacagttagttatttctatttttctagttgttagttgcttttagctttgtctctacttgtgtatttatactccgtaccttgccttggaaatcaataatacaaattcatttttaatcattcgtctattatcttaacacggtagcagagcttaaagctctctaaactgttcttttttttcttcgtcttcttccttctccttcttgctttgttcttccatggatgcttcgtcctcagccaagaaagactctctttacagagaaccaatctccttcaagctatctctctcatccaaactcaatgaaaataatttcttatctttgaaacatcaaattctcatcgtcgttcgtggccatcaattacaaagattcttcaaaccaaattctgctccccctgagtacgatacactcgaagatcgagctacaaatagagtctcacaagactatatcgactgggaagcacaagatcagctcttgttgtcatggatgttatcctccatgaatgatcagatgaatacacgcatgattgggcatgaaacttttgctgaagcttggatcgcgcctcaagaattcttcactgctcaaactaattcaaagataagttaatttaagactcaactttgtaacacttagaaaaattcctcctatattagtgattacttgttaaagatcaaatctattgttgatctattgaaacccataggccataatgttaccactgcagatcatgtcgaagccatttttaatggtcttggatccgaatatgacatcttctacacttcctataaaatgcacaaggagaagctcactattgttgatctggaggctcttcttatggttcaacaaacaaggattgacaaagctgttaaggatcttgacatatcctctctagaagtcaatctagcacataatggtcgtggaggttttcaacacaacagaagaggatacactgccaatccacctgtctataatggtcagcaaactcaagactcatacaattcctctagagatccctatggtggccccaacaatcgtggtgggaaaggtgttggaagttattttaccaggatctagatttactaacaagtatgttggattaacaac

SEQ ID NO: 380050 - DNA, 2007 bp, Cannabis indica
ctaccgcgggaaattcaaagagtaagaggggagataagagtcacaatcgtaatgactcagtgaagaaaccgagaaaggagtatgatctaaagtacaccaagtacacaagtctgatagatacttaggagaacttttataaggcaacatataacatggtccattatcgaaagcccctgcgcatgtcaaatggcagaaggaacaggcaagatcagaacaagcaatgcaaatattatggagaaaagggccacacaacaaatgaatgtgaatagttgaaagatgagattgaaatgttggtccgagcggggcatctggggcagtgggtccgcatgatgcttctcggacagtggggtaccgtaaatcccccgtaaggggttatgcaccccaagatcccataacatcattacatgctcttctaactcgaccaacttctgcttgggtggctttgcttgcttcgagacaagaaactccatatccttctataatcgctctattacccgtggataggcatgttgtaaacatttttggtggatcccacctcgctggaagtacccgtaatgcaaagaagagatatctaaaagaagtggaggagggagaaatgtgtgcactggtgcaatctcccacgcaacgaccaaggatgatgaatctcccaattaccttcacaaacgaggaggctcagaacgttcattttcctcacaacgattccttagtaattgacgcacaaattgccaacaagcgagtttctagggtcttgatcgacaatggaagttctgtcaatattttgttcaagtttgcattccaagaaattcgacttactgaagcggatttaactctatatcctcttcagttttaaggtttcaacagtgacgctctaatgcccatgggtgaaatccagttgccaatctccctctagggcgataacaaagtgagtgcgttcaaacattcaaccttcatggtagttgactgtcctacggcttataatgccatattaggccgaccgattgtggtggactttggtgccgtgaattccatttgacatttgcgcatgaagttcccatgctacaatgggttatcagtaccattaaaggagatcagtagagtgcaaggaactactacaatgtgtcaacccgaactgtattcatggtgagggaagaagtgcgaactagaaaacccaatggatatagatgttattttggaagagtacaaggatgagttagatccaagggtcggacttgaaaggaatttacaaccaatggaagaaatagaggaagtaagcaaaaacgaggaagatcctaccaaaactattagggtgggaaagaacctccctccagccgtaagagaggatgttattaatacggttagagacaatcaagacgtattgggctggagtcattctgacatgacaaggattaatcagaatacaatttttcatgcattaaatatccagaaggatgtgactccagtccgtcaaaaaagaagacctttggatcctgttagagtagatgtagtaaaagcagaagttgacaagctgcctaccaatgacttcctccaggaatcattgtacccgtttggcttacaaatccagtgttggtcccaaacaaggaacatggaggatatgcatagactttaccgaccttaacaaggccttcccaaaagattgattcccactcttgtagatcgatcagacagtagatgccacgtctgggtacaagttgctcacctactctgggtgtaattagattaaaatgcatacatctgatgaggagcataccagttctcaaactgacaagggcatctattactacaaggtaattccatttggactcaaaaattcaagagcaatgtatcattgaatggtaaaccgaatacatggaggtatatgttgatggcatgctggtgaagtccaaaacctcttaagagcatggtcgtgacctagaagaggccttttctataataaggaagtatggaatgaagttaatattgggttttgtgccctaaataaaacccttt

SEQ ID NO: 380051 - DNA, 4090 bp, Cannabis indica
atacaaaacaacaatttcaaaatacccagttcgttggttatcattgcagtgaaaacagatgtagcagctcacgacacaacagggggcatggagaccaagattttggaagctgccatgattgcaagacttgggatagatgtctacatagtcaaggtaacttatgtttttcaaagaaacttgtctttgttttcctcagttcatatatcatattcggggtgttgaaatatttatcttcattacaggcgggaacaaaccattctttgagggcattgcgtggtgaattgagaggcaatgttcctgaagactggcttgggacagtaattcgattttcaaaatgatctaacttaaattgaataaaataactttttttattcttttgtccacatgagccattaacttgatgaagcgcacaaaactcacggttgaaacttccatgagactctaaatctcttattttgtggggaaaatgagatgaagacacgtcaaattctgacattcatactgcaagcacgtacttgagttcactcaatctgctagacattagatcattctagtttcaagtacttttcgtttgcctgcctactgatgaatataactctacctaatacgctcacattttcatgtattttcttcgaaatttattttattgtacccagttatatagacacatttggatcgtggtgaagagcatggttagggttctgcagccatcaccaaaacgatagagatttgaagttatttgaaaaccccaaacaagcccagataaataaaataacaggacataattgcatcgttctatccgggccaactaatcaaatggaatgcttttaatcacacaacgaccagagcataaactccgcctcgagcatagagcaaatacgacacaagaaacaaaaacttgccttggacagaccattcgctattaataataatggcttgctcttttcattttcaattgaaaaattgcaagttcgtgtcatacaaacccaaaataaagaaacccaaagcaaaacaagactaggatcaatcctgtaaagtcgcaagcaaaaattgtttggttgacgtaccctcgaaagtcgtaacctacaatctatatcacaacttggaatcagtatactaactactaagcagggcgaattactcttttagctgagttaactgccaatactggcaaaatagctgacttaatttgccaatactggcaaattagatacaaatacaaagattggattgcacgttttgccggttcatacaacattaaaaaaaatattgaagttgaatatgataattttggtaacatctcattcagaataatttgcaggaaaaataaaataaaacgtgaccacatattctcaaagcaaataaaaccaccatcaacaacaaagctgtatcacaataaatttatggtcttaagataaaaaaacattttgagttttgatagagcaacacgcaatgaactacttggggccaatgtccttaagggcacagatctgctcctctcccattgcagacatgacagacacgacaagatccttcccatcagcaaatccatccttgatctgtacaattccaaagccatgaccattaattattagctttaataatcaccaccaaaaaatttctatcagcgttgcaaggccagaatagataaactgacacatcaattcccaaaagagcataattaatgacacatcaatgtctacagagatattgacacagatttagcagaagtcattcatatcaacaaacctgcgtgagcagactgtcatcagttggaagcttcaggtcatccttggtatttccattatcagtaagcagactcacctaaaatatcataactcaagttagcccaagttgaaatgactagtgaaacaatacaagaaaggggtgaacaaatatgacccaaaagtagtaaaaaaaggaaataaatcttacaaatccatcctcagaaatatcaatcagctggtagtcagtacgattgacatgagggacctgcaataaaaagacacgagaatggataaagtgagataagaaaaggtgtcaaaacgataacacaaacaagacaaaatagaagagcaaagaatgatcatacatcacaattgtgggaagatggaacaatatcttccagcttctttgcagtgaagatatcaatggcaacaaagtgacacttagcgtgaccgtgctttccagttttggaagtggaaacttcaacaacctgtaaatattgcaaagtcaaagattttctttagaacaataataataaactcatcaatagaatcaataaacaatcatttccatgataagatccttcttgcatcaaaagttttctataataattcgttaattaaatcaatccaaacatgtgagttatatataaccgccacgacgaaacagaaacaaaggaaaaataacaagctatcttcaataatccctaaattattgacccaaaacatgcaataagaaacttaataaagggtttcgaatccaacattttctaataccagacaacaaatttctcattttcgaccgaaagctatcacataaagcacagacgcttatcactaccacaagcccagtcaaaccccaatataccaaaacaacatcgaacaacaaaaacccaataaagattatgagaaaaaaaaatcaaactttaaccttatcttatcgcttatttggaacaaataacaaataataaagaataaaaatccaagttccagatccgtagtgaatccaatctgataaaaggaaaatgataaagagaaccttgcagggcctgcccttgatgacgatgtaaccattcttgcggatagtaccagcttgctgaggataggtcttggaagctccggcgtcggccttggactcaaactggtgctcctcgtccgacatagctgattgagcggaaaagatgaagaagaagaagaaaaccccaaaaaatggaagaaggcagagaaaagaagggttgaggaagatgagaaatgagacaatttatatatgggtacaagttttgaaataatatttgtgaaagaaaatgaggaggagtgctgcggacttgatctcaaacaaaacctagggtttcaaaacaaaatatttaaataaaataataaaaatatatatatctgatagaaattggagattttccaccgttggatggaatgagttgaagagaatcaaatgtttattaatcagcgtttatgtgacgcttgcgcatgtgggattctgtcacgattcgcctcctcaaaagggcagtaactttttcattttcttttttatttttatgttcatttctttttagaaaacttgccatcatccaaattcctcaaataggcaaaagcaatacaatgatactagtctcgctaaaaccgaaattgcccttgttctttccatacaatttgcgattttgctttgcattcccgtccctttgagtcttgccgtgagactttgagtcgttcctccgtcactgtttctggctccttgtgactcctttagtggtcgtgagattgtggttttgttcagcagtgttcttaatagctctttcactttagttgcctttttcctttagttctctttgttctaggcgattttgaatctcgtcctttcgtcaggatcctgtcttagttggtgttgctccggtggcttctcaggacgttgggaatggatttctagccttctttctccatgttctagttccccccgtatggtgttctagtaacgggattgagagtttttgtgttctttcatgagatttgggattgttcctggctgatgttgtagcttgtcattcttggtgttccctcgtcttttgttttcggtttctcggagcttgtttctggttcagctgtggtcttgttttgtcgtgctcataggcttgtttgtgtggttgtggaggggattgtgtgtagctcagtgcccgattagatctttcttttggttagtgttgcttgttggcttgcatggtttctccctctagcgacttttggtagtctgctttgtttgtgtgaactctcttctttcagtgagaatatgtgccagatttgtgcacttctttttatctttgcccccaattacaattggaaaatgttgggttttatgc

SEQ ID NO: 380052 - DNA, 2135 bp, Cannabis indica
gagagagagagagagagtttttaccttttctgctcggcaccttcaagatttggttcatgtcgcttacccagatcttcgtccgcagatgagggagacgaatctctcgactttggcacagcctttttcgacaacagctcgtagaattgctgcacggttcaacagataagtttgaacggaatggaagaaagaagaagaagaagaacatttatttgaattaggaatcagtgttgaattgagggagatacctgtcgtctttgatttgcttgattgagtttggattcaatgtgttcagcagtaataggcgatttggaaaccataagacggcgtctgagccttggaggaaggtttggagagagagagttaggagacactggcgaccccttttccttttctccatcttccgcaggaaaagtcattgcgatacctcgcgttttctccgacattactattgcaaatctaatttggatctcaacggtgatcagtttcaaactgtcttattttcaatctttgttttaaattatgttaacgtatttaaggaaataaaagaagaaaataaaagagagaaatgagcattgttacttactagaccattcccggatattttgagaaaaatacagaatgtctagaatcttcttttagtttccggttttagcataacggatagttgtttcagtttgaataccggctgggtcccatgtcatatttcttttaggacggatctcatctacccctaaaaaggagatgggatgggaatttctaataggatattttttaaaacaatgaataattaatagtgcatatggtagaattgtagttacctagggataatggcgatttctagaactctcaagaggtatgtttctctatctccgtctcgtactcacgttgggtttctggtccaccctccacggtggtgtggtggcaatcgggtttgggttcctccttccttctttcatcattcctctgttcagagcattaattgtgatattaatgtctctgatgattattatcccccaaagatcctttctgctggaacttttcaatgcattaaatacatttttcctttcccacaagttttagaggctttattggcaaacccttatttgtcactaatcctcatttatttacaccatcaaatcaataatctccctaaagatatgtttctcctaatagaggaggcggcgagaaggcgaaatggtgatgatgaagcctgggggattgggatgacctgcgaagctactcaggaggctactgccagggataaaagagtcttcttgaaaggtctggtatttttcatatataaatcgcgttttcgttcaagtttatgcattgtttttgtttgtttttctcttctgtctgggtcgaaacttttttctgtgttcactatgaattctctaagttctagtcctgttcctcctttgatgcttactcttgatgaaaacatggtctataccatgactgaaattcaggatgactcccccaccgatataagtcttcttcttaaactctgcaccgttaaacactttaaccgagcttcccttattaaaactctggctccgatttggacttctcaatgtcgtttccctgttactatctctgaacactctgatggccttttccttgttacgtttctctctgaaggagataaacatagaattcttgatgggcaaccttggcattttgcccaaagtctcaccatctttgctgcccctaatacttcctttcccattacccctgaccagctgcattatgtgcccttttgggtgcaagtgtatgggatcccttttagatgtaagtcctatgatttggctaagcttatagccactggggtaggagacttgattcaagtggataatactactcttaaggatgggactgggccttatcttagggctagatatcttttagatgttaacaaatctattaggaggggaattaatatttgcttcattaaaatgggtagagaatttactaagtggttggactttaaatatgagtgcttgcctgatttttgcttctactgtaagcttgaccatactaagaagtattgtcatacttacctccagaaatgtgatgaatccattgttccacctcactgtccctatgatagattgctcttgttgggttttatgccc

SEQ ID NO: 380053 - DNA, 9554 bp, Cannabis indica
tctctctctcttaaactctgtcaccactcacccgccctatacaaacccctctttccatgttttcttcttcttcttcttcttcatcttctctataaaagaaaaaaaggaaaaaaaattctaatttcgaacttttcttgattaaattgcagtttctttgattctatctctgtatattttatatatattgtagtttgaagtgtgtttaggaaagaaaggaaaagacttgattgaagagagatccctatttttctcatctgactgtgaattcgatcaaattttcttgggcattcttttgtttctgctcaatttcttttctttgtttgatttttccatctgggtgtgtgggattctctggcgttcgttgttttcttaattgccccctgtttttttgcaatctctgtgaaattagggtttatgggcgtgttttgtgaattggggtttcgacgatgaaatcgtatagggttatggtgtgtgttattatgtgaaagtgcggggtttgttgaatcgttgattgtttggatttagggaagattcgtggagtgggggggttggttcgtttgttcttaggtttcctgattttgaagccatgattattaagcggaatttgaaatcccaaatgccgcgtctgaaacggtgtagaccgtttgagtcagcgggtgaagatgacgagaactcagttaggaagaagaagaaaaccaatgggtattaccctcttaatctgcttggtgaggttgctgctggtattattccggtgagcttccatggtttacttagctctgttgcaacagggaaggaattctctgcttcgtggtgtactgaagcctcgtgctcacctgaggaggaggagttaaagtcaaaggctccagatttagtgactgagaggattaatgggaaggtggaggttccaaggccaccccttgttagaacttcaaggggtcgagttcaggttcttccttctcgttttaatgattctgtaattgaagattggagaaaagatagtaagtctaatgtgcgtgataatggattaaatgatgagatcgaatataaaaaggagaattttagcttgaggaccacgaaaacttgtagtgttaatgtgaaaaagactaaaaacttggagaggaatggatataaggctgttaagtattctacattgtatgaagatgaggatggagttgagggaagagtgaatggtgttaaggagtttgaatatagaaagtttttgagttccaggaattctgttacgttggttcatgaacaaatggttgagaatgacaggtgcccaattgaagaaattgagagaaaaccttatctgctggatgaaaatgagagtgatgggttgtatggacctgaacacttttattcaggtgatatagtgtgggcaaagccagggaggaaggagcccttttggcctgccattgtcattgacccaatgtctcaagcacccgaactagttttgcgggcttgcattcctttagccgcgtgtgttatgttctttgggtattcgggaaatcaacgggtactttttcttcccttaatgttggagtggagtttattgaagtcttgattttgttgttattattatttgattatgattgggtttaataatgtggttatttattggatattgcaatgatattgagcaggattatgcttgggttagaagggggaacatctttccatttatggatcatgttgacaggtgtgcgctcgcaccgtttcctttttagacggttacttttaacacttggtgatactgagtaatattttatctaaataggtttcaggggcaatccgaattaagcaaatgtgtgccctgtgaattccaaatggcaatcgaagaggcgtttttggcagaacaaggatttacagagaaacttattgctgatataaatgtggcggctggaaatgtaacttatgatgtgtctatccttaatggagttgtagaggatacttgttctaaccaggatcctcatggtcactttcgtaaccaggcaagttgtcttgaagtttccagcctctattaaatttattgtagatgtagtagaattgctaaaacatttcccatgaatttttcaaatggaattgaactcattcctcaatatgtttgtttgtaactgttactgatgcttcactcactgtgatgatctgagaataagttctctgtgcaaccaaactttgtagaatctttttcagttaacgtctgttagtttgttgaggaaagatgcttcagatgaaaatcactgttcttagtttttcgcagcaatcactaccctattagagatggtagtttgtcagtggagaaatataaatatatgttcagctccttcatttgaactaattctttgtcttctattgcctatgcagaatatgtttttaaagaaaaaagacacacaaccttgtgaaggctgtggcttgagccttcccctgaagactaccaagaagaatccctcaactccatcggaccatgttttatgcaaatcttgtgcaagggttagtcttgcctaagttgctctatgtgtttgttattttgcatatgctatttgtttagttgttaactttggattccgaagttattgtgcattgttcaaatccattaattcttattgcagttaacgaaatcaaatcattattgtggcatatgtaaaaagatctggaaccattcggatagtggaagttgggtaagaaaaaaatataacctttttatggttatttttagtttttcctattgtggatgactgctaatttttatcatgatgtttctcactattgtaaattttttctctttgatcaggttcgttgcgatggttgtaaagtttgggtgcacgctgagtgtgacaaaatttccagcaacctctttaaggtttgtccttcaaactatatatacacatgatttcgatggtttctttgtttgcttctatttgaataccgggaggcagaagacattgcagacttccctgattggttatttatgttttatttttttgaagaatttggggggaactgattattactgcccaacttgcaaagcgaagtttaatttcgaattgtcagattcagagaagggatcacaaccaaaagtcaagtaagtcactcaagctgctagtaaatacttttttttaagtaaatttccgctgtatttggcccttcttttgaataccactctagcaaattgctgggcgggtccccatgaggaatcgaaccacaaacctcatgggtgtaaaccatgtgtctgatcacttgtcgaatttttcattttatcaattattaactttctatttttaggcttttagctgtcttttacgttttaaaagttttcagacgttttatgtgctgtaattcgtgcttgtatttttccatctccttatgtcacgattattttgcagcagatggaacaaaagtaatgaccaattggtgcttcctaacaaagtcacagttctctgcaatggtgtagaaggaacatattttccaagccttcacttgtaagcataactttttaaaattatcgtattctctccaaattttgtctgctcggaaattaaaaagatattatgttagctatgttacttttttaagtattttttgcataaaggaattgccttctatttaatgagaacatagaaacattagtttgtgtttttataattcattcttatgttacattgaatttttattttttcagagttgtttgcaaatgtggattctgtggctctgaaaagcaagcacttagtgaatgggagcgacacactggtgctaaatcgagaaattggaagatgagtgttagggtgaaaggttctatgttgcctctggaacaatgggtttgtactctagttatcttttgtaactatttatattttatttatttggcgtttcttcattttaagaataattttttaaataaaaaccaaattatggaagaacatctaaaattaattaagtataattttgtacaatctttttcaatctgcagatgcttcagttggcagagtatcacgctactgctctcgtgtctaccaagcctaaaaaaccttctatgaaagaacgaaagcacaagttgcttgcctttttgcagggtaggttgtttgtgtgcttttgttcttaaaagaaaaaaaatagtttccaaattttgtatacatatatataattaaatctccagaaactaggtgacctaactgcttcttattacagaaaagtatgaacctgtttatgctaaatggaccacagaacgatgtgctgtatgtagatgggttgaagattgggattacaataaaattatcatctgcaacaggtattgttttgtgaccgtgatgtgacctgctctgaccgtttgtttactagatataaaagtgtgtgtatttggaaacttacatgttcatctttcagatgccaaatagctgttcatcaagaatgctatggagcaagaaatgttcgagattttacttcatgggtttgcaaagcatgcgagactccagaagtgaagagagaatgttgcctctgtcctgtaaaaggcaagtttttgagtagttatatttttgccgttacatttttatgaaaaggaacaactattgtttatctggtatttcagtatcaattaaataataaataaatgtaatggttacgtttcgatgtgctatttcgagttgacgtctttttttttatctttcctcaggaggtgctctaaagcctacagatgttgagacactgtgggttcatgttacatgtgcttggttcaggcctgaagtctcttttgcaagcgacgaaataatggaacctgctcttgggatattgagtattccatctaattcttttgtcaaggttgattctttgatctaatcatttattgatttattactgtttagttcaattacgagcttaaatgaggaccccaaattattaatggacaggacaattcgcggctttttctttttcgggtagctactgtattttgtaaatctgaagtgattcttattctatgaatttcagatttgtgttatttgtcagcaaatccatggttcttgcatgcaatgctgcaagtgttctacttattaccatgcaatgtgcgcatcaagggcagggtatcgcatggaggtgagatcatttgaattcggtctgttagcgattttgaaaattatttcaactgctctcattattgacacacaattttggatgtaataattacagatgcactgtttggaaaagaatggtagacagaccacaaagatgatttcttattgtgcttatcacaggtatgagatcgttttgatattcttactctttcgtttattgtgtgagtaccatctatggtttttattaactcgttccttttcgtacaatgtgcagggctccaaatccagataccgttttaatcatacaaacacctgtaggtgttttttcagccaaaagccttctccaaaataagaagagggctgggtcaagattaatttcatccaatagaattaaagcagaagaggttgcagctgttgaaactgtcgagcctgagcctttatctgctgctagatgccgggtatacaaaagagtaaataaaaacaaaaaggtaagtcaccgtagatgtttatttctgtaatcgttttagttctctattttggttgttactaggactttctggtggttaagtgatattttgatagtaatttaatctaataggacaccaaacaagagataatattaagtttatcccgatccaaatcattctatttcagtcctataattttatcaaatcccatgtaccttaaactattttgaagtgaaatcagtggaaatcgggacttcattgtctctcgtaagggttaatctttcacgcatgattggatgttctcacacagtgcatatttgctatgtttttacacttgtgtgcttacctttactggattggatgataaaaaaacttgtatgaagcaatgatttataataggtaagttaatataataatttcctatgaggtttggcttcagtttgctactcttacattgcatgtttaggcttaatagtattttgtggtgagatgagatgagctattcttctttttcacatctatttctttttgttattagagaactgaagaagaaaccgttacccacaaagttggaggaccttcccatcattctgttgaagcaattcgaagtttgaactcttttatggtaaattttgtacttcatgaaattatatttcacttgagttttttttttcaaagattttatatgcgagactgccagagaatttgatttttcctttttcccttgttttatctcttctttcagcaggttgttgaggaacctaaaactttttcgtcgttcagagaacggctttaccatttacaggcaagttttgaatccttttctagtttctataaagaacatcccaggttgtatttctgacttgttgtctggtcgatgataactgcagagaaccgaaaatgatcgagtttgctttggtagatctgggattcatggctggggactcttcgcacgtagaaagattcaagaaggagaaatggtacaacagtttattcattttacagttgtgtcaaaggagacactttctatacgaaatgagaagagtattgtttctgttttgtggcctgtaagaatgagaatcgtttgtttgtctgtaggttcttgaatatcgcggagagcaggtgaggggtagtattgctgatcttagagaggcacgctatagattggaaggcaaagactgctatgtaagtctatgttaatcttctactgatctgaatattttctctagtttagctaatttgtttaagaaaagagcaaaaaatccaatctttatttttaaaattactgtcttttccttctatgcagctattcaagatcagtgaagaagtagtggtggatgccactgacaaaggaaacatagcccgtctaatcaatcattcggtaagttatttcgaaaatgttgatagttgtttatttgcttaatcgccatgctttgttctcacttcaattttcgttccctgctatgtttgatacagtgcatgcccaattgctacgcgaggatcatgagtgttggtgatgatgaaagccggattgttcttattgccaagactaacgtagctgctggcgacgagctaacgtattactctatctccctctcttgctgtttgtgaatgattattgattatcagttgttctaattggtatctttctttttgctttctttttttgggactttggcaggtatgactacctgtttgaccccgacgaaccagatgaattcaaagtcccttgtctatgtaaagctccgaactgtcgacaattcatgaattaggatagaacaacacattgcacagccattgtttatccgcaaggaacactaaccccattcccctctttggcgggatctcacagttcttacaccgaaaaagttgtaatttttgttgagaggaaagaaaaaggaaaaaaaaaggtagtgtattctttttgtttcttccataattttctttgcagaaatatttcttagcttaataaaagctatagctttgccatcttttttgggttcttggcatttgtacatagttgtgtttactaacatttcaatctcatatgagttctcaacatttgatctcttttcctttaattttcttcttttactttgttgaaacgcatcaataaaaagtgggtttataaagattggaatataaagtgttatgggaataaagttaagaagacacataatatgtacaagtgtaactatggagttagattgttgtgtttgaccataagaacacggcgttttcttccaacccaactggtctgccatggcggatcaaccgaaacaactttatagcctgcgtttgaatacaattctctggcaccataatcatcttcatatgctctcagaactaagtacttgaaaccccatagatttgatactatgtcacaagcttttagcaacacagttgctatttttctcctcctgttattacttatcattatgagtcaaatatgtacaatgtgtatatataaatacacagtattaatatttatagattgggaagaagcataaacctgaaactttccaagacagcaattcctgagatgtaaaggtattcttgtgaatcaggtggaagatggttaagtacgttttggtctcccaaaacggtgacgtctaccactccaacaagtccttgtttggaatctgaactagaactatcctcattatcatcagcctcagcaaccaagcaagcatacctatatattaattattcaaataaatgaatttaatcaaatttcttaaactctaattagaaaaaaaaaataaaataaaaaattgttcttcttataaagcttctaatgtacctatcttggggtgagtttctaagtttatacaaaagtccagcaagcacttcagcctgtaaataaagcacagtaaatcagaataagttaagaactattttttttattacaaattaattaaatataattataaaataattttaattaatgaataccctattttataaattaaagagtaataaaaaaatgtaaaaattaatataatttcttttattaaatctcctaattttgatgattcctatagataattggtattagatagatgttataaaattaccaaaactaaaccttaatgcaatataactttaaaaagtagaagtgaaaaagaccccctttttttaagtaaaaaaataacccattaaagaaataagtactgatatcaaagtagggagagtaaaacaaaccttaaataactcaaagaaaaagtcattaaagataaaagtgggttcataaaaagatagagcttgaacttcagcagcttctcttatctcatcaccaattggagccaatcttctgactttccaaccaaactgagtagccaaatctaccttaacattagtcccaatttgagttgtctcattctccaccaatcccacttctccagctggcaaagtactacaactctgcaccacaaaatttcttctactgaattccttagacttaatcaaattgcttcttttactaaaaactgagaatccataggaagaccctgtacggaattctagtgatgtgttaggacaactccttagcaaatgagtcatatatgcatacatatatatagtactatttgtttagatcttttagtcatataatgaaggtaatttgttttgtactttgggtttttttttctcttgagtttagtttaagtgttgtgttggttagaatggtaatgataatgagaaagaggtatagaagaaaatggagagaagaatgaaaatgatgaagatgaagatgaagatctgtacacacatgagtggacatcacttcttgttttgtttggaccataaatcaatatgccacgtggaaaattattagcctaccacttggcattccgtttaattattagtcttgactttagtaatttaatgtttcaatgaaacaatatatttatcatcatactttgaaattcataatatgattttatttagaaataaatattgtaaaatttatatttgagcttttttcataaatgtacaacaaaaacaaaataattacaaaaaatgt

SEQ ID NO: 380054 - DNA, 4296 bp, Cannabis indica
agtacgtaacgttttattttttttttttttacatgacactacttatacttgtactgttggagatctatattaattgataaaggaaacatacataatattgggatatatatatatgtttaagttttatttatatgagtaaaattaatggaattttacatataaatgtatatattaatttgttttttgtgtggaattagaagccatcctttatcaatagtgaaataacagtagctaaaagaggaggcagaggcagtttgatagaaccaaaaattaggacaatgcagtctgcaccaaataagaagccacggacggagtcacgatcagcctgcccaccttttaaagtaccaaaacaactcactcttactttatgtacaaattatttacacccttcttcttcgtatacactccaatataattctttatatatatagtcgattaataaatatatatatcatgtgtacaggttagaaaagaaaaattaggagatagaattgcagcccttcaacagttggtgtccccctttggcaaggtaactacatatatatatatatagtgaagttaaattctattgttactgatatatatatatatatataattagttgctaaatttcatcaaagtacgttcgaatcgtttagcataatttatttctgtatctatattttctgagacttaatagagatatttgtattaatgcataaatagtagaactgttaaaatcgcagaacttttggcataattattacgtctttaaattttattttttttgttgaaaatgtttgacttctaaacacagtactagcacctaacgaaagaaatatgaactagaacttaaagacattgtttaatacatatatatagtaatcaagaactggagatattgaaacagtaaatagctcaaggagtagttgtgttgaaaactcttataagattttgcactgcttggctgccgtcattttacatatgcagacagacacagcttccgtactaatggaggctataggatacatcaaatttcttcaaaaccaagtcgaggtacatatttactttccttcttaataaatatcttatccctcttactatatagatatatatatttatacatagggacagttatatatgtcctgtgtgttaagaaagttcagctgatgatgacacatcgatcgaaacatgcgctgcatgcatgataaatattgctcactgctacacttttctctagctcatggacatgccttgcctatcttcacatgaaactttttcacttctcgatctctgaattaatagtggtactatatataaaacatgtaaaattgtctatataaagagtgcgtgccaaacttactaatgggattataattttcatttttttttacttaaaaaaattgtctaagaagtgggaaattgaacccttagtatatgccaaattcgtggcattatcaccaacattatatgtatcttcttattttatttttctctttctctatacttgatagaagatcgatctgtgtacttaatttgcattattgcatgtctctaaatgcagacactaagcgttccatacatgaaatcttcacgaaagaagatcattaaatcaacgcaaagggtatgtgtacatacatatgtagtatcattatgactttatatatttatatatatactagaattaggtctctacttttagcgtttagggaaattataactaaacttttttcatataattgtgtaaatattcagttacacaaacaagtatgtgtgtaactaaatcatctgaatctttaaattccatttcaacttagtaaattatttagaatttttttaaaaatgaatatactaatgcctatactatataatttcttggaggtttaaaacataaatgttctactgtacttgtcctatatatatacataactaacaaagagagtattgcttacaaattcagggtgtaaaagaagattatggaagtgtatcagatgaaaagggggatctcagaagtcgaggactttgtctagtgcctttgtcatgcatgtcatacgtaacgggcgatggtggtggtggaagtatgtggcctaattaactacagtactggaataacttgattaattaattaattaattaattatattttatccaaataaacagattaaggtaatgttatttattattacaactcgccatcatcagccaagtactcatgattgaataatttctcttaagctcaagtgctttaaaagtgatctctcagtctcactgatctatatagtagtttaatggagcaaatttggtcatcctgttaaaaaagggaattaatccaggatagaccaaatttgatccgttaacaaattatttatgtactgaaacattagttaattataaatgtattatatataattaaagagcagggtagtttcttaatttgaaataattattcacatttgctagttacacacactagtagtactactatacaaaaaaaaaaattaataccaattcattatgtcatcttattaaaggtaatttgttatgttagtcctacttatggagtacttatagagtgtcgtaatccttcctttcataattttgtttaatctatatatatatataataacttttctccaatatcaaagtaactcatattttctattcccaagaggtaaatcatgaatgtgaaacacattctcatttgtggaaaagctttgttattattacttttagagtgaaattatattagctcgacttacacagaaatactttatttcgcaaaggaaatggaaaagggaatcgtgtcaagcactacaacatgtgatatattattattagtataatttaatattgagttccacacattttgatttaataaataatataaaacctaatggtataatgagaagtattggacgtctcgtaaactcttggctcaaactgggtgataaaaattctgtctatttccatcaaagtgccacttattgtaaaataaaatggtattggtggaatttttaataaagataagacctgggttgagtcgcctaatggtatagctacggtgtttgaagattattttcagtctttattcctctcatagtctgtctgatgatgcgttaaactaattggtgcttgattcagtcctgcctcgagtttctgatgagataaatagtgtgttgatgagaccgtttattgagtgaccttatttcaaatacacccgagcaaaagccacggtaaggacactacaagaaatgtcgcttttgctagctcattttgtaattgcactggcaaagtcacttttcccaacgcatctcgcaaacaacactagtaaaagggtcatagttttaccagtgcacatttacgctggcaaaatatatttttaccaacacaactcatatttgccctggcatagcaagctaaacaccaatcccttgatattttttaacagagtaaaagtgtgctggtaagtacatgacttttgccagtgtattaatgtaatgcgttggcaaatgtcacttttaatttttctaccaacaattgtctatgattaatttggatcattgaatctaaaattaatttaatcacacccaattagaccaaattaaataataggttttataaattatttgcattaaataatttaaaataaaactaaatatagcaaatcataaaagtgggataattatgaaattttatttaataaataaataaaatttaatgtttatttcaaaaatttggttattaataactaaaatatcttttcaaaaaataaaatctaatagtatttctattttaaaatatctaagttaaattagaatcttaccacttttaaataaaatatctaataagataattttaaatatgatatttaaagtttaacatgaacaaattttaaactttaatacagtattttaatatcttaaatagaatttttgtcggttaaatcctcccaactatcattttacttgtatttaactctccaaactcaatttttgttgtaacacctaccaatcttcacttctctttacaaatcaaaggtgtcgtctataaaagtagttatgtgtcagtatggattacgccacatgtaaacaaatatacatgtggtaattattctttagttaattattttaatttttggattttctttaatttttttataatacttaaatatgtataattatgtagaccaatataaatgtaacatctgtattttaaaattaacaaaaaaaattaatactttaatcattttttttcttttttctttttttttctttttctcaaattcttttatcactgctttgtccttcattttctttg

SEQ ID NO: 380055 - DNA, 2223 bp, Cannabis indica
tagtgttgtattgaatctctaaaactcccttacaaatgattatcttcaaaccccctcttcaatggaaaagagaggtattgataaggagctctaatggctcaagaatacaagtggtcacaaatattaagagacaaaattccttttgtaccatgaggtttagcgtgtcaaatgggtagtggaggagtattggtcggatatcagcttgtacctgtagtgagacaaattgtgtctccactgcttgtacttgtcgtatttattgtacaaccatcttctctcttcaggctttattagacgtgtgctagctttaacgggcttgcccttggtcgtatgtccttatggtattctttccatcaccacctatacttatgatgagggagcaacacatggtaattttgctaagtgttgggagagggagcaacacttggtaatttgactaagtgttaggaaagtggagctcccttggttgaatgaggagaaaatgggagaaagaggcggggagctcctttggttgaatggggagcaaaggagagaaagagggagggattatggagctcccttggttgaacgtggagcaatggggtgatagagggagggagcagggagctcccttggttgaatggggagcaaagtgagggagggagcaaggagctcccttggttgaacggggagcaatgaggagagagagggagcagagagctagctcctcgcacgaggagctcaactcgctcccttggcccctcctcatcctagctcttcctctcgtgtggtgtctcacctagctagttggtctcctattttcttgcccatatacttttagtgtactttaggattttttcctctctttaatctagagatctttaaaaattatatttaccaatttttggggtcaacattatgtatttaaaatcttaattgaacccctacatttttcacgtttatagaaaaacaatataggacagagtcctataattttaatcgaaagccctagattttctaagtttatagaaaaacaatgtagcatatatagagacataaaatcttaatcaacaaaatatatttctaataaacactctatatgtataatgccgaataaatataaactaaccaattagagcatagataattaccatatgaggaggttttttagaaatgttacgttgattaactcccaagtgcttttcaattctaaagctctgatcatttaagctttctctacaccgttgattgggaagaaaaagaaaatgatgagaggagaatgccattgagtgaagtgagaggaagaaaaagataaatagttaagagaagtaataactgacacaactatctcatcaagtatttaaaaatcaattttttctttttttgaaaaagctaaccggttagcatgtattttttaagcaaacactcctatgtttatgtgtacaacttattcaatcttagcctttaaatcaatcacacacacataatctaacgatcagcattaaatgcggaacggtacatccaacgggacaatccttccatgtaggtttgtaaaaagatttagttagatatttttcaaaaaagaaaatgaagtattaggaaaagaaagatagaaattaactggacgtgctgtaagtaaaatttccaacatagttctttctttcatgctcatataattggctactttccggtagtgttgacaataagtactaagaataagagtaaagttattactttactagtgtttagtgccaaaaagagaaatcccaaacataaatatttttgctagctatttatgctacacatatacatatatgtactactcgtatttttataaagttgtaccaacacttcgacaatattgtcggtcaccgataaaacctttttactttctaagctgcccatatgttcaaattattaattaattatttaactacacttaattacaaattaaaatttataatacttgcctataacgtatccactacttattcaaagttaagacaatctccaatgagagatgtaaaattgtgctatatttaacacaaaaaatagttttatgataaattttacactataaattttagttttgtgctccaatacacaattacaaaattttgatgtaaaatttgatatctttattattaaaacaaataaaatttaataactttataatcaattttattattttttaatatgtaagataataataaaaaaaaaagcattactattaggcaccagtggtac

SEQ ID NO: 380056 - DNA, 2408 bp, Cannabis indica
tgatgaattctgtgctgaacacatgcttggacatgtgattcgttgtcgcacatcctcggagatttggaacactttcgctcaattatttgcaacacgatctcgagctcgactttctgcagctttcgcaatcttcttcaaacaaccaagaaagggctcgttactgtttgaagaatacatgctgaaaatgagacaatttgcagataaccttgctgctgctggacaaccaatcacagacgatgatcttgttctttatatccttggtggtcttggatcggaatatgagtccgtggttgtcaatctcactgcacgaactgaacctcttactcttcaagaagttcagttcatgctacagagtcaagagatgcggattcaacaattcaccacagaatctctacacaatgttcaagccaacattgccaatgcaaacttcaataatatttcaagaaactcctactccaacagaggttatcgtggatccacaaggggaggccgatccactaataccaatagaggtggcaggggtcaaagaccaatgtgccaattatgtggcagagttggccacacagctctcaagtgttatcatcgttttgatatcaccttcaatggaactgcttctggccaaccttctactacttcaaccaatgaaaacccccaagctttcttgactgagtccaccaataatgaagcctctgcccctgatatctcagcagcttggtatctagacacaggtgccacccaccatatgacaaatgacacagccaatgtcactactgcagctgattacaaaggcaaagctaaagtggttgtaggtaatggttcatctctccctattcatcatataggacatagttatatttccacaaattttccccatcagcccttacttttgcaagatattcttcatgtccccaacatcaccaaaaatttactcagcatttctcaattcactaaagataaccatgtcattcttgaatttgatgattcttgttgtcttataaaggacaagagaaccaagcaagttcttcttcagggccatctcaatgaaggcctctacaaacttcaagtctcctcctcaagaatcccaactcaattgcagccccagcctgctgcatttaatcacaccaccaccagtaatccggtgtatgacaagtcaaaaacagccaccatttggcattgccgacttgggcatccttctccatctatccttagtaatgttctttctacagttgtaccaaataccaaatgtaaacaattttccttttgtgatgcttgccaaattggcaaacttcaccatttagcttcaaaagaactgaaaataaactactcatccttttgaattgatcttatctgatgtgtcggggaccctccttctatccttctaatgatggttttaaatattatgttagctttatggatgattttaccaaatttgtttggctatttcctatgaaaaccaaatctgaagttcccaccctcttcattcagtttaataaatttgtggagagatattttcaaactaaaataaaaagcattcaatctgatctaggtaaggaatttgaacccctttatgctctatatcgatctttaggcattgttcaaagaaattcttgccctcatactcatcaacaacaaggtagaattgagcgaaagcatagacatgttgttgaaattggcttaacccttcttgctcaagcagccatgcctttacatttttggtgggaagcctatgcttctgcatcatatttaattaatagacttcccactccaattctcaacaacatctccccatatgaaaagctttttcatcaaaaaccggactacaacatgcttaaggtctttggttgctcttgttttcccttattaagaccatatgaacatcacaaagttgcttttagatcctctaagtgcctctttatagggtatagcatctcttcaaaaggctatagatgcctacatccctctggccgaatctatgtatctagaagtgttactttcaatgaggaggaatttccatataacactttattttctgctcctcaaaccagtcccatcccctcccctcaaattattgatgttaatgcttttcacgttcccactgccacaccagtcttacccaacccgattgcccctcccagtttaatcccttctccaaataactcaaatcctgaccacaacagcagctcccctccctcacttgacttatcaccaagtgcttccaccaataataccaacaatataccccctcctcccactcaaaatcaacatcccatggttacaagatccaaacatggcattttcaaaccaaagacctttgctgcctacaccactgaagatgaagaacctacatccctcaaagctgctcttgcaaatccaagatggaatgctgcaatgaatcatgaaattgttgc

SEQ ID NO: 380057 - DNA, 971 bp, Cannabis indica
catttccaatatgagaaatccacagactccccatctttccgtacaacaaacaaacattttgttctcttaaactccggatgaaacccaagctacaaaattaaaatcaacaaatgagcaaaatcccatgaacaacaacagattaataaaaggaccccagatgaaaaatcgtatctaaaaatgttaccataatggattgaactccacaaccaggtttcataatctggatgaaaaggaagcaacttttcaagaattacattctcatgctcatcactgagtttatcaccaatcttatatctgctctaatacaaaatgtaatcaatcaaaggtaaaaaaaacaaatcatataagaacaaaagatcagaaagaatagaaaaattactttccagagtgaatgatggttcgaacaaagccaacaagaggaacagtctcctctaatatccgatcttcccaatctacccattgatcagaatcagacccatctttctctttctctttctctttatcttcttcgtgttgttcttcttctttgtagaattttgggtggggtatgacgacgggctttctgagtaagctgggagcataagagtcatggccgcgagtgactctggcttcgtccgacgacgccgttttgaggacgcagacaaaaggtggtttataagaagaggaagagtgagtgacccagttgcgtgtgaagcctgaatttggtggtggtgtggttctagagccggttgccgccatggctcctcctgaaactggtgattcagttattggaagtgaaaccccattggcattggcagaggagagtggtgctctgttctgttatggttttcgatagaccgcaatcttagcaaccaatcacattcctccaatctgctacttcatatgactaattcagatcgccttgggcttttttctctctcaaattgatgggcctactcacttgttcaggcccataacctgcttttcttttc

SEQ ID NO: 380058 - DNA, 4066 bp, Cannabis indica
aaaaaaataaaataaatgaggctccaacctccagcatagattgactattgtgtaactttgtgtatttatatatggagtagagatagagagagattactctcttaccttggctttgctgtgttacttccagaaaggaaacgacggagcggtgttggccgtttgtgtgcacgaatggaattgctaatgctacggactgaacgctgctggccgtttgtggtcgtggtcgtgcgtgaatggcgaaaagatttggctactaagttttttctgtgagaaaagaaagagtgctagggttttttttctttatatggttatcatttatgagttgtgagggtgttgtgtttgctagggtaagggatacactgggccattggctggtgggctgaaaattgtatatattttttttaattttaaattgtctaatgggccggcccgggttgggataaatgggttacaatgcaatcagcctgttaccaactcaatgaccacgggttgaagccttttaaacccaattaatttcggcccaataaaaatgaggctgattcagctcaaaaacgggttgggttggccaggttggtcggctcaacggcccaaatgctcagccctatcttgaagtgatgttggctctttggtaactaataaggctttacgcttgtgtataccagacttggatctggctctcatgttatgtgtgttattctggtttagaggtttgtgacagccagaaatagtagccttgttagttacataaccaagagcaatgtcagtgttatttgtgataggtatcccttggatagcaatactaggattgtcagcaacttggacactagttgtagcaggaggctcaacaatatttggaatttgtgtgtccggatgcgattaatttgaggaccagaggcaagacctgttgtgggaggagagcctactccacatgttcctgttggggaagaatgtggagtagatgctatggcatctggtatttcagtaggctatctagaagattgtcatacataaaaaatagatggttgacttggcagccattggcagccaactattagtagcacaaaccaaatgaggtaaaatagtatttgttaaagcattttaattaatctcaagttgaggactcatcatatcagatatggaataggagcaatggtgatgagacatgtagggattatagaagaaacacttggaaacttatttggtttctgtgtggaagatgttttctgacagaatgttttaaaggggaatgagaattcctcaaagacaacatctctagagatatatagttttctatttggatctagacacttgtattctttgtaatttaggctataacccaagaaagtgcatgttgttgacctatactctagcttatgtctattgtatggtctgatattgggaaaacacctacacccaaatgttttgaaggctatataataaggttgaattttgaacagaacctcaataggggatttattacctagaactggagtaggaagtctattgtggatgtagactgcagtcctaaaggcttcatcccaaaacttaaggggtagggaagcttgagctaaaagagcaaggccattctcaactatgtgcctatgttttcgttcagctaggccatgttgttggtgcgttgttgggcaagaatgtctatgatgtatgccatgttatgtgaggtacttagaaaatgatctaaactcacccacctagtctgtctgtaagcatttcaattatgttcctagttgcaattttgctaatagtttaaagtttagaaagactttaaaagcatatgatttatttttcaaaagatacaaccgtgtaaaatttgaaaacacatcaacaaaatgaatataatatttgtaattattgaatgaagtagtgtgaatggaccccatagatcagacattacaagttgtaaagactcaaaaataacaatgttagaagcttttggaaatgggaacttatgaatcttgccaagacaacaagttgaacgcactgagtaatgagaaattttattgctgatatgaatgttacaacattgtagcacagtttgtacaacttttttagaggggtgccctaatctatcacgccaaagggtaaaatcattctcaacatctaaattacatttgatacacttagacacaactactttggcgttatttagagtgaccatatagtaccatataaaaacaaaatttttatattttttatgttttgaaatcattaaattcaaaaactttccaaattttctcttacctgtttataatttattttgaacaaaagaaattttatattaaaaaactaaacaaaatacaaataaaagcagcagccaaaaacacccagtactcaaaagacaactaccaaccctcaattacattcaaaacatactgctcaccccttttcatcttgctccttttaacacccaacactctcatcttaactgtgtttctaatctctttacaaataacatttacagaataacacgtaagattaaaaacaaattgtttctattactccaaatcaaatatatagttgctgccataacaaagtatgccaccttcctgctcaaatctatacaacgagtcgaacacaatctctgcaactcgattatatttttttggctaaggaatatctcccatccacctattaatctcaaaaacaactttcaaagtgaaagagcactccataaaaagatgatcataagactcttctttatcctcgcaaacagagcaaaggattgagggaatcaacatgaatttgatcaagtgatttctagttaacaactcattacttataaccatccaataagtaaatctatatttgggaatgattagcttttgccaaacattagttgcatactcaactctattagcagcaactaaggaggtatagaaattttttatcttaaacttatctctattagctgcccgtaacagaaaatcagccacaattccttctcaaagcttaagcagcttcctaaaataccaactcatatcctgtttaattgagatgcaccataaatcatgatctttcaagtatattgaatggatccatttaacccaaatattttcttgcttactagcaatagcaccacacaaagttagccatcatggctatattccactctttcccttctcgaaagccaattctcccaaaaaaaaaattggagacaaaccttttcccaagagaaaagatggaatttgcttttgttccttttccttccccaaagaaaatcatgacaacttttatcaatggctgtagtaattttctaaggaagaatgaaaagactcatccaaaaatttcaaattcccaacaacaccgactcaataagctgagctcttccggcaaatgagatatgtctgctagcctagctattaagtgttttattacaccacaatcaaaaactttccatttggtaggcctgagattaacccccaaacactttaggggaaatgaaccctctcctatttgatcaaattccaagatcttctttttacactcctctttaacacccccaaagtaaatttaagactttgatctattaatagaaagaccagaggcatcatagaactctttgaaggcattatacatcatcttcatagaatttttattacccttacaaaacatgattaaatcatcagcaaagtaaagactagagagctttacggacttacaaagaggatgaaatccaaaacccttcctactagacatttaagctaaaagtctagtaagatattccataaccaacataaacagaaggagagagataggatcaccctaccttaaacctttctcacctttaaatgactcttgatccttccattcatgagcaagttaaatctagttccttgtaagcaaaccagaacccaactaataaaacgactaggaaaatacaaccccttcagaagctccctcacaaattgccaatcaatattatcataagctttactgagatctattttcataatgcatctagcagaaatgttttctctattatagcctgttaggttataattagcctatgtttcgggtctttaaaattagcaatatctcgtctattggt

SEQ ID NO: 380059 - DNA, 1546 bp, Cannabis indica
ctgcataatgatttctcttatatagctgttgcatatttttttattgaccagtttcttaggaaaaggaaaagaaaatctctgaacagagctttggaaaagttcaagacaggttagtacatacacaaacttataatatataagatgtaggcacagatttataaatagctattaatcgtgtgtgtaatgattcagaaatgatgaagatgggattgatatcattgttactgacggtatctgaagtaccaatatcaaaaatctgtataagccaaacattggcaaactcttttctcccatgtgaaaatccttctgatgagtctgcaacaacagctgaatatgatcaattatctaactacaaatccaataacagtaccaccttctttaccgatgccataagtacaaatgaaaattactgcgactcaaaggtaaatattttatggtcatatcggctgaatgtcagattgtggttcaaaatttgtaagtggacatttatttgattctgtattatttgttttattgagttttgataatattatgttacttttaatgaacaggggaaggtttctctgatttcaagggatggagtttttcagctaaacattttcgtttctgtattagcagtgtctcatgtactatactgccttgttacaatgtttcttggcatggccaaggtatctacaagtttaattaattcactaaatttcaatatacaacatgagaatatggtattgatgtagtagaattatatatggacaataaaggacactatatttacaaactttttttggtaatttacatatataaattttatcatgtatatatttgaaagattcctgaaattaaataaatgaataatttatgaagagtagttatgacaagaaaacgagtttatttgttaaaaaagaaaaagagtttgtatttaattagtagggtcatcatgatgaccattagtgcccttaccacggcagtattagacatcaatatcaattatgtaaaaattaacgagcagatgaggaaatggaaagcgtgggaaagtgagactcaaactctcgaatatcaaatagcaaatggtatgaatatgcttctaactatactctttaacccatatatacaacatttcatttacatgtataaacataaagttttcctgtgtataataactcttagtttaatatatttatacatggaacagatccaaggaggttccagtatagtgatgaaaccacatttgggaaacgacatttgaagttctggagtaaataccctgttttgcttggcccagtaagtagaatgtcagtatcttcttggcattattattatgtcattttttctgaagccaaaaggtcaaattatatagttgccctttacttccgtttcaacccaaaatagtaaggatttcaaagtctattatgtaacataaatatacaaacaaagaaaggcacatgttattcatataaatgaaagaaaaaaaattatggaaaatacacaactttcaacaaatttgaaatttctaaatgtttgaacctaattttttttttttttggagaaa

SEQ ID NO: 380060 - DNA, 2019 bp, Cannabis indica
aaaaaaataataaaaactcaatttttgtacaaataattttacgagaataagttttttttttagtgaaagacctattattataaattaaaaagatgagtcatttacaatagcagagtagatagtcggagggatatcctccaactagaaacaagcctcatgcaccgctaacgcaaacttaacaaacccgtaagtagccatattggttgtatgtttgacatgtgaaacagttacattaagaaaaaagataaaagacaagtgatgtctacaacaaatcattaaaaaaaaaagattgaattgaagggaactcgcaaaacagaagtaaccataagagcatttgtctccatttgtgcaattagaaaatattgttgaagagcccaattcaaactgtgaaaaagagctttggcctccatttcatgagaactgaaattttcaactagcggcttggaaatggcagcaacaacctgaccattagagtctcaaaggacagtaccgacatcgataatattttgtgagacgtccataacattgtctacattcatctttaaatcactaaggattggagatctccacgggggcggggtagcagcaggtagtggttgtagtggttgttgtggcgtgatagtagtagcagtttggattgagttaatctgaagttgctcaagtaggttgtggcgataaaggcaaggtcttttgctggttttgctttttgaccatggacaactcgattccgtttagtccaacttgaccaaagcgtgcaaaaaaattgttccatttcagctttggagtagattgaagataaaataaatagtcacctttatacatcgaggaggacaaacaccaatcaaagaccatactcgagtgtcgccaaactgctcaggcatatttacaactaaaaagttcatgtccaacaaattcccatgcttggtaacatatatatcaagttgagtttgtgattacctttcttcaaactaaagaggttgcatccggaagagcattgtggaattccctccatgtaaaaattctgacttttagggggaaatgcaaagaccataagaacttccaccaagatgtagccgagtctgaacttgaactttgatcagtttcatcaagagcagatgctaagtgatagccagtttgaactgtgtagaaaacatagctgtgataatgccatattagagtgtccttgcagttgaaaaaacttagcggaatggtcaaaattttgtccacatccaagggagtaaaaaattgttacagaacaggaacatccctttgtcgtttatttgttatcaaattaataacaactccatctatcagtccagtgtaatgaagaggaaaaaaggtattgtgtcccaggatccaagggtcaaagcctgacctgattgtccttccttcactaattttccaacgcaaacctgttgaaagtagatccttaccccaacaaataccctggcaagttaaggaagggacttgacccaaatttgcttcaagaaaagtgttatttggaaaatatcgacactttagaactcaactaagaagagagtgaggtttctttaggagtcactaagcttgttttgctaataacatttgattaaagtagacaaaagaacgaaatttcatgcctccatccgctttagatttacaaagaagattctaagaacatcaatggattttcgaaccattttcagtcaaactccaccaaaagttagctatcattgactcaagttgtttgcaaaaaaaacctgtagacgaaaacaactaatggcatatgtaggaattgattggaccactgccttgagaaggacttcatcaccccctggtgaaaaaatttctcattccaagtgacataagttcctaaatcttttctttaatgttactaaacaattcctttttgtccattccagaataagatggcaacccaagatacttttcatggcattcgcaaataggcatggagagatgctgatgaaagaaaatttgagtggcgaaggttgtgttgggggagaaagataatactgattt

SEQ ID NO: 380061 - DNA, 4286 bp, Cannabis indica
tgccctttcttggcccgtgccaagttgtgcgcgaccaagaaaagggacgagtcagctatgcagtttaggcatagtttcttgtgcgaaacatcgtatatcgaatcagagacataatcgaatattttagtagggttttcgacgttgataagggaattttcaccattggaatcaaattggtgcgattgtttgattgtgtagagaatgaagaggagttttattgacatgaaatattggggttttgccatattggatttttaaacaattgaaatgttttctaatgctttaaatcgttataataggttgttttggtcgttgcatggcccatgcaacaacgcatttgtgggaattaatgaataaatgaattaattatgtgtgtaccaagttggctgattttgattttgattttgattagaaagtggatgttgtctgttttttgttgcttggttgtggtaatagatatcatatatagtttgatttactcaataattttctcaactgattaggataattttgtccaaaatgttttatctcacagactgtcacccattttaagagatgaattagtatagggctaatttgagttaatatatatgtatatatttttcaattatatttaaataagatttcacaataattttattgggtaaatacaacttaattaactataattttccacaaattttatgaatggcactatatcacatttgacatgtatatcttgcaagtaattattaaaataaaaattaagtcaaatcaaatattatatggaagaatatgatgattttggagtttatgtatatattatagtattttttttatttaatgaatgtatatatttatatttatatatgtaaaaattttgtattactttctcatatttttttaaaaaaatattagaattaatattttggcccattctctttcagtctacttctgtattgagcctataccttgtgtatatatataacccttcttgctttgtaataacctaatgacctaataacactaaaggcatttttctgtcgttcatttcaaaataagagtttccctctctaatatggtatcagtgttatcttctcccaccaccaaccacaaaccctagtcgcctccttcaaccttcaccataaaaccaactcctcttctcccatggctcctagaaccagaaactcagtcgttgttgttgcctccgtcattgagtctccatctcttccgctaccatcaccgactgtcacccatggtgaagctccttcttctatcgctgctactttcgacgacattgctctgtttagttcgtcatttgcgaactccatctcaaacactatcggtgcaaatcattttttgttcgctccttccaccactggtgtgctcggctccaattccgttgccgatatccctagttctgggcggattggacaacactccacagcacagttcatctcttgctctgctctagcgtcgatattggtatccacaatgcttctgcctttctcttcttcaactccgatcttgactcagacggttcattcactgacctccattctttccagcacgaccacatatctgaccccacctttcacatttccacatgtccaaaactcttctccatttactattggtaataatccctttcttggacatcaatgtcatatggcttttaatgataactctgcctttcttgcaaattaaggtcatgtctttttcgatcgacatctcaagatgatcgttattacttgggcattggagatcaaccaaatataatttcatcatttctcttgactagtcgagataatttttagtcttggaagcgggggacttcaattaacatcgctgccaaaaataaaactccattcattgatggcactttaccccatccaccattgaatgatccatctctatctggttggggtcgatgcaataagatcgtgatgtcatggattcttcaatccgtgtatcgtgaaattagtgcaagcatcatgttcaaaatcattgcccgtgcaatgtggacaaacctccatgatcgattcaatcagagtaatggcgttcgtattctctaacttaagatctttgttaacaatattaaacaaggcgataattcggtcactacttatttcactcagttacaagccctctgggatgaactcaatgagtataaaccaaacactccttgcacttgtggctgcacttgcgctgctatgcaaaatgtttaagattactacaccagagactagatccttcagttcttaataggtcttaaggaatcttattagggaattcgggctcagatcattatctttgatcctcttctgccactatccaaggttttctccatggttgttcaacaagagtgccaacgttgtcttggtaacaccgatattgttattgctgcccctgccaaaaaaaaaactaaatcatccttctcggagcaaaaagtctcgcccaacatgttccaactgtcttaaactaggtcacctagttgagaagtgctatttcatccatggttttccaccaggatatggtgacgaaaagaagaatccatctactgctcgggcaaatcaagtttctgccagtctagatgctctcgtcgctggcttttctcagctacaactcagatttcccttctcattgagtaaattcaaggcgctccatccatcagtaaaaatcatcctgttgtctccaacgtctttggtaatgataaactttttctaactttttttatggattgtagatagtggagccactcatcatatatgtcattctcttcattgttttacgggttggggtccgagtttgagggccaatggtctaggtttggatttggggttgggttcggggttctggtctgggttcgaatcctgagtctggggctaggctgggtctgggattcggggccgtgttcagggacgaggtctggggtccaagtttggggtttgggactagggtcgagtctaggaccggggtttccaactcttaactatttataaatattataatataagctaatacaaaattatttgttatgcattaaataaaacgattcacattgtattaaaatttatagtcgtatttaatgcaacacgactcttatatgacttaaccaaacaaattcataattgatcatatagtgagggtcgctaattggggggtcttataaatggattttattaagaaaaaaaatatttcttataaatgggcattctttaagaagataaaacataaaatataatatttttgatattaaataaaagaaaagaggaccggaatgattggctttggacaacggcctaacttgccccactcttggatcaactcaactctctaatatgacttataaaaactatttactttccttatcctacacgattgttaatacatgtatattgtaattaacacaaatggtaaaattaattaagaagtagataatcaatacggtttctcacctatatagttacccggaggatcataattacaaatcataaatgtatctttattgtcacaaataaccctagcacaacccactcttttagtactttgccacacaatttgtgtatagtggccacacattttgccattggcgcaactattactctcgtacgagtagtccttttcctcttccatccatgcttcaacggcgttggccggtgtccaatcagagccaccaccccaaaatatgttctctcctagcgtgaactcgccatcctggaaggaatgctttagggcacagtcgactttcctttgtgaggcccaacgtcgtgcatgcctggcaagcttagcatcccaaaagagcggtggctctccttttttggcccgagctatgttatgtgcggccaaaaatctcgacgatgcactaaggcagtggaagcataggtgcttgtgcgaagccccatatgccgaaacagcatatgttgtattgttaaggtaatctaatatttgattaggttgtgggaagctcattaagaaattgttattatcaaaagtttgttgtgagtatttgattgtgcatagaatgatgaagagcaaggagagtgataataaatggggtttcaccatttttcttttgagagggtttgtaataatattggaatggtctagtaccctaattatatatttatatgttttttgggggttaattagttaatggagtgaattaattggttggtctattgcgtttgactatatttacttgtggaaattaattggagaattttgtatggtaatgattttggttattatttagattatggcacattttgcttggttggttgagaattgttgtgatatatatatat

SEQ ID NO: 380062 - DNA, 1000 bp, Cannabis indica
tacatgtattgttttaatgttagcaaatataatttttaattttttacaaatataagtacaattaatactttacaattcaagtaattacataatcttttatgtcatttaatattttagaacctaatattattgattattttaatttatcgtaaaatttattagggtatggtagtactctatacatataccctacctgcacaaaataaattatagaataaataagggaagattgtagaataagcactactgtgcactgcccatatcttctacgttgtcatatccctattaattgaagaattaaaaaaacctctatctacaatttataaataaatacttttataacaaacaaaaatcataataaaataatgatattactaataaaaaaaaaaacaagaaatccaagatttgaatcttgtctcataccaactaagaaccctcacttaattcttttgtctttttttaataaaaatatttaattatatataaaatttaattaattataaataattatcacatatttatatgagattacttacattgttaatgagttcatcaagagcagaagaagctcccgactcaataaaatttattttatggtcaacaccagctttctgaatgaacggtaatccaatttcataagcttctctatttggatcaatagctgttatctacaaatcaattaactcaagtctcattattgataattaattgtggttgttgttctaataaaataacccaatatatataaatataggactgaaagactttattaatggggtgtctcagagcctataaaaatttgacacctcatttgatgaaattgtattttatttaagcaagaagcaaataattactaagcatttttattttgttaaacgccatttcatataagagtgttcatccaattcaatccacattattttgttcacagtgcattctaagtgcagatttcatttttttttttggatctaatccaatctgcacaatagctcaaatccaa

SEQ ID NO: 380063 - DNA, 5846 bp, Cannabis indica
tttgggtacagatccacttttatgcatgttcttgatttgtgggctgaagggtgaaggggccacttaacagctcagtagataagaagtgttttttttaatggctctaaataagtctgacaagttgtttgatcccatgatcaatgagtttcatggcccatcaggtcgttggatcgagcaagaaccaaacccagtttcaactttgggaaagaatatgaataacaacgtgtcagtgcagactggggaggagttttccaaggtgtttcttcaagatcgtcttccagctagaagggttgcatctgtcactgatactgttcaggagcgtgaaaaaagggttgggtttattggttatgagaactctttgccgggttatgaggatctttctcgtgtccttggattgacgagaatggattctgagaatgcttctgaaacacctgactttgtgtctgcaaaagggtctttgagagagattgatgttgaagcttatgctgatagattgaacagaaacaataagaaggagaatggtgagactggtcatggtggtttaaggaaggttgttagtgatcagaattgtgataggactggcggtgtcactgttataccaagttacaaatctgagtctcctagttcaaataatttcaatggatcagaagtattagatggctctcagtcagggaagataaagtttctctgcagttttggtgggaaaatcttgccgagacccagtgatggtagactcagatatgttggtggagagacacgtattgtatctatcagtaaaaatattttatgggatgagcttgtgaagagaacttctagcatctgcaaccaacctcacggcataaagtaccagcttccaggtgaggatcttgatgctcttatttctgtatcttctgatgaggatcttcaaaatatgatagaggagtaccatgggattgaaaagcaagatggttctcaaaggcttcgaatctttttgattccattgggtgaatctgaaggcacatcttctctggatgcaagcaccataaaggacaataatcctgactaccaatacgttgcggctgttaatggcatggtagatcctgtttctttgaaaagtgttggagggcagagtttggcaagtgaagcaaatcagctgggagttaagaattccccatttacattggaaactaacattgattccactgccttgcatgatagcaagtattcagaatcccagaagataaatgtatctccaacacattctcctccattctctcccattcaatgtcatcaagactccaaaagtgctaagatacaagcacaaagtaatactgcttgtgtaaatccttcaccagagggtgtgaatttgatgatgtatgatcagcctactgtctcacactcagaacaactgcatggtggacattttcaagaccaggatttcatgaatggttttactagtccaatagctgctgatcgaaatgatggtgattttgttggattctctcatgacaggccaatctctaaggaaagggtatttcattctgaaaaaccgggctcacgcctcaatgatcctaccggtctattatcagactgttctgatcctcatctgggaatgtcacatgcattttctgattcacaattgcaagagagtggaaggaggtctgcatactgctcgcaagaaggaacgagtccatcatcccccttgtcttttgcaaaggctcagttgtctttgcaactaaattcaggtaccttgcaagaaaatccatcccaactgcatgacaatattaatgttattaatcctcaggtacaaaagaacttgatggatagcgagtctgttgcagttcaaagaataattttgccaaatttttctttgtcttcagaactaatggcttgtaatgaagctaatcctaagtgtggtactggtgatattgacggtaatctccttacggttaaagatgagattggcagctctaatttttccatgccgaaccagtgtgagaaagattccctgaatccaataacattgaaaacgattgatgcaaagaatccattcgaggatcaatatggacagctttatggtgggagtccagctgttcttgcagtagactgtaagaatgaattggacagtacaaacccagtccaagacccactttttactattggctctcaagagagaactccatcatcttcatccgttggcttgatacctttggttgacgacttggtggtgcctcccaaaaacaatcatcactgtgaccaaaacatcgctgaactcttcagcatgagtcagacatcttctaatgatcataaaaatgttttgattgggacagcagatgttcaaggaaataatgtttttggaacaaataattatgatgcttcaagattatttccaggtgccaagcaacactatcctaaggaggatcctttgggtgatcttttggctggcttttcagttgatccggtactacgtgagcctgcacaacctgctcctagtgatatgagttctgaacccaggttgataagtcctgtaaatatataccaattgccaccagttcatggtgaccccattataagctctaatttgcaaaagagtaaccagataacgttgcagaatcctacccagggcactgcagttaaccaagaggtttctctcctggatgtcgattttataagctatcccaatgagaactttgaaaagattaatttctacccgggccaaaattttgaaaagattaattttggagattctactgatgtggaatctaattctgaaggcatcaaattgacacaaacagaaccaacaggaaatgataacaatcaggcgtcgtcaatggctcaatatcttatgggtgaaaccgttgttgacgattctcctactgcaacagaggtggatagcattgttccagagtctgaatctgaggtgaatttgaattcatacatttggggtcttttaattgggaatgggaaattataaaaacaggaatctatttctagtcaagttatgatttagatgatttcttttctgcttacaggatggtaaagctgatgaagacagaaatgatttatttagtgatgcaatgattgctgaaatggaagcaagcatatatggattgcaggttttcatcaatttctcacttctgtatttgactaagcatgagttttcttgtttattacatcgccactgtatcttatagtactgagtaaatgtacatggtttctgataggaacttctgtaaaccaacatatagatgtaaaaatttctgtcttgttgctaaaaattatattgattcacttgtgaaaattcagcaactagttgatttctttttgagtttttggttgtcaattagttatagtactccttcctgttacatttatttgttctatgtctgatgctcctactgaatgagtgcccaaattcaaatgtacagattataagaaattctgatcttgaagaactgcgagagttaggatctggtacatatggtactgtttttcatggaaaatggcggggaactgatgttgcgataaagagaattaaaaagagctgctttgctggaagatcgtccgagcaagaacgcctggtgagtctcctaattttatgttttgcatctttttatctctcttattatatccatttcatcccttctctaccctctaatgcaaggcagtttcgttgagatgtgaaaatgaaagtttagcattaaggttttaggaattttatagtaattgaggtgagttataagtgtagctatatatatgtatcacaaaaaagggaaaatttatttgattatatgtgtagatgtacacatatatttgaaatctgtttcatttgtttagtttttatctcaatttgcttgtcatttaacccatatgtgaagctgaaattatttctcatgtcataccagacaaaagacttctggagagaggcgcaaatcctctcaaaccttcaccatccaaatgtgcttgcgttttatggggtagtaccagatggagctggtggaacactggcaacggtaacagaatttatggtgaatgggtcacttaggcatgtccttctaaagaaggataggtaaattttctttgtttgtttcacttcactttatattctttggcatagttatttatatgttaacttttttcttcttttggaactctgaataggtcactcgatcgacgtagaaagctcattattgccatggatgcagctttcggcatggagtacttgcattcaaagaatattgtccattttgatttaaaatgtgataacctgttagtcaacctcagggacccccatcgacccatatgcaaggtaattaaaaacctaattgtcatgtctaaacaaagatggaagtgtgtgcaaactgtactcaactactcatataattagtattttattttctcaaatttttcgtttgattccaagggccatgaaaaggatttagaagaaatcaattttcattgaaaaaatatatatattttacactacaaaattccctggggatatttaggctgaaatagattcaagggaaacattttctccattatttgtgatgtatgacgtggctaccagataggagccatatcttgatgattctaaggatgttttatttttattttttgttagtttcccagttactggttgaatgtctctgattcctgagtatctgtttttttttaggttggagattttggattgtcaagaatcaaacgcaatactctagtatctggtggtgtgcgaggaacccttccatggatggcaccagaactattgaacggtagcagtagccgggtttctgagaaggtgggtagcaatttgttatgtatgctagcagtgtagaagaatgatataaaaagtccagtaaaacaactgactaactgtgttgacttttgttaggttgatgttttctcctttggcatttctatgtgggagatattgaccggggaagaaccatatgccaatatgcactgtggtgcaatcattggtaagttaattaatgttataggtagtcctaaatgttgaactaacatggttttaaactgattatgaaatcaaaatccatgtagtttctcaaattacatgactataaaaggatatgctttctaattaatcttctataacaagtccttgaaagtgtgtatagtggaataaagaccattaattttagtttgtttaagaaacttataaacttcagttattagtagccatttcccttttagatttcattaattatttgaaaggtgttgaatagagggttaacagcgattagcaatctaatacaccatgacaaatttgtgttcctaggactcggtagttttggtagcttgttcatatcctttacattctaatcaacactatgcttattttttcaatgcaaaatctctcttaaaattatgttacctgcttctgaagggggcattgtgaagaacactcttcggccaccaattccagagcgttgtgatcccgactggaggaggctgatggaagaatgctggtcaccagagcctgaataccggccatcatttaccgagataactaacaggctgcggtccatgtcaatagcgctgcaggcaaaggcgcaaagcaatccggcaaaagtgcctatcagccctcgacctcgtgaataaaacagtaaatatatatatgaaaaaaaagcacagaactttgattcttcaaatagtgagtctggtcaggtacacactcccaccattgaagctagccaaccccattgattcgggttgcggatcaaaaatttgtaggtgaccattcttgcagtttgatatcagatattgtttttcttcttctttctcttgttgataaaagaagatatatatgttcattttttaattctttgttcacacaaaaaaac

SEQ ID NO: 380064 - DNA, 2704 bp, Cannabis indica
ttgctgctttagctttctcagccatttcagctcgaaaattggcttgttctcctcggtttcggaattcagcaactttagccaatgcagcatccaactccttcctcaaagtttccagctcatgcttgttatcagaagttggcgcccaaatttgatcatcaccctttatgtgaccatcattgcgatctctactctctttctgaagctcagttttcattagtgctatctcaacttgagcttctgtttctttcctcttcatttcattaatctcagttttcgcctttagtatatcataagtaagtatttcaacatcatccatcaactggctcaccaactcatttgcacttcttaactccatttttacttgattcacttccattttgaatgcctcaatcaaagcttcttgactcaagctctttctttcccatacttccaactcttctctaattagcttcagcttcaattccgaatcggtatcagcagctaattttttggacaagaatgttagctcttcatttgcttctacaagtttcaactcaagaacattgcccaatatcattttgaaaacaaactcaccttccatctcctccatcatttcaacatctctttccacatcttctagcttctcttttgtttcatccaaagcaattttagccaactcaatttccatatctttctcagaagccattgcaatcttctctttctgagcctcacactcagaagcctttagcataaaattagcctcattcagctcagaaattttgctcaaaagctcttgacacttttctctttcctctgctaaagctttttccatcacttctacttgtgtcaaagccttgagctctgcctccctggctgaatcaaattgtgcctccttacaaataagctctgcttgagtggcctttaactcgttcgaaagctgcgcacagatatttgtagcttctgacaactgaaccgccatctctttcgcctctgattcaaacttttcgattctagcactggtgttcttgtactcattcacatatatttccctttctatgtcagagttctcaatcaaaatggaaagttcatcaactttttccttagtgtgttctagcttatgaagggtttgcatatatgcagcctccttagcttctagttgaactttacaatttgccaactcttttaacacacattcaagctctctatttctctcacattcctaccaatgaaaagagaacgaaatcacataaactatatagctaattttcctttgtttattgtaaatctacatataaaactacaagattaatcagaatataatgggaaaggttatgatagtagtcaatgcaaattgcatgtgactacaatcacttgaaataaaacatgaaagaaaatgaacttagattcttataattaaaaagttggtaatgaagaagcgatcttacattgttggcagtgagccagttattctgatggtcacatttctcactgaacaaggatatagctgcctggactgattcaattggtttggttgtatcaatctcccatattttccaatcaatgtaaatatgtactgagaaacattattataccaacaaaacaaaagagacgatcacttagtttgactgctataaatttaatcgctaatattaaatgcagaacaaataaattatgcatattataacattattttttgacagttgttctttgtatttggcgtttggaggactctacaaggtcttgttgccttgatttttatcaaaacttgttaatccttagttccaatccttatttgtcgttttagtttatttttggaatttgaattttgttgagaaatgaaaaatgtaagaaggaaaatgtagcactaaaaaaggtgtagagaacaaaaaaaatcatttggcatgcaaattttgaattgaatcaagttcttattctatacaaacatcagaatattataaaataatataaaatatataaaataaataaaataaaaaaaaagtaataagagaagaagataatgagagagtgaatgataatttatctatactgtattccaataaagtgaatttttattgatataaaaatatgattagaatataatgagaaactaatcaataaaaaaaaatatatataatcaagtggtaattaatgcattaatttaaacattcataattatattttataatactcactcttggtgtccataaatatgtctcattaaaaattttactaaaaaattttgtcaaaagaaaaatagtgcagtgtaaattaactcccttcatttaggcattcgtgaaatcttctaattgacgaatgtcgatcttatatgcaggggctaggcccgcgagtttgaaaacactaaaagcaagataggaaaataatgctcaggaattgtaaagctcagctcaaactttgatgctggcagagtattttcatttataggcagagaaaggaatcaagaatattctacataattacagctcaccaaatctatacaatcattaccaaataataacaaggaatattctaacggtaaaggggcaaaagttgttatacaatttgggaccacaaaggtaaggagaatcctatgaatgatggtgcattgtaacaaataagaggaggcacacagttggctgctgactcattttattttctaacaccgcgcctagggcccactcattttaggggcccaaataaaaaaataccttttaaaaaatatacatat

SEQ ID NO: 380065 - DNA, 3787 bp, Cannabis indica
gagggggtggttgattgtttactggaggtgatgaaataattagaagagaatcacttgtgggaataagagaataggaatttggtagggggtttcttgtctgttcatgtaccagaggttggacatttaaggttattgttggagggataagattattttgtggcatttgggaaggtgttgattgaaaaatattggggtcagctcatgtggcatttgtgagggtgatatgttcccatgtaaaacagctgagttagtaggttccaaaagaattagttttaaaactagatgagggaaataggtgagaaataggaaactgttttgtatgaccaacagaggtatttgcagggaagtgatcctcattaaaagccacatgccttgagataataattagaccatcaggatggtcacataagtaccctctgtgatgggatgagtatcccaagaatagacattgatgatattaaagctcaagtttttgagcattataaggtctgaggtgaggaaaatagctacaaccaagaggtttaagtagcttataatctggcatcttgttaaacaagcactcataagggttttatgttaccaataagtagtgttggaagcctgctaatggtgaacacatcagtggacatagcatgccaccaatattccatagccaatccagcctgagccaaaagagtaaatcctatttctatgatgtgtctgtatttgcgttcagcacgaccactttgttcacttgttcttgggaatgtatgttgaaaatgaatgccttggttagtgaggaatcaagcaaatggtctatactcccctctctaatcagcttgaaaactttttataggtaagtcaaattgattttccacttggcttttgaattcaatgaagatatcaaatgcttggtttatgatagtaagtggaaaaatctaacaatacctactgaaatcatttaggaaatgcacataatatttaaacccctctgtgacatgggagggaccctagaggttagtgtggataagagcaaggggttaagtggccctgctgttagagatatgaaagggtagtttgtaactcttgccttggtggtgggccttgcaaaattataggtttttaagagagccagagtgagaaatgggaggcaatatttgagctagagtgttatgttcagggtgacccaatatacaaatgccaattatttatgtcattgaatttagatacaataagtacttgactagaggagttagaggaagaacataaatgacttttattaatatcttcaacattacaagtattgttgatcaaattcaaatgacatttaaatgtgcaactacatgacacatttgagttactagatgaagttagtaggtgacactgaatagaggagttggaggcatcaccaagttgataaagacctcatttaacctttcctttgagcaggacagtccctgtgagtttgtcctttacaaagtagtacgttttaaaattcaagaaagacatcattgtcagtagttagttgagaaacactaacaagattcttggttatggagggtacatgaagaacaaaattcaagtgtatgggctggttataaacataggatgggatggtggattgacctatatgagaaacaagaagtttcttaccattcccaacagtaatggttttagtgccattgtaaggagttgctgaatccaattgagtagtaccaaaagttacatggttgatcgctcccgtgtccacatactaagattcatcatcacaaagtactgggatcatagtggttgtcaaagcctatggatcataaggaatatcagtttctgttaataaagtttgaggattagaattaccatacttggttgtaacttaattaattttgtcaaaacagtagtgacaaatggtagtagtgtgactagttcaaaggcacacttaacaaaggaggggagatccatttccatgaccatagggacgaccacgattattgtcactttgattgcttcaactagtgccctaataaggacgatagcaaccatttcttgctgcattaaaggcaaagtttgcttgcatctttatggataaattcgtgaccacgttatggtgttcaaggcgagttttatgagagagaagaagtgcctaaacttcttcaaatgagagaagatcactacgagaggtgatattggagaagataggattaaatttgggtgtcaggccatttaatacttgtagaacaaaatcttgattggccaccaaagagtcagagaccatggagcatgagcaatcgattgcgccttgtcgacatactccataatcatcaagtttcctttctagagatatgaaaaattgacctttagttggaggaggcgagctttggtttggttagagaatccttgttccagagcatgcaaaacatagtacgacgagttaaaattggcaaccgaagcaatgactggttctgtcatggaggatcgtagccaagagagaaggagatgatctttctttttccattgggaatatttagggttttgagcaccagtgactaaggttgcaggaggagaagcatccgagaacaagatctgatccaaattgtgtccaatcattgtgggaaccacttgatatttctaggagagaaaattggcacgatcaattttgagagttaaagaagcagtaagtgagttggagaaaggatttctcctagagttagatttaaattatatgaaattaaaaaaagataacaaaaattggctaaaaattatccttaagtggtcggccatacaatgagccccacaagttagaattttgtcattttattaaataatttatcttttctttcactaatgccatattttctaatttcaatcctttaaatgtcaaaactatatatttgataattaaaattaattattaaatgaaatttctacttaacttatttattaattagaccttaataaagtctcttaattaacaaacaaagcttaaaacctcttttcttcacaattaagtctttgcttagtaaaaattcataaataagacatagtctaattttagaattataattgattaattaaaactgattaactgagtctacaagcagtattatctcaattagtgtggggaccatgggcctatatattcaagcttccactaagtagatctagaatttgccgagtaaattttctaactttttaactcctccttgcgccactatagattcaaaattacattgttaattacacggaacgctctatatgttccaagatatagatacactatgaattatccatcgttctaatctaaataatcaaagatcctctatagatgatttacaccgagtaaggacaaatttactgttctacccctcaatatattttatccttaaaacagttagcttcctataaatgatatttcagtaaactaatataattactgaaataagagctcttccattcatctctattaagtcaagctcgaaggaaattatcatttcacttctatatctagatagaagctatagattccatatctatgattagtgctcccactcaattgtactatcatgttcccaagatgtatgtgttacccaaaccaattggtaagctttaacgaacgactctaataacataaataacacacttgtgagatcgaacctaaccaatcagcaggattaagatcttttgatctaatatcaatcaagtgatattgacttagaaagatacaatggtatgtttataatatctttaccagatcaaaattggtctagcctactacactccatacactcgatactagcatactttaccaatg

SEQ ID NO: 380066 - DNA, 2297 bp, Cannabis indica
ccgaattttgggtataacacttactaaatagcaggaaataatcaaatactaaccctaattcgaacaacaccataatccaaaattacatgcccaaagcgatggaacaactaacaaaacttaaaagagtaagttctagggttcttacatttgaattactccacttgattccagttaggttttatggaaagtgttaggttttatgccctaaataaaactctatttcaatgtaatcttttatattcatttatcaataaagaattatatttattttattacttatttaatatgttatttagttcatgtgatcatttatttgatttataaattaaggggtgttcattggatcacatccaatggatttggacccaaccgatccaatgcaattatttattggatattgaattttgtcatacgatccaatccaatcgaattgagtcatccgatctgatccaatggatgtattggattggatcagttccaaccattggatgcattgattggttttctattggattggattggatccatccactctattttagctacaatttaagttgatttcattaaaaagaaaaaacaatataaaaaaacataatttaaaactgaattatccaatatacataataaacattagtttaacctaattctcatgatctcataataaaaccactaaaaaataaaatttattcaatagtcattgacaattgtattagtgtttaggaagatgagaattaatattttagatataagagttttttttctttaatctcatgtgttaaatgtatattaaataaattaatatatatttttaaataaaatatattaaatatataaaattataaatgtatttaaaaatatataaatataattgagtgaaaattggatgataattggatcagtttggtcggttatccattggagcagatgtcccatccaacaaccgacccgatctcacaggatttttaaaatttacatccaatctgatccaattattattggatatccaattctattggatcggttgagattggatcggtcggttgtaatttgattggatgcctttttgcacacccctatataaattcatccaaacccttatcacattgatattcttgtttattttgttgtcaacacaatgggaagtaatcaagattgtgtgattaaatgtattcttatgatttatcagtacacagggtttaactcataggataatctacaatgtagtttacttgcaccttggataagtgctatgtcctttcttgggcattggttaaaataagcttgggttgaatgtatggagtatacatcggaacaaatgaccatctgggacccggatctttgtcattgctcagggacctagagaaggccaacttacctacaagtgcaagtagatttcagagagccttgtgaagagtctaaaatggatatcctctgcgcacggaaaaccgaaagccacttgagaggcaagagtcagatgactttatgaaagttatctttttttgacacataatcaaatcttgtccgctgcatcagaccatggtagtgcgcactttctgcacactcttctttgtatgaaggctcctctgagaattatttcctccaagtgcaagcctttgctcaacacgtgccctgcaccaacatctgtctccactatacaaacaattgggatgaattgcttcaattttctcggtgtttccaccagcagcttcattggtagatgaaccagcttgcttcaccatttcatttgccttggctctctccttaatcttcatttcctcacaccttttgaataaggaatcacgagcctctactgtcatatacccataattacctttggggttggccttccagaactcataaaaagatctatgtactaatcttaaaataagtctcaaaatcttcagcacatgcctcaacctctttgttcaaggcttcttccaaggaagttatggtgtttttctctctggccagttcttcagttagattttttgacttgtttgcccatgttctaaagaagcctccaaagagtgtccatctctttgagcagtcagttagatcgcttgaactctgcctccagattggcctctagcttgtcaattcagggcatatcaattatctacttttgcaactctttgatctttttaagtttcttcgtgcatctttttgtaaacctcgcctaggacgtgctccttttctatgattagtgtttgttgggttttgtgccctaaataaaacccatttcaatataataagatttactattaataaagatcagaaataacattttgtgttgcatg

SEQ ID NO: 380067 - DNA, 1463 bp, Cannabis indica
atgcagaacctttaacacacattggttggcttgtcaaatgaatactcagatacataagtggcactatgaactttggtcttcatctagaaaggcctcatactatgatcttgttacctttgtgatgctgattgggcctcagatccagatgataggcgctccactactggttttgctatcttcttcggctcaaacttgataatttggaaaagccagaagcatcctattatatctcactccaacactgaagcagcatacaaaagtgttgccaatgtcactgctgaattatcacggctgcattatttattcttaaaacttcaaatttagctgcctcaaccacctacaatatggtgtgaaaatttgagtagtgttatggtaactcgaaatcctattctacatgctcaaacaaagcatatagaacttcacttgtacttcgttcgaaagaaggttctcaacaatatggtccagatcaaacatgttccagcatatgaccagttagtttatggcctaaccaaagcaatcacaagccaaaggttctctacaattaggaacaaacttaaaactgagagcatttcaattatgggtttgaggggaggtgttagagctggcagttagttaaaactgttggctctagttgttatttgttagtcttagtcagctagtatgttagtagagttagttggattctattgtggttagtgtccactatatatatactctattgttacattgaatgaatcaagataagctttactatcttcaatctttttctctcttcttctcccttttatgttatcttctttctatttttgatgctcatcaatgacaagatagtttaaaactcttataccaagtcaaggtccacttgctaattcataatattttaacaaattctaagtgtaaaatctattacaaattctagattcaccataaaatccacaaaagcaccaagatgaaaattgattgtcaaaactcaaaagataactgatgtaattaaatgaagattttgttgggttttatgccctaaataaaatctatttcactgtaaactttgtatattcatttatcaataaataaatagatttatttcattacttatttaatgtgttatttgattcatgtcaatacttattttatttataaattcattgaaatccttatcacattgatattcttgtttattgtattgtcaacacagtggaaagtaatcaagattgtgtgattaaatgtattcctataatttatcactacacatggtttaaatgataggataatctacaatgtagtttacttgcaccttggataagtattatgtcctttccagggcattggttaaagtaagcttggattgaatgtatggagtatgcatcgaaaagaccaatattgaacttggataagatataataaacttactgtaatatctatttgattcaatatcacctacttgatcttagatcaaatgatct

SEQ ID NO: 380068 - DNA, 2115 bp, Cannabis indica
cttaggactataccttggaggtagagtcataaaaatatccttatgcaagtcaccatgcaaaaaatgcattgttcacatcaagttgatgtaatatccaaccattaatagtagctaaggcaagaaccaatttaactgtaacaagtttagtgactggagcaaaggtttcagaataataataccttcttgctgattatatactttagccaccaatcgagcttttaacctctccacactaccattggcattaaacttgatttcataaacccacttacatcctataacatgctgatgagaaggaaaagaaaccactgtccaagtgtcattagcttcaagggcaacaatatcatgatccatggcattatcccactctggtatcccatgagcttgagcaaaagactcaggttcagtaaggctggaaatggacagaattaatgctcgaaatttgggagaaaatctagagtaatcaatcaccttagagagaggataaagaaccgactgatcaagatcctgagacaaaacatgagatttatagttagttaaaaaacaatgataatcattcaaataaaagggcttatgaatggttcttgtagatctatcagaagtgatattggactgtttgtcagaagcaaatggggtgtgagtttgtgtagcaggaggtggggtgttatcaagtggtgaatacataccagaaagaggtataccagaatcgggtataccagtagcagggacactagatgaaatgtctggttgcttgggattatggtcaggcaaaagagaagctggaaaaggatcagctggaccagtaggaaggtgaaaaaaatcatggtagtggtctgttgaattaataccaacaaagggaaaaatgtgttcatggaaatgaacatctccgctaataaacactctatttgtgtttagatcaagtaatttgtatgccttcatacctgctggataaccaagaaaaatgcatggggcagaccttggaaagaattttgatctagacacattaagagtagaggcataagctaaacatccaaaggcttttaaatagtcatatctaggcatttttctgtacaaaatttcataaggggatttctgtttcaggttgggagtgggggtcctatttatgaggtatgtggcagtggtaatacaatcactccaataggcaagaggaatgtgagattgaaagagtaaagcacgagcaacattgagaggatgttggtgctttctttcaaccacagaattctgctgaggcctatgaacacatgaatgatagtggaggatacctagattcttaaacaaattctcaaattgtaattccttagcattatcagatcttacaccgttgatggtgacattaaattgtgttttaatgagctgaataaacagaggaataataatttgagcattagatttttgtttaataagataaacccaagtaatggataaagtgtgaaaaggaccctatatgtcaatatgaaccagatcaaagcatttagcagacatattacgagccttctttgtttagcataatgacaagtggaacaatgaaaatttttactaggataatggctgaattacaatttttcattcaagggatgaagtttgatacaagaagggtggccaagtctataatgccacacagtttcatcaacaatcttatattcaaaaatagaacaaacaacaatattcatggtgctttgttaattttttttattttttaaaatttttattaaatattttaatttactttaattattaatataaatttttaaatattttaatttacttttaattattaatataaggtggggcctaataaaatttcactacgtgtatacttgtgtacacaatgacaggtctatttggcccttaacaaccaaaaactaacagaaagagtgctgaccaaaatgattgcaaagtttggggagtttagccctaattatttcagtaagggaattactccgtaacgaatttcaaaacataggaagtttgactgcaaattatttttgtaaaaataacgaataaaaaattaaccatttgtatttatgtaattctttttttttttttattcatttttaaatatatatattaatctcaagaggacaaaaaaggtgg

SEQ ID NO: 380069 - DNA, 5178 bp, Cannabis indica
ggggtgttcaacctcccccaaacttattgactccagctaactttttcttgattcggccacaacaaacgataacccttaacaatatgataaggttggagagaggacacctgacctgcaatgagctcttaaaactgatctttcagcattacaagcctcctccaataccaacttccttggttaggagacttgtagtgccaccaatttttatctcgaatatacacacaatggatccatttcatccaaagactatcttccttatttgaaatggtccaaatgtattttcccatagtcgccttgtttcattcatgcacctttctgaaactaagtcctccagtggctttaggataacataacttatcccaaacaatcatgctaggaccagctgctatagcctgcccttttcacaggaagtttctacaaataatttcaatatcagtcacaattttttaggtaatatcattacctgtgacgagtaggcatggattgtcaatagcactgaatgcaaaaatattatgctatgaaaactgttttttgcactctctatagtttaatgataagtgtgatcttaagtgagattatttaatttgtacttaataatttgatataatcttattatctcatcacaataatattgtaatatcattctaataaaattagaccactaatttttcacttacaaattgtattatatataatatttatttaattatttatataattaattaaaactctaggaaagtgagagaaataaagagggttcatgtattaaaaaaaatttattggtatatttgataaaatagataaaataatatatttgatattttcaaaattacttgtttatttgcatttaatatttttcaagtttctattttcttagtgtgaaattttgttcagaccaaattatggtttaattggtgaataaatatgtgatttctttatttagattatttggtatttacttttatatttttaaagaaagtcttaatatttatttattcattgttatttgatttcttagtcaacaaaccttgtacaagttgtagtgataatgtttatcatgttttcttatttatataaggtaagtgattgaaaatttgtctaggctcaatgtatttatttgaatggactgactgtctattgaatagactctgactttcttttttgcgaagattttctatttgttggctgatggtttcttgtttctttttccatgacctagagagtttctaaagtgtataaaaacatccttaggtcgttggctttcaacatctctcttggtgcatcattttctaaaccacttttcaaatttagagagagtttttttattgtgtaaagaacttgagtccaacaagctcttagtattttgttattgtgttattctacattgtttcttgttgaaattgtgcaggttggacaatttggatatcgtttatcaagcttcaggagatgactttctcatgagtcacttttcgagaggaaaagtgcaagtgagtcactcttcgagaggaaatgtgcaagtgctacaattttaagggagttcaaggtgtcagcacttcaaaaatttgattcgaatgatagattacaacagttgcagaatatttaaaagtgtagtctttatttgtataagtaaatttggttttgtaatcacttgagattcttctaataaatttcattttctgggtgtaatcccgtggactaatagcaattcaaaagaattttcgataccacgtacaatcttgtgtgctctttatttcatgttcattttaagtttctattaacttttatttaaacctataaatgttttgttcaaataattcctatggttatttaaacatcacgataatagtatagtatttaattaattaatttgataatcataaaaataaaatttcaattggtatcaaagcgattcactaaactcttagtgagatcttgtagttattatctgtttagtcatgtttaggtggaatatctatctttgcagaaggtagttcagtatctcgtcctccacctcttaatgactcaaactttccttactggaaagtgagtatgagcgcctttattaaagcacaggatgaaaaggcatgaaatgtaattttttctagatggtctccttctttataggaaaatgagatggtagcacaaaggtaaaatctaaacttttgtagaatatagaagaagaaaaattatctagttataacaataaagctcttcatgctattttcaatggtgttggagaaaattttattaaactagtttctacttacatttaagcgaaagatgcttggactattcttcaaactcggttcaaaggagatgtcaaaagatctaaatttattatgttacaacctacatttgatgaccaaagaatgtctgattctaaaatactatctgagttttatgagagattatctaacatttctaatgagtatttttctcttggtgaaaaacctgatgattcagttcttgctagaaaaattatttgagttctttctgacaggttaaatgttaagttgagtgctatggaagaggcaaaggatttcagctccatgaaaggagaagaattgatgggatctctccatacttttgaattgaatcaaaaattcttcctaagttacttaggctttttccaaccaagtttgacttttcttgagttgtaggtaacttgaattgttgaacataagatggctaggataaagagaaagagaaggttacctgatgaatatgatccccatgttgctcagtttattagagctaagctgatagtgcctaagtctaagaacttggacaaggcgcatggaggaatagtgataacagctaagcttctcaaagttaccattgagagtgatgattcgagagatcaagcctttaagcttaggcctttcgtgtttagtaccattatcgagcttcaagctcaaaccatttgagattactactatctcccagaaactatcgtttggaagcctcgacatggtgctcccaaaggttcccagaatacttgctgtagtgcttggttaagattctatatgaatgcgggtgcttacttgcccttgcattcatggtttatatccatagctgactttttcggtgtcttcccttaccaaataaatcccaatggctataggattctacccaccttcttcatattttactgccttaggaactagcctatcccaactcctcgtgagataaactttctctacaacttgaaaaggagtccaacttgtagagatcaaggcttctaccacttccatcagttcagtccattcatagaacacataacgaagagtaaatatggtctttactactaggagtatttctatactcttgttcttctgttgagacacattactttccaaaaagttgtccttttcaaaagacttgcttctcttattgatatgaagaggagagttaatgccatattgcttgatattgatttgtatgagagagattgttgaaccctctttaatactgaaaatctttggaaggttaggttgattgtgtcatgctagagagtgaattctaatttagccttctctgatgaatcttggaccataccacttgagcaaagagatgaagatgctcagagtgctactgttattctgtctcaaactatgacgaaaaaagtgtcttctgtttgaaatgatacaaaatatttagggagaatatctatgttcttaggctaggatggcagagaagttacctttgctaggactgatctagagaaggatagggaatcagcaagttgctgacactccatgttgtgttcttaacttgttcacttgtttctttttgttgtactaacctctggtctttactctctgcagataatatgaggttctttgttgccatagcatcttatttgaacgtgaagagaaagatttggacgtcgaaaaaagcaaagcctccggtaagggaagtggttcaaggcatcccttttgcctctgctgctttgaagaagaaggtcaagaagagaagtagaactattgatgtttctcctcctgcccatgactatggtagggagaagtcaaacattgttggtgtagatgagaagacttcgattgacctctctctggataattcagaacatgctgctccaaactcgagctcagacttagtggagcaattgcgtgagcaaggctcttggcttcttgggaacagtgaaaccctaattggtgctagggctgagaacatttcgttgcagtggttggttagcaccaagcctcctcatattatttctcaaagatgcttcaccgacatctttggagtaagtactttgtcttgtttcttctgacataactttctttttatcatattatcacctgacattatttcttttgtgtttaggcttgtgttggttatgcttacaccatggataatgaacacaagaaggtggtggagcttattgagaagcttggagtttctaaggaccaggttgttgctgatgaaggccaagtgactaccttgaaggaaaacgctgcttctcttgagagtgagatgagcaagctttaagaagtggttaataaggccaaaactcgagaaagtactttgaagaaaagcttggcgatttcttgaaagaaagcttttgatcttaaggagtcttctcgtgatgctttgaagaagtaggttgttgtggctgagggactaggtcaaggtcttggagaagaaagtgactactctcgaagatcaggctttgcttgatgtcacctactataatggcttatgctttaatgtcattgacacaacatgggttgacaacatgcgttagacttcatcgagcggtgtgagaagcattttgatgcagaaccctttgaagaaattgacttcactataatagtggtgaaccggctgccatagaaactttaagagttgatggatacaaccttgagtgtcctcacatccctccttctgttggtgaggtgccttatggggagaatgaaggtagggaggaaactcttgttgatgtagcaggcctccaggaccgtctttgagtccattcttttttttagcatttagctttagtgtgctagttggtcattctcgggcggcctttcgatgtggataagccgtagtaaaatgtgattagaattttattttaattaaattagaaattatttccaacttaataaaacttcaattccaatacttatttttttttattttactttatctattacc

SEQ ID NO: 380070 - DNA, 3753 bp, Cannabis indica
cgtttttcgttcagatatgttatcaataagatcactataaataaatttacggctaaacactcttatgtttcaatgttcatacatttaactcctttattggtggcaatactcctttaatttcacatttgtttgcatatttaaagcatatgttaaatttgactgttaaatgtcaaaaaggactgcaaccgtctaaatttaacggttataatatttaaataacaaaaattagttggaccaataaaaatatgtaacgtgtacacaagtctgcacagtgacagttcctgttggcatttaatgatcaaatttaacggacgtcttaaatttacaaacaaaaatgaagttaagtgtataaaaattgaaacatgaaagagtttggtcgtaaattactatataatactcaagttataagggttactaccttcattgcttttgttaaaactccttcctttccacagacagatttccaaagttgacagtccaaagattttttcctattgaaatgttcccattgcaccttcacagcttcaaaagcggcttgaagcaaaagcctatcgtgggatatagatgtcttcctccccgcttgacgataaatttctacagcattctgcccgtgaggcaaccaatcaaatggagcgaaatttgctgtctcggaacagttaaaaccgcaatcaaatcccgaatgatatgtccctggaaaggtgagaatgaattccccgggattctgaacgcaacggaagacggggatacctgatgaattcaatgcaaagggagatagttgcttgacctgtatcaaagttcaaattaatggctcttagcaaacttgtatgagattagaacattagatgattcgtgctagcataaccataataactcaccagtctatcacacaactcgtgctcggatatgtcatcaaagaaatttgctaaagcttcctgaaacttacagctgtattttccagggatgccataccatactcttgaggcaccggtgtgcatataattcaaggagtacaagtggtgctcttcaactctctgtacacgaaggttgaaaggaaaataaaaccgaggttatacaatcatacactccagacagagatgtataataacctaataaaaaaccattaaaacattaggatgctatatagaaggcttgaatcttacccaattaagagttgaaaagcacattcctatccgaacacgaggaattgaaatgttggaagtattagtgttttcgaaagaaagaagtgaccgaggtaatctcgctacattgtttaagttccatcctgaatctgcaatttcaggaatactagatgtttctgaaggattggatactcctggaaatccactgccgaagaccctagtcgcagaattgtcagaacaaagtacctttggacaatgtagaaagacaacaatataaggctaccggataaaacagaagaaaaagctgagggaacttgagatacattaggaacatacctcaatttcttcagttggatcttcaacaatgcgtttatattcactttcgatattctccaatgagggctcccattgtgctttagacacattagaacaatcatttgaatctgtatcttcactcttgcagaaatattgacctttaaaatcatctgcatatctaataaattctttaacagtaagttctggaccagctacagattctaagtgttcattatccgaatccccagcttcacttcttgatattcttctcctcttaatcttcatatcacgagcaaaatcttctgtttttctctctaattttgagtatggagctggaagcccatcaatccgttgaacacgagtaagaaatttattattttcccactcgttattttccttaaataaacatggaggtttccacgatggaggaggaacaatacgacaaatcccgtatggctctgcatcttgacgtatcttttcaatgtactcaaaggtgtcctcgaattcctgcaggagaactccaaagtccaaaccgaagatatttcaaatatttatacatagcacaaataaaaactcaaacttaaacaaatttcaatttccatgacaagagaaaatgccattatcagagagtttaaaggaccttctcagttgggtgaaatacagcggcctcttcaaaaatgtcgttttcagtttctgcatcagggtgccaccttgcttttacctacttgaagatttcaacaccctttatatacatcaagcaaaagataaaagcactggtgtgatggtgctctaacaagatcaagatcaacttggtcggaatgtaaagaaataaacaaagaaatcaaccttgacacaattgctacactctggacacccgcgaataacacctttagggaggcaagtttgtgatgagaaatcctgaaggaaaaaaaaaacaattaaaagtgtacaagtgaaaattagcatgaagccaaacacaaacatagattaggtaataagtactctcaatccatggccctgttcggtttagcttctataagcattttttcagcttttagaattaaaacagtccttcatcttcaaacagtgtttggataaaacataaaaagtcctttttggagaagcttagcaactacacatgtgtctcctactgacttaaattatagtactcatttttctagctaagctaaatccaaggtatcttttcaaaacatatgaccagatattcaacacaatgtaatttccatgacccaccataaacacctctctaaacacattcctcccaaactaatcatgaattaataactttccaacacaaaatcatatgataaaaaaacactagtaaggaattaacctcatcaagcttatcaatgtctgattcctttgacttgtcatttgtttcatcaaagagtatccagggtctaactctcaaagcttctttcagcaaatcattgcctgataaaccaaacatagtgtctttttgtagtgagtcttcttttgattcatccaagcagtccttggaatgatcagattcccataccttcttcagattaaaagatgtaaaaacctcaaatctaggtggaacagaaaaatttgccatagtaaccttccttctcggtttagatgccacacattttttccccattgtgtctgtaacaatacaatgtaggtaaaaacaatcaacaatccattaaagggtatcatctcatattaatagcagagcagaaattaatgagtacaatttcaaattgattaacccaactgcaaattttaattctctctatcaaaaatcatatttttaagaaccaacaactccacaataatgctatacaacaagattctaatctcacaattaaactttgttcgttaacctaatatacaaattaatcgaaatatgcatgaagaataccaaaaaaaaacagataagagggaagagtacagaaccggcgaatgggtggccagaggatccaaacaggagcggcggcagagagaggaaattgagaaatttagggttttttctatgaaatttgggaaagaaaaagaaaatcttttgaatctctttttggggttttaacaagtgagaaagtgaatgaagaacaagaaagagaagaaagtacaaaaataaaattgtactttaaggcaaaagccctaaatttattctcacttttgcaattagatcctccaatattaaattttagcatttgaatcccatctcttttaaacaatattcttttttttttaaacatcttttaaacaatattagtgccttagcaaatgagaaccacttatatcggattta

SEQ ID NO: 380071 - DNA, 1453 bp, Cannabis indica
tttttcttttattttctttatggcatattcattttattggattaattcttagtatatagtggctctaatgtttatgaaatcttgtgttctaattaggggtgttaatgtgacaaaaggaaagaaaaaaatgattatattccttaggtgaattagtacacaatacatgcgtcaaataactctttgaataaaggaaacacaattactagacacatgtcctatcaagaaaagatgaaacaccataaaattaggacaaagcaaaataactacaaaacttaaattaattactatttaacatctcccctcaaactcatgggattggaagcactatgagtttgtttcgtaactcctaaaatcgagatgccacaagaggtttcgtcaagaaatcaacaacttggttcttggagggaatgaaggataaagagagagtgtcacagtttactcgttcttggacgaggtgatagtcaatctcaaatgtttagtgcatgcatgaagaactaggtttgaagccaagtaaatggtgctcatgttgtcgcaatggagagttggaggagcaaaaagagaaaagccaagttccctaaggagacaaagagacaggatactttagaggttcagttttccatggctcgatatttagattcggtactagaatgagatatcactttttgtttggaggaggactaagagataaggttgagtactaagaaaacataataagcattagtgctacgacgatcatcaagacatgaagcccaattgacatcggtgaagcattggagaagaagattgggatcaggttaaagaagagtaccaagatgagcagtacctttgaggtaccaaagaatagattggccgcctgatgatgaaccgttgtaagggcatgaagaaattgacacagcttgttgacagttaatgcaatgtcaggatcaatcagggtacaatattgtaaggcccgaacgagactgcagtatttagtagcattttcaagaggatctccatcataaagcgatagtggggtgagagatattggggtgttgataggtttcgagtccaaaagtgcagtcttggtgggaaaatcacggatatatttggtttgagaaagatggagacccaaagaggaccaattaacttggtgttgggctttataccctaaataaaactctatttcaatgtaatccctatcatttaaatatcaataaagagacagaagtattttcataacttatttaatgtgtcatttggttcatgttatcatttatatgtttatttgatttataaattcatcctaaacccttatcacattaatattcttgtttattgtgtcgtcagcacagtagaaagtaattaagattgtgtgattaaatttatattcttagatttatcaatacacagggtttaactgatatgataatctacaacatagtttacttgcaccttggataagttctatgtcctt

SEQ ID NO: 380072 - DNA, 5642 bp, Cannabis indica
aaggtttcatagttaaaaattagtgttctataatatattaaaccaatctaaatttaagtgtaataactcaacttaattaaatttatttagactttattaaatatttattacaattttttttctttaaaatgcttaaattaactgatgtgtggcaatgagattggtttaatatattatagaacagtatcttttaatagaagatcttgattccatactaagtatcatcaatggaagcgtacttgaatcccacatcgagtgttttattaaatttttaatcaaattaaccattaaaattaaagaaataaattaaataaaaaattaagttactgtgacaaggattgaatactatgtctattttatttaaaataattaattctataaaattcaaaagttacttattcttatggtgaaatttttagtgcgttactcacgcgcgcatagtaagagaatcattacaaaaacaaattatgtcatgagaatcatcaaaaatagaaattaagttatgttgagaataacatagattacatttttgtttgaaatttgatttaaaataacattttttagtaacttaatctgaattcacttatctaatagaaataatagatattagatagcaatgccttaatgatagaaatgattctctatttaattttgatataggaatgtcttaatgatataagaatgtctttctttaaattttgttgaatctgattgtttagcagttgtaattgcgttttctaaacactcttatttcctcaataaacttaattccttaattggtagaggttttagctagtttgatgtccagtttcctaggagtatccctaatccatgttcgttggacagccaatggggttgcacatggattagcttgatatgctcttcgagtggataaagaactagtagggtttgatgagattccttcattattggagtttcttaaaatttaaagtttatatgacattataatttctttttccaataaagtgctaacaaaaaaaaaaaaataaaaaaaaaaaaataaaaaataaacaacctccaataatgacaatcagaacaagtgactaaaaggttttttttattattactttttatgttggataaaatattataacccttccctcaccaatcacaattaaataaaagaacatttagtcggtcaataaataaagagactgaaatttagaaaaacatttatatacttgggtgggcaccagcctatacttgatcccgaaacgttacgaagcatatgcaaattttcccttatgagtagtcgtatatatacgtgtatggaatgttacatacatcggttggtattggccaaccgttgtgtcacttccaatagtcaccatgcacaatacttatagagtcggagaattgtcagatatagggttcgtaaataaacaaatattcaaattgaaatataatggaaggacacaagaatagtgatggacatgtgtgcaatctggtctcggtggtgatgataatggtggtagcggctttgctgctatttcttccactgggaatgggagcagtgcagccaccttctgttttcactctccttatctttcccattgtcttgctcgttgttttcatcttcctctctcggtccacttccagttctactggctctgattgaagaatgaagattattatataatatatataatattacgtgtgaatgtgtttcaactgttcttttgtttagtgcatgcaatccattatttatatatatgtaataagcatgcacatgttctcttaattcacatttttatttaaataaatatagaaagagattatattctcattcattacgttcttttatatattttatgctataagttgatgatttcttttgtcttccctcaaaagccaaataaataaattgaagatcgttatagccacaaatttaggttttaaatagaccaaaaaaaaactaacaggttaattgaatcgtttggtgcttaatgtgtattacaatatatatttagagttcgtctaaattgtcacccccatacaataatagtaaaatttgatcgtcaattacttgcctgcaaacaaaatatgctagaataattcgaattcgagacagagtatttgatgcaaacttctatgttcaatacaagacaaaattattggtagttaaaatcaaatataacatggcaaaacaccattaaataaactacaaactacgggaataggagatttaattgtttgtggataattttccccatcaacctaccatcaagtttgtggcgaaaattgatggagaagatctcagactacttagcactacaaaaaggttctaaccggtgtaaagtgactctccagactccttttcacatttgacttcatcctcattgtttggggtactattgctgtttcctgaatttgcagctccatttttgtaaagtgattccaagcttcggaaatatggacaggtcttaccattggcagaacgcttcttcccactaacataaggtttcttgaaatatttgttcatgttgtcccatttctctttacacttttttgctgttctgttatagcccatactacacataccaactgaaatctcctcccaaatgcatcctttggattctgtagtttgaaacttgcgttctaaaccagttcgaagagctataagggcttctatttccgcttctggccatcttttattctccgtattgcatttggtatctgcttgagcatcagtactactacctaccctattttcttccatgaatggttgagatactggttcagggatttgaatgtcttcacccaacaagttctggagaaacgaaatgagagctaagcttcgagatgtttcctgggttcttaccaactcatcccttttcatcctttccacctctatttgtttccaagcttcttctctcaatattctctcgctctccatcttctttatcatgtctattagctgattgtgcatctcttcttgtttctccataactttcatcgccatattttcaagaaaatgctcaatattccttttggattttcttctcttctgatcaacaactcctttacagttttctactgaataattaacttcatcatcagaagaagaactgagaacagtgaagattctgttagaacagtatcattcattcattgccatggaagatttttaacattctaataattgcttatagacataaagcacctcaaataaccagctcatttgagaacaaaattgcattaacaaacaaagaccagagatgcaccaaaatatcactacggcacatgcactataagagtgcttatataacaacgtgtcccaacctcaactgcaaacaaggaattagaaaaaatggaaaaattatacaaaacccattaaaagaaaagaactgaaccaaaatatcactattcatgttcttaaactagcaacatgtaaactaactaacaattattggaaaacatcttacaagcattgatttggcatagtgataacacataaacatggtgtacaaaacgaagctaactaccaaaatgtttcactatactattccaagaaaacaatctaaacaagagggcattgttatttattgatttaaattattagtggattggaagaaactagctagctcaacttggttatgttggaccacaatactgctaagaagcaatatcaggggcccattgtgtgaagtgctctgtccagaaacagcacccttttgttttactctgaaaagaaatttaaagataaatactcctcaaaccacaatactgcaaagaagcaatatcaggggacctttgtatgttgtactaaacaacacaaacaaatattctaagaaaaaaaagctgtggtgtgtgtagaccaaacagaaaagtgtgggtttttattttttaaaaagttacccttgacagggaaaaacaatggagaaagactcaaatatacatacaatgccacaatattatatcattcttctaacccttaaaagaaataataggaataataaaaatgttggatataccaaactcacctagactcgtcctccactacacgttcgacaccattcatctcccaattttccccaaacgaacccaacccgacctgaaacgggttatccaccgcaacggagacgttcccaccgttaccagcgacatctctctgggtttcaaatttgacggcgcagtcaaactctccgtcaaggggttccaagtggtcgcctgaaacccccttggctagggtttctgcgggcccaaccttgccccgaacatcagaaaccggggaccgggcgtggcaccgaatagggcggagtttctggggaggtgaaatcggacggtgagtgatgatgtccggagaatgaatcagagtcttgggatgggcgtaaatgaggtcctcagtcggctccgggaaaggagcaataagctgaggaaagtcgtcagagttgggtattagccggtcgccggccaaagcctccatagtaatagtgccttctgtgtttgtaaaatatttttgatttgtggtaaagaaataaaaaaaaaagtaaaaataaaattagggtgtgaggaagtgaagtgaacggtgatgttgttggtttgattgaggaaggtggtgtgggtgaaataatgattttagtaactaataatggggtaaaatgaatttacacacattttaatttgatttgcatttcttttgtttatgttatgggtatgggcctacaagcactgaggcccaattaccccggcctactcaaaattggatccttaatttagaattgtccagtgtccacaactcaagcctctcatacagaaaattgattttaatcgaggaaattacaattgtgtatcccctttactttatttgttttaatttttacttttacttttatatcctttaaaatatactttgtagatgatattcccattaaactctttaggttaatgtaaattatataacccactcataaaagtagatatattttaataaaatataatatgagagtatttttaaataattgatacaaaaaaaggtatttttttaacttatctcattttaatcctactattacaaaggtgatgtttttcacacccccactaaattttaattgctaaaaggttaggtctgatgtaacaagttttaaaatatgcttctagctaagtgattcagcagtacatggaggaggtgtttaaataatgtggataggtatttttagactgattagttaaacattagtaggctagttctggagtgcacttgtatcaggcttgaatgtatcaagacttatatattttgcccctttttggggaaaatgtttattttatgttttatggtgttctttcactagccaaagggttccctttggctagttttttccttttattctttcttagctagcattgttgattgtatcgttttggggttgcgtctcttgtggtagtttgtctttgacttcgactcataattttcattgtggtgttttctggtttgttatgtcttcaggaagtatctctgttttacaagcgcagaccttggcacttttgtttgggcttaattgggctctttcttgcgaaatcgaaattaaagaggttttttccgattcgctgtctctagtcacagctataaacaaaggaaaggtttttttcaacgagctaggtgtgctatttgaggatgtcat

SEQ ID NO: 380073 - DNA, 1689 bp, Cannabis indica
tatatatagctttcttaataatttgttaaatcaagttggattttttgtttttgttttttttaaaaggctaaattaagtggacttataactaatgaagtttcttgcatttagttataagttacaattaataaattataaaaagattaatgctaaagaactagtaatttttagtatatcttcttacatatttttattagtgcttatcgaattttatatcaattacttaaatatttataagaaatattattaactaattataaagtatcactctaaataatatactagtgtctaaaaataacactctcacaaaagaaaaataaagcataaattataaaaagaggatttttttttttttgctagaaataaaaacagaaaattgatggttttttttttttaacaatctttcatatacaatatatttattcctttagatagagaggtgaacaatgtgccaaagcatggtctcggatcccaagaaatagttagctatatataatgccaactaagctcattaatgaatctgctatgaaataacataaccaagatcagctctctctctctctctctctctctctctcagctgtcttccaattaagatagtacatgctaattcattttatttatttgtcttgtcttccaattgcaaatgaatttcatgtatgttaattgacaaatgctaagacagtttctagttacatattattattattattataattattattattattagtagtagtataattaagtgttaaattttatataatttaagataataatttttaaaaattatcactaattaatcataaaatagtactactaatacttaataagaatactcatttcaataactattatttaattgcttttgtctgtattttgcttcactatgggttacatatacatgactcacagcttaccacattcataaacagtacttattgtctaatccaccaaataacattaatgaaatgcactatgtattgtcttcaagtacaagttgtacgatgggattttcccatatgtgacaaacaaccctctattttatataattaattgctatagttcgtactaatactgtttttccttttctgtcctattttgtataatttttgcactaaagatcgatgcatggatataattatttatttattttcgtgcaaaagattttagggcatcattctcattcaaaaattgctcgaattaaaatgcatgttctttaaaaaaaaattattcaaatattatacctatattttcacttttcactctgatctcaattttctttaattgtttacatcttcggttgtgcaagggcgagagcccttcaataaagcctctccttcaactagttttttgaaaattgaaaaataacgttgaatatttcaatcagttatttatatatgctaattagtatttttgtctacatgtatcaactcatacattttgaggctcttaaaaatcttcttaaactattgaaattgttgtatttaaagacttttatccaattttaataaggtaggtctaatacagatgaaagttcagaacacatgatttggtacatgtaaaagtttgaagaacatgattacatagatgtcaaagtctggagagcatgatttagtaagggtgttcgcagtgcgcgtggagcaggttgtgaccttattttcaaaccaaactgcatatgcagttttt

SEQ ID NO: 380074 - DNA, 4838 bp, Cannabis indica
gtactttttttattgagtaattttttatgtttagagataaattgtatacggtttgtttcactttagcaattaaaaataaatgagggaataagtaaatatatttagagatattttaaattgttatatcactacttttatatatttatatttagtaatataaagatctaatcataacgaaaaaaaaatcgaaaacttctaactgtaattttgttacataaatatagtttttaactttttataggaaaagaaagtatattaatattgttattaacttgtattttaaaaaaggaaaacatatatcgattttataggaaaacatcaaaaaaatattaaaatatataatctatttttgaaaattttaattatgtttcaaaatatatcgatatcccttttaaaacatataaatccatatattattataatttaaatatcttttttcaaatatcccttttaaacatatattttttattctaaaaaaactcaaggtagttagtgacttatataaatatcacaagacgttattaggttgataataaaagttagaagattgctatatgaaaactctcaattctcaatgacagagtaagaatcggaaaataattagtagtgcgatgacttcttcgatatcaattcttaatgatgatcttctactcgagatatttcttagactctcagattttacatgtatagtagagtgtgcacttgtttgtaagcgttggtttttggctattgttgattctaaattaaattttagtgtcaaattcaatcactttcaccgtcaaaaaagaattaccaactccttcgagtcaactcttccttttactctactatatagagaatatggtattcataatatatattcatgggagttttactccgaaagatcaaagatttttgactatggaaagggaccattattagggtttttgccttggaaggatgcttacaagtgttatttttatatatggtcgtcgtttgaagatttgttgcttgtccaacgatctcctacacgtgtatacatttgtaatcctttaacaaggcaatctgttgcaattcccgaatctccatatagccttcatagatattacaaatatgcattagtagtcttaagagattattatgatagtaataaccttataatcaagtacaaagtggtgaaaatcagtttggatgtgaaggatttaatacacttctcatcatcaaccctacttcatttatctattttttgttccgagactagacaatggaatcattcaagtattaaattcacaatgcctatctctttatggaatgaagagattgtcattgttggaagtaatggaattgtatactggccatgcggttactttaaacttgacgggattgttgcattgaatccttgttcacaaagatgtcgtttgattggtttccctaacgactataacatggcgattagggcacatgttggagtggttcgggggaggctacgccttgtgcaattctatcgaaactcgaggaagtttgtttacaaggcatgggaattagtagatgaaggtgatgataataagatgtatagttggaatttagttcatgatcataatcaaataatgaagatgaatctaatatgtgatcaaccaacgagcttaaatcaacttactgtgtttgctctccatccggatgaccaaaatgtgttcttccttaattatacacaaactgaaatttatgaatgtcgaatacttggccaaaatcatagtcatgttaaatatctttgtccttttccacaaggatcacataacaataatacacgagttagagttatgtctcttctgcatccttggtggcctacacaaatccctcactaaaaataaatttatatttctgttatttttgtcattatgatgattttatctaaacaaagttagttgacatttttgcttgggaatttgtttatttcacaagaaaagattttttatcctatcattctttatttttctctttagtttgttgcttaatattttcatctgattgtgaaccaagaatcaaagtaatatacaaaaaaagataaattacagaaaataaacatatagccaatcaccatagtagttgattaatctttgtatttgctgaaccaacttattcacataactcattatcatattattaagccacagcgcactaagataattcatatagatgaatttctccctctttctatatatatggccttgaagaatatatgtcgttttttattaaaaataataattattattgtcgttttggttcaatttaacttagcaattcaatataactcagagaataagaatctaaatcttgcctcatttaacattcaaagacacaaaaaataatcttcatcacaggtttgttctccattaggggtgggttagggtcagacacgataacacgacttgaaatccgcacaaagttaacgagtttgggtttaccttaaataggtttaggtcgtgtttgagttgatacgactaatacgaaacttacccattaatgacctatttaaagttattttagtactttaacaggtcaaaaatgagtcataaacgtgttaaaaatgtcataaatgtattaaacatgtcactaatatattagtaggttgacatgtttggacaaaatctatttataaacaagttatacgagtcgtatcgtgttaacacgtttataaacaaatcatatttgtgtttcattttctgacacgattattaaataaatcatgtttgagtcaaatatatacttgcaggaccgatcctaaagtatatggggcttaaggcaaaatcaaattttggagcctcaatatatataatttaactattataaaaataatagttctgtgtaaaactcttaagagctccaaggttcaactcctcataactacacattaaatattttaaaatagaggttgggaattgaccccatgacctcttagattaaagtaagaccttttaccactacaccaaacaatttttattactttttttttccttatttaatattttatctatatattaatattttttttcacaatttcagggccctgagcgttcgggggcccaagacgcacgtctagcctgcctaccctcaagatcggccctgcacacctgtaatacatgtgtctcgacattacacgaacacgaccaacgaaaacgaattgccaccctagagtgggtcccccaccaagcccatccccataaaaaaatatgcatttctattcatcagccatctgattcaatctaattattcaaatttaaggtttccaatcttttatagcaggaatagaataaattatttagtgtaattaaattggtttagatgttacccactaatctcatttttgatgctatttatttaatatatgaatttgtagtacaataaaaatttgctaaactattgttaaacttaagcatagggaagggacatggtaccatactataaaccctacaatacaaagggttggtgacttggtgtaacgagaaaaagtcctatttaaagtaaagacaagcccgagtgttgaaaaccctaatgctaccaagccacctttcatttttcatttcttttactttcttacatatactctcactcttttcatttctatctgataaaccctagcttcttccatacccactcctactcaaccctctccttcgccgtcaaacgtattttttcatgtgagtttctaccgattctctatcttcaattatcttgttcatactgtattgttctttcattgattgattctcttttgctttgttttcaacagtaagtactagattcagagcttcgtaacgatgtcggatgatgaaagagaggagaaggagctcgatctctcttctcctgaggtcgtcaccaagtacaagggcgcagctgagattgttaatagtaagattctatctctttatctgtttttctcactcttttgtgaatttttctatgtgtgtatgctgttcgaggagctaatttaagaaataatttcttgatgtggattttttttatttagttgatttgtgaatacatttttaacttgatattgggaaaattttgtagaggctctgcagctagtgttatccgaatgcaagccgaaagctaagattgtggatctttgcgagaaaggagattcatatattagagagtaagtttacattgttcatggtttgagtgttgattttatctgtaatatttttcagctattgaatgaggagattaacggggtcttaatttttttatctatttataggcagactggaaacatgtacaaaaatgctaagaagaagattgagaagggagttgcatttccaacttgtatctctgtgaacaatactgtttgccatttctcacctcttgcaagtgatgagtcagtgttggaagatggtgatatcttgaagatgtaaggttttcacccaagacttatatttgttattcaaatatttaaaatcaaacatttatttgtgaagtggacattagctatagtagaaggtaacaattaaatattataacctgttgcagtgatgtgggatgccatataagatgttttctactaaaaatgatggggtttctactgttgcagtgatatgggttgccatatagatggattcattgctgtggtcgcacatacccatgttcttcacgaaggtccagtaacaggaagagcagctgatgttatcgcggctgccaacacagctgcagagtagccttgaggcttgtaaggccaggaaagaatgtaagtttctgtttacatttttttttgaatctggttctactttaatagtgttacttcccagtaatattgagattgtaatgtagtgttttttttttgggtgttgatcgtcactata

SEQ ID NO: 380075 - DNA, 617 bp, Cannabis indica
aaaaaaaaaattgataaaattgagttcgagatctattttatactattttgaaaaaaatattagtgatttttagaaattattttaagcttatatacactctaccatataagaaatttttaattataatttgtacctaaaatacatcatatactacatcatctgtagatactaatactatgtataatttacatatactatcgatgtaagtgtgtatatatgtaggagcaacacacatgcacgtactaccctgtacatcttcttattttgtaacaaaaataatttttaaaatataaaataaaatagatagatgtatagcaaattagcaatatatattagcatataactcaactcagcatttaattaatacgaaattatttacattgattttatatttctttttaaaaatatatattgtaataatttgttatgtcttttattccccacacaattatgaattaaatgtttgatattgtagctagtggagaacaacacctactctaaattgtgcaaggaaatatctgagaaaagccatcaccttaggtgtgtttatgtgtataatttacatacctatgtagatataaattcttatttttttatcctttcaatttttttttttt

SEQ ID NO: 380076 - DNA, 2406 bp, Cannabis indica
aggaggttaggcagtctaaggagtctccttctaatttgaagagcagtcaccggcagcaagattgacctgtcgatgtagctgtaggcaacttcttttgctttgttcattgtaccagagaagttgcttgaccttgtctttagtggcctttactaggtgccagtaggaggggaagttgacctcagggccagatcaacaattactagctgattggccagaggtgggcctgaagaaggtggaggaagagaggtctgagtcgcgtccgaggtagcctttgtccgggcaaccttggtttcagcatgcccaccaaaggggttgctcgttgttcgcttcatcaagtccttgatcctggaagtcatgtctgcaaaaaaaaaaacaaataacaaggtcagaatacaagtaataaatacaaaatgctagcaaaggtaaaagaattactaccatcagtatcctcgggataatctacccaaggagtatcacccaaaggtctttcgtcctcagataaagactcactagagttgtccttagtagcaagagcattgcctttctctattggcacaggctgggtaggtctcgtaggctcctgtctctcaagcctcatcaaaaccagggcatcaccaataatgcccccacgggcaagacgctgccaaagagcacaatccctcctactctctattcaagccaccttagccaaagaggcctcttcaacagactttctcttctccttctcagcagcaggcctctttcccttgcccttctccttctcaataggagtattgcttggatccttaggaggattggccagagaagcaacaccctcaccagaagggtacaagccatactttttgaagctctcctcactggccaaattacaaatgatttgtcgagaagttgggagagacaagatatgattggccctatcccttaattttaatgtagggatcaattgactataggttgtgaccagataaaagaattagtggacaccttttatgtcgtacgccataaagtagatattggcgtagcctcgaatctttacatgggtgcgtcattagtgtcgcccagccactgatagcccttctggctaaagcagaagtatccagtcctgttttggcctggactgtattttagctcaaaatagtaattaacctagaaaggcaagggttgcagccaacctagctcaacatattggatgaagagtactgcaaggtactttatccccttcggtgtaatctcagtcggacacaacctaaaaagtttgttatgtccttaaagtatgggtgcaagggaagtattgccccttactctgcatgggggccagaccatgctatccaatttggatggggatggtgagccaagtggtcttgagcaggcctaatgcatcggacctggccaacaagtccactatcaatgatgccctcaagcctggaagtcgatagtgtggagcgaggagatacccatctatctccttcccccatttataaaatccatggcacagaggcctcatcctcaatgtgatcaaccccgaccttaaaaggttgacccatactatttataggctctctagccttgttataagagcccaagagttcccctggaccacactgcactccctaggatgtctctattcgggtaacgctccaacttactacttggcactaccttggttactatatcagaatgattgtctttagttggaacttttgcaatcttcacaacttttttctccacaacctcttgtatgagatgaagcttgatatcaatgtgcttagtacgttcctggtccacacaattcttggttaattgaactgcagtgattatcacaatgaatagaaataaccttttgattgagctttatctcctccattaacccatttaaccacagtgcttccttgatcgctttcgtcaaggccatatatttagcttcagttgtcagtagtgccacaaccttctgaaaatttgctttccaactaataattgttccaaacatagtaaacacatatctagtcaaagacttctggatatcaaatacaccctacataatcagagtacacataaccattgataacatccaagtcttacttctatttattcatgccaaatatcagtcccttctcaatagttccttccaaataacgtagaatccatttcaaggcttcccaatgcttctttttgggatttcccatgaatctacttaccatgctcagtgcatacgctatgtctggtcttgtacataccatgacatacatcaaggagccaaagacactagcatatagaactcttgatgtaacgccctaaataattaggcacgctacccaaaaatcttatgaaaccctaatcccctaatcgggattactaattaaaatagcgcagaatttaaacttttatattaatcagaatgaaaataaa

SEQ ID NO: 380077 - DNA, 3534 bp, Cannabis indica
attgggcaccagtggtgcctagcacctttttataaggtggtgcttcacggttagttagcgatattttctaaaagttattttcttaaattatatgacacgcgacacttaattacatcaataacggtatgacatcaaagagagtgctaagcactaatgatgtcctttagcaattgttagaagttaactagccatgaaaactttagcaatcctaaaaatacttaatttttaaggggttaggttagaaacaaacataaatgtgagttataggttggagatatttgaatcaaataagtcaactaaatactaaattatttcggaaaagaaaaagtaaactcttttacttttaatatatagactgctatatgatatatcctatttgcctaatcctaaaaattgggaaagtatctaactacttttcagtagtgataaaaagaattactcatctcccattttcattttgttctatacaatagatgtaatatgcattcggatcacataaatatatatatatatatatgtatggtatatatattttagtatttgattgaggaatcaatattaagaaataatagaattctttatgtcatttttttttaaagtatgcattttatatcttaattacgcagatatatttaaaatatttaaagatgagcaagggaattttaaggagtgcttgataactgacattcttggtttgctgagcttatatgaggcctcacatttaagctatattggcgagaatatattaaatgaagcacttgctttcaccaccactcaccttcatcagtttgtgaaaaatgaaaaaacacatccattatcaaatgaagtattactagccttgcagagacctataagaaagagcctagagaggctccacgccaggcattacatttcatcttacgaaaacaagatttctcataacaaaacattgctagaacttgcaaagttggatttcaatctattacaatgtttgcatagaaaagagcttagtcaaatttccaggtatgtttattatatttatatataatataagagtgccatttatatacaaatatatatgatctagtcgttgttgaccaagccctatatttttcttgtataataataggtggtggaaagaaatagactttgtacacaaactaccttttgcaagagataggattgtggagctatacctttggctattaggagtttttcatgaacctgaattgtcactggcaagaattatttcaacaaaagttattgcattggcctcagttgcagatgatatttatgatgcatatggtacatttgaagagcttgagctccttactgaatcaattaataggtctgattcaatcactatatatattggcttttatattgatgtatacatatattccaattattattaatgatataattacttctctaatttttaattacgacaattgattttttatgtaattttttttaggtgggacttaaattgtgcggatcaacttcgtccagaatgtttacagacattttataaggttcttttaaattgttatgaagaatttgagagtgagcttggaaaggaggaaagttacaaagtttactacgcaagagaagcggtacatacacacacacagtcacacaattctttatatttcataaatattctactacatcttttatcaataatttaatgtataatcttaattagcagatgaaaagattacttggagcatatttcagtgaagctcgatggttgcacgaaggatatttccctagcttcgatgagcatttgaaggtttctttgatttcttgtggatacaccatgatgatagtgacctctttaattggcatgaaagattgtgtaacaaagcaagattttgagtggctctcaaaagaccccaagataatgagagattgcaatatcctttgtaggttcatggatgacatagtctctcataaggtaaaatcaacgtataacccaatcattaattaataatatacatataataatttatatagtcaagcatatcatgtttaatttggttgcacagtttgagcaacaaagagatcattcaccgtctaccgttgagagttacatgaggcaatatggggtgtcagaacaagaggcatgtgatgagctaagaaagcaagtgattaattcatggaaagaaataaacaaagcattcctcaggccttctaatgtgccttatccagttttatctcttgttctcaatttttcgagagtaatggatcttctctacaaagatggtgatggctatacgcatattggaaaagagacaaaaaatagtgttgttgcgttacttatagatcaaatcccgtgataaatttcctaatatttataaaattatactcttatagctaaatttacaaatagttatgttataagttacattaataaagctctcatatcaagttcttttatatttgatcttattaatattagattgttgtgtgtgttgtgggatgtatatcttaattagtgcatcatatattggccccaaaattatttgaactataagatttttgacaattaatcttagaaactgattggggtaaacccctacaaacttcacttttattatactatttgctctttcgtccaaaagactcttgttaagtgtcataagggacatgtcacaatgtacctgatattctcatgacatatatttttagtggtccacataatattatttttatttaagaaaataattattttttaattttaaattttaaatgattatattatgaggactaataagaatattacacgtgtacagttgtgtgcacataagtagtctactttggtatttaacagaagaaaactaacagaatagtaaacaacataggagatgtgagctagcttttgaaggttttaccgtcaaaaatattatttgtggggttaagtgtcacaaattataccgacaatattgccaccaaaatcccttatataaaaacattttcagagaacttcactcaagaaaacacaataggctcaaacatggctcaatacccactactacaaaacacccatttgatgaccctttttcatgtctagcatagtttgaacaagtcataaaatggttgtggggatcatgtttaacaagaaagaaatataaaagggcataattaatattctatatacatatacattgaaaaatcattgcttttcatgtctagctttgctaaacagcaaagctagacgtaaacctttatacaaaaaaatttaaaaataaaatagtataactcattctactggaaacatggtagagtacttaattttttttctaattgttgttgttcttcttgatgttgtaaagtggccaactctatattgtctaattgaaaatagcagggataataagagagaatagaaataaaagagacatcacaattgatagtagtgttaggttttgtgctctaaataaaactcatttcaatataatcagatttaatagttaataaagatcagaaatcatattttatgttgcatggtacacatgatttatttcatgattatatttaatgtataaattc

SEQ ID NO: 380078 - DNA, 1867 bp, Cannabis indica
ccacaattggtgtaagggctaaaaagaccaagacaatagggattaatagtaaaatatataatttttttgtatctattaataaaaaatactcccatattagattttattaaaatatacctacttttttgagtggattatataatatgtcctcacttcttatttaagtctaacataatttatattaatttaaagagtctaataaaaatatcatctatataaaagtaagtatatcttaaaaaatataaaaaaataaaaataaaaaaaataaaataaaatgagtataagatctaatttcctcaaaataatacatatacttgaatgtgaatatgtatatggtagatgtagagtacacataacataaaagagtatttcataggtccttttcagttttggtcaaataaagaggcattcttcacctaggtatgatacccaaaaaaagggtataaacaatcatacccaaaactcactccttattcccttccaaaacttcattcataattatctccatgccaaataatccaaatactacttatataataatataaataaatttttatatatatcaaagttactttttattattttaaattaaataataataataatagcaatgtagtgcttatatatttggacgtatttgttgtcctatgctataataaatggctaagcatgtgccacacacacacagtactatgcaaattgtattgccgtgttgcatttatcttcccattaataaccttttttgtctttttctttttataacttaatgaaagaaaagaaaaaaaaaataaaatagtcaataaaagacacatatgattaaatacaattaatagcttatatcaaataaatcaccaccataatttttgtaaatttttgtgtgttgttcatttgacaaaaccagcactaacgtggttgtagcatataacgacacttctaatccaaacaaagccattatttgaacaagaatttagaagttttatttatttatttatttatttttaattaaatggttttgttttaaataacattatctttttaatttgagtttactttttgaatccaaaaaggaaaatgtgttaatagcatgcgggccacaatgagttttggcctttagtgcgttaggtcaacaactaggaacagcttttgtcttcttctgctgtttgggtcaatccacaaagtggaattgagtcatttcaaaatttgtgtttttattgtatataatatataatgactccaaaatatttagactatgcaccaatttgaacaaatatctttctacaattatcattattattattaatgctacgtgtacctttattttcacatttttatttttttcttacttaagaagaaataaagagaatatttcacaagtttaaaagaggaaaatatttcacatttttcttcggagtgctcctaaaaacaaaaacaaaaggaaaaaaaggaaaaaaaggaaaaaaaagagaggaaaattggtgagcattcttctactccatcattctatttgtttcctatacccgtttggcatataattttagtcaacggaatttttgtaacacatattgtctttatggagggtaaaaatcatttttacctattattacatacaaatgttataagaaaaaataaaattagaaaattttctttcagaaaaaaattgagggtaaaataagagtaaccttatcaggttagaaaacaaaggaaaatattattattattattggtttgttttaacaatgttttctatggttttttttctcttattttattgaagattgatgttgtactgagtggtgagctatttataaatattgacaaggtagattaaatataaagtttttttttttatttttacactttaaaatat

SEQ ID NO: 380079 - DNA, 8401 bp, Cannabis indica
agaagtttctccaggagaggattaaggttggtggcaaggcaggcgctctcggtgactcagtcactgttacccgtgagaagagcaagattactgttacatctgacagtaatttctccaagaggtatcatttgctcccattgaaacttgatgtgttgtttatggctgtacctttaagaagcgaagatgatgagcatcttaggcctatcgtaaggtttatctacagtagaaggggtatacaaacttagcttagtgttgagttggcttagggatgggtaatttggtaatttccgtagtggcgagcactgagctgccttatgtaatgagaatgctagaattagttctgcaaagtttgagtctcaatctttgcataactttgcttagctaattctagcattctcactcattacataaggcagctcaccgctaaggaaattaccaaattacccatccctaagccaactcagcgctaagctaagtttctctaccccttctactgtaggtaaaccttaccgtaggccttagatgcttatcagaagaactttaatttttactttagaaatcctaaatctgtatttgattgcttggttcaaagttgattgcgaaggaaaattttacttctcatatatgtatatctttctctttatataataaatgcctactggatgagaatttgttgtgtatttctgtttagttaacagtgtaaaactgacactgttaattagcattatgtttgattaaattgtaattgtaactcttcaaaactgtgcaataaaaaacaggggttactctgccagtcaaggttttatcttcccactttgctgcagtactcttaatttcgctttcttttttgttttggaatacaatctcattttcactattgtaggttttcaagacttggtaaaattgaatttattgcaatcgattataagaatagttaagcattacaggttcagtaattatattttccaatgtcactgtactaatatagagaaatcaacatagacatcatgtttgtttgctgtcattaccagtgatttgcaagtgagttacaaataatataacttatgtattagttgcttcgatatgcgactagtttagaaggccgatgcttcaatatattttttaagtggcattagctctagtatatatatttatattagtttgctgatttatatgccgtaaattttttctattaaaatgatttatgtttgtgtttggatttggttcatttatgaattgagatgtctgatgcttatgatttttacatgtttactttctctttgtttaagtttttgaaatacttgaccaagaagtatttgggttcatttatgaattgagatgtctgatgctgttgtttttaacatgcctactttcgttttgtttaggtatttgaaatacttgaccaagaagtatttgaagaagcacaatgttcgcgattggctccgtgtaatctcatccaacaaggatcgtaatgtttatgaattgaggtatttcaacattgctgagaatgagggtgaggaggaagattaaacttctgtaatattttatttgttagaagaacttaatttcctgttgctagactttcctttgttttagtttttccaatgtggtgttttcactgaaaattattatggttcacaattttgttcagtaaaagctacgcgattttaaattattactgctgtttgttgactgatgagaatatattagcatgttttgatcacagatttgatctgtagttatcttttaatgcttctatgtttctatagtgctttgtaagtgatgtcgttaatttggtttgccgaaacaacatgtcttattttgttacttgttcatgtaaagcagtgcccatattaccaaagaaaaactttgattttgttctttttcatttttgagctagatgacacatagtcaatggtatttatctgtctgtgtatgcaagcaagcacagcccttcccaaaaaataaaaagaaaacatcaatttaatctatcttaatgcatctacaccaaccgtttcaaacgttaacggagcgtgactgtctccaattcgcaagaagggcaacgtgatcctccttgtccttgttgacaatttttaaaaatgttaagcttgagaagcatattttactacaaaaatgtcaagttccacttatcgttggccctctttgttttctttttagttgcaaacttaccagcattataaattttctgtgaaaattacttgctacgtggccagttatctactcactgtcttggcatgagtcttctaaccatccgtttgttatgcctaaacaatggcacacttccttacttgtcgaagccacttaccaaattttagcatgtatatattgtcaaccctgtaaatttcaacaccataactcatcatctactaacattatcgacatggagttcttccttgccaatgtaatatttgtctttagccagctcaagattctagcagccattctcgccatagccactgctgtatatctcttctacaaaacaaaacgtgtatatctagttgatttcatgtgttatagtgcccctgatgcttaccaagcccctacgtctacctttgtagaacacatagaaagattaggcaaattcaacagtgagactattgagtttcaaactaaagtcttggaaagatctggtcttggaagcaaaagctactttcccgctggtattcatctgtttccaaccgatcaaactcttaactcagctgtacaagttgaaatggtgctcttttcagtagcacaagagctcctttccaggcacaaaattgacccaaaaagcattgatattctcataactaactgcagcgtcatttgtccagctcccacttttgcttccaagattgtcaacaagtttagtttgagaagcaatataaagagcttcaacctctctggaatgggatgcagcgccggactattatcagtttctttggctgaagacctcctcaaagttcatagagaactctctagtctttgattctaagtatggaatctgtttattcaaatatctacaatggaaaagtcaagtccatgttgcttgccaattgtttgtttcggatgggtggtgctgcggtcttgctttccaatcggaaaagagacaaaagagtagccaaatatgaacttaaacacttggtgagaacctatgccaaagatagttattacaaatgtgtaatccaggagccaggtaaggatggatttactggggttaacttatcaaaatcactcaagcaagtagcagggaaagccttaagagttaatacggctacacttgcagtattggtactaccctattcagagcaagtcaagtacattttggcaattgtttggaagaaaatttggcccccagcaaaaaaaagagggccctatataccaaactttaagaaagcgttcgagcatttttgtattcattcaggcggaaagtcagttatcgaaacagtgaaggagaaactgaagttgagagaaaaggacattgaagcctcaaggatgacacttcacaagtttgggaacacatcctctgcctcaatttggtactcactttgctatcttgaggcaaaaggaagagttaagaaaggggaccgagtttggcagttgtctttcgggagtgggctcaagtgtaacagtgcagtttggaagtgcatcaaacatcttgaccatgaaagttctaatgtctggtctgattggatccacaggtatgcggtggaagttccagatataatggatcattgaagcaaattaatatttagaaatgagagtttgttttttcctggtatgatagtatagagctgtgaagtttgggaagctgataataaactatgctaaagaatttattagttttcctaccaatgatagagtagctagctacttttggtactgatattgggatcagttttgaaacaatacattaaattgtgtttttcagtaaggatgactcattatgcaactctctccatacttctccctttgttttgcagcttttgcatttatgtttctccgcttcatggcataagcatctattaggaatgtacttgcattttggaaagcactacttgcatctgttcttttccatatcaatgaagtagccaattcatgaaactgaacatgcacgaactggctctttcaacatcacaagtgcacaaacacacagctcataaaagcaggcctttctctttagatatatttccaaaatttctaccaaatcatttaagatggatcagaaaatgattctcaatttctcttaacaatacaccaaccccattaaaattggctgaacaagatggccacatctactgaagaaggtacatcatcaaaattcaaaataaaataaaacccacctttcaaagaaaaaaaaaacccataaaaaggaaaaacataatttgagttcaaatcaggcttggcaagtgtcaagtgacgttacttagcaaattattaacatcataatattagtcactcttacaaaattagtttgtataacgaagttttactatctaaaagtcaagaattctaccgtgtttatcagagttttctgttctcttctcatgaaaatatgttaacataaactacaagaactaatttgcttaaaaaaaaaaccacaagaactaatgaataatgaccatctaacctccagaagttatttatattctatcatttaaaatacttcattaaaattttaaatttatctattttactttacacatttatattacactatacattaaattctttaaatttttcaataaatcttttaaattatacatctttaaactttttattaataaaataattgaaaacaaacatattaaatgattagaaaaattgtattgctcatatgcctaaaaaattcggtgctctattttacttattatttactcatctgatggatgtaaaattttatatacttaagctatttttttcattttttttttaggtagtttttagctcactgatgggcatgcttactttcttggcctgtcatgtggaccaacgagggtaggccgaggtataaataacctggagcatgacataatcattgatacatataacatatacacaaataaagttttttcaaccctcgatggatgtgcattgcgtgtggaactttcttatatattcctttatattttttctctttctttttccctctctttaccttcgttcctatactagagttttaaggccttgcttgcaatttaaggttcaccttcaatgtggcagcggcagcagtaagtagcagcatcaccagcaccagcagccagccagcagctctgctttttgttttatttttttccttgtctcccttcttcacttcaatttccaacacccctatgctcaaaaaataaaaagagagagaaactaaaaaagaaaaagaaaaaagggaacaaaaaattgggtgggggatcacctaactactaaatgtcccccaccttcttaggcataggttcaaagttttggcttggatcaactacattcttacgccatctggctcaggtttaaaccctttttatgtgttgttgccacagcagctcgttccacctatagtgcattgtccgtactacatagccggagactaatattatgcaaacctaataagtacagctattgcatcattggtattggtcaaaagactcaaaactaatgctgtttttcttactttttttattgtctattgcagttaaatgatgactacaccaaccttctttgggctactcatttttatttgactattttaactttttcttttcctctattgtggggcaactgtagagccacttctagattttgaacaatttcaaaaggttattatgcttgcatatccagaccacttccaaaatttctttattggtgaatatagtttctttgtaaacatcttgatacttaaaagggaagtgatatgaagaaatttttgaggaacaatgcaaatgcatgataataattagtagttcattttaaattttctcttcattccaaaaaatgagttggtacaatacaaagctaaactgtaaatttgagagaagtaggatttctcgttcattatgcatctatatataacccaaccgttctttttggttccttgccgagaaatgccacttttttcatgcctgtttgagagaaagcagaccaaacaatatccatacatacaaacaaaatgtatatgttaaaaagagtggtaaaaaaaaagaaagaaaaaaacagctttacctaacataagaattaaactctggaagctccaattgttgtttgtaatacgccaaataattgggtgagaaactcatgttggagaaggggagcacgtgcaaacactactacttgcaatgtagttgagttgagccttttgtagatagctctgttgcacgtgccctgcttctccagcaagagccactccccataaccgtaaccatgaccataattcagttgagaatgcatgaagaaaagtgaagaaggacaagcttttatagacaagtttccataaagaaagagagagagagagaaagaaagaagagagagagtatgtttaagagattgagtcttgaagtgggcattctttaaatacacccatcctattaagacatagcaagcaatcaaagcgattacgaaattgtctcctatgaaggaaaagccacgaccatcttaattgattcaaagaaaaaaatagtaagtagcttaaagaccaactaagaactatgacgaagaaaattaattaaattaaattgaattaaagtggtagaaaaaaaaaaagtgagccaatacaatcactttacactctcataaactacgagtggtatgtactcacatctaatctaactcatggtatatttcatcttattaggagcgagttgtgtacacacacatttagtaaagtgggacgatgtggcaaatagaggtggtggtggtagtagtagtaggcataggataggatactagatttgaccctgaatttgacacaggccacagtgaatctaattcttacctttctgatcaataattcttcgttaaatagcaatatattttacgtgtgtataggtcagttttgttgggatatatacttttcctgccgccaagttaataagccgaactttcctttctctctctcttttcctcccttatttcccttgcttagttcttctcatagattctaatcttttgataaactcgtcttgaaaagttagattattttttttttatcaattcatcatactaaaatcattgttcctactttcgatctttactgaaaatggatcatgtcagctattataaatattgtgctatatcgaagcaaattatggatatctgaagtgggaaatcagagtagagtgcttaaattatggatttcaattgcacatttagtgatctatataggcacacattataatgtatatgttatatctgatatgattgagagactgtaatttaacttccactacaaaaaaaatataggttacaattcttcatatgacaatataccaaaacctccactccccattttatcatttcagctaaaaattaatttactgcaaagaccaacatttttagtgagcaaaaaagataacatgaaggattaaagagataaaaataaatgaaacatgtttttgactttgacccaatatatgatgtcatgctggtatgataaaaatgaaaataggtgatgacagggtgataggagacacttgacatgtatataatatttgataggtttatggatgaataaatgggtgcaaacgcaactgcatgacgatggtgatgctgcagtagacagaatcagaaagcttgaaagaaattacaggttgcgtgtactacataatgtaggcaaagtgattgataaaaagagtgagtgaaattagataatagtacatatatatatgtatatatatattgtgtttctgtgttttgagttccaaggtggatatgattccttgtctcatggtagaccgtcatttacctcttcacccacccaattttaccccccatagtttatggtcactcttctcctagtactatctctgatgtttttctctgcacatttctcacgtctacttttttttttcttctttgaggtgttttgcttcttttgttgtgattgtttatccattgatcttagattttctcacgcgaagccaaagactatgttcacttcaaattttacgaatattattatagaaataattattaaattttatttatagtgactctcagtctcactttttttttttaaaattatgaatgaatattttcagggtgttaataaaataggaaattcaatttaatttgcaattcaatccaattcgtaaagtgactgtgaatattcgcatttgtacggacattcgcacttgtgtggatgtaattgaattggaaaatttaaaatccccacttacacggattccatattaatttacat

SEQ ID NO: 380080 - DNA, 770 bp, Cannabis indica
tctctctctctctctattttttcctccccttaatctattctaattagacatcttcttttgtaccattctttacaaaattaaaacacacatcaatttgggaccacataccattactgtgtttttgcattatatattcaaaatgacttgcatgaattttagatcatttagtttcattaatgaattttgctttgtacatagaaaaagaaaaagagtttttgtctttgcccattgttacatggtatatttattaaaaaaaagaaaattaaaagataaatttcgttgctaaaagtaaagtgacaagatctatttattccttatttttacagtaacagtttgacaccagtgactcgaaaacttgttggtgtagaaaccacaaatagaattttgttccctcatgttcaaatctgcactcatatatattgtacgaaagtgtattgatacacaatgtatattagtgggtagtggatcataataataacaacaatgcaagtgacgaggatattttctaattttttccagattatttaattattgttaatgtgggagtgagccattaaaaattccaaaaaagaacaattaacttgggagcttttcgcttgcatcgttggtgcgtgtgcctgtgagtgtgagatgcggcttttggaggacggaaagagccggatttagattttagagcttatgtcacttccccaactctgactctatggttgtgattcgtttgaaaccaaaacagtggatatgtgtgtatatatattactttttttaaaaaa

SEQ ID NO: 380081 - DNA, 2505 bp, Cannabis indica
acactatatttagtgttttagagactggttagaaatagccttaagaacactctcataagtttctctactcttattctttaaattataacattaaaattaaacttttttatttacatcaaacttttacattacaacctacattagtttctttattttctatcttcatattatttaaatataaataaaatattatttatatattattaaaatactttttaaaaaataaaatattataatataagaatgaataatatttttatgtagagaaacattattactattttttatttggttctttctaataaatgaattgatatagctactttttttgtcttatttttttctctcctctaaaataaaataaaataaaataaaatcatggcaatttacaaggaagaaagaaagaaacttactcaacttgtgacgaatcctgaaccttgaataatgtactgaagagttgaaagcagggatggagcaccttgcttgtctgggcgactacacctatgctcacaccttctttcactatcttccctctttttgtttgatgatgatgaaatgaaaagagtatgtgaaatttgattgcctgtattatttcttataaagaatggagtcattaaatggccattatgaaaaattttcttaaaaagggaagttcaggattcatctttgtaaagattaatatgaacatacctatgtcatactcacatcatcaaaagaacagatagcgtcaaattctaagtctttttcagcaagggtgcacactaggttacgaagtgtgcctactgggtgcacactaggttacgaagtgtgcctacttagtgcacagaacaacatataagtctctaattactaaaaatggttaattgaagacttaggagtcaaatatttacccaaaatttttgctaggtgacatggcacacaattaatgagaagacatgtcatcccagagaagatttggaaagtgtactctaaaagaaagcaagaaaataaagcccgaaggcctagataaaatacttgggcgacatgtcacatagtatgccactcaggtactaaccctagctaaacacttgggcgacattcatgtgcctcccattttacttttgagtaacaatttagtgttcttaagttacctttctcagattatgatttgataagcctcgccaaaatgaaaaggtaagttagagcgccctgagtgtgaagcaaacacttgggaaacatacatcatatgctgtctaagtatatgcctcccagcttgtgcaacatattgagtaccccaagtactttttggggtgcatttaggcgttttcaagtcatctttcaaagtaaagggcgatctaaagcatctagcgggagaaaaactaaggttcagagtgccccaagtgtggagaatacacttggacgacatgccttatgtttcccaggtatatgcatctcagcctggacaacatggtgacactccccaagcactctggggtgtggtttctcgataaaagcttatgtcccacacccacaatccgaaatcttccaaagatcaaacatgtgaaatcaactaagtgtcttaacaacataaagatcccccctcctaggtatacacttgggtggcataaaaaatcaactcggaggtagacctaagaggtgtacaatcagggtacagagaaatagctttctcaaactatgcttattactatctgcatgaaccctaacacttagagtgtactcaagagacaaaacatgcttcacaagaaataaatatgacaacacaacaccgtacaagtagcacttgtccccctaggcgtcatacacatgtgctatcccctccccttcggtgtaggtgaagaccaagctagaagcaccaccttcagcacccaagatccaagctaatcgaaatcccaccaatcaaggaagctgattagggtgcgaatttgctcaataaatgttgattgtgatgcatatttgtgtaattatgctgattattttcttttttgctataaatattaggcttctatcaactggaaaaaggttcacacttttcctgtaagcataaactctgaataaattattataattctctctgttctcaagaaactcatttgagctatcttgtgagtacagtatagaaaaaaatctaactaaaaggggagtatgctattaccactgaaattagggttgaacctctataacaaatctggtgtcaatattactacaatctttgctatcttatacttactactggttttttacttagtttttatgactccacgtcagttgaccaaaaaccaagtcacaatttggatccagagtgggctcttgtattgggttttttcaggttgggactgtgttgtgggggttgttagacttttatttgggcttacattaaattttattggttttattaaaacttgggttgattggatagttctttgctgtgttagcccatgttgttggtgatcagttgttaatgggcttagcatctgtgagtaaagtctaggtgaagcagaagtgtgg

SEQ ID NO: 380082 - DNA, 4641 bp, Cannabis indica
ataattttattaaaatgacagagaaatgtgtgactttggaaaactttctttttttctaagataaggacaaaaaactaatttgattgaggccacctggatttttgtttcttagcacagaaataacattaaaatagaaaccagtttggacgacttagtatcggagggccctccttccttctcagtccaatatttcgaacttagtatttttgtgagctgtggttttggaggtaaaaaaaaaatggcgagaatggtgaggagttgcttgcaatcgattctgaaattggtgaactctgtcatgggaatgcttggcatagccatgattttgtactccttgtggcttattagggtttggcagaggcaaatggatgagttcccctttggagattctgataatcctgttccatggtatcacccttttatttttcttaattattattgatactatttgtatgtttgcatgtgttgttttcattcttgctctgtctggttgcctgcaaattgaatagaaatacagttaagaatcataattaattatgtgcttgagtctgtactatttgaaattgcttattttccgaaataggtttgatcaatatatttttagcgattatgtacatatggaaattttaatgttgaaatgagagacttcaaattaaatagagttgtaaactctataacttagaatattatgcagtgttaggaggttttatccaggacccattgctaattttttttcttttttgtctactaagttgaactgtgtgctgtttaatggaggaattaataggaaaataaatttgggttgatatttcctttggttaatttatgtttctttgattgtttactacttcttcatactgattgtagtttgtcaacatgttactttgtgcaacatttgtagtatttattttgctctcaaattttgtatttgagttccttttaaagcaactggttttgttatatatacttcaggttcatttacacttcccttggccttgggattgtgctgtgtgtgataacatgctctggtcatgttgctgcagaaactacgaatggttgttgcctttatttggtatccttttacaatataaggttttctctctgtggaataaagtaggttcaaatccttagcttcattgctattcctcattgaacaatttgttttatggctctttttaccaagtgatgagtcgtaccacaacataggaaatgtatgttttatcatccatacatcttttactatttgagagaaaagaaaacagaactgccctcagaaaattagactaaaaaaatattacatttgagggataagaccattagaataattgagaacttgggcccaaaaaattcacttcagaaaacaagagcttctgcttgaaaaccaataagccacctgaaaatcgaaaggagaataatcatggcaatgagataaatatgttattaatgtccttgctacatcactaactagtattgttgaagattgacttttacttcttttaacaattgaagcttttgatcacagaagtttattcaaagttgcagtgtattcttttgctttcatattgctaccctgaatataattggctcgctcttgtgagtttattgctgaccttaaatttgtacagtatatgttgtttgtgttcttgcttatcatgctggaggctgcagtcactgttgatgtgtttattaaccgagactgggaggcggtatgttctaaattgaaactaataaattttgtgattacttaatggtttagtctaactgaattatatcgctaatttgtttaatttgtcatgctgctctgccaatttaatatgaactaggactttccagaagatccaagtgggagtttcggtcagttcaaatattttgtgagaacaaacttcaacatctgcaaatggattgggctgtcaattgtgactgtacaggtttctccctggaaactttctgaatgttatttcatataagtaaatgaaaaggttggctatctacctgagccttactaatttgctatggaatttatctctgccaaaactagcaggatctgcacattgttatccagaattgaaactctttgcttagccttttgttagaatattgtaggggtttaagaaatgaagctcattttcaaatctctttgatctggattgttttgactgatccatgtcattaactcacagggactgtgtttgttgctgggaatgatattaaaagctctagggccagatcaatactacgatagtgatgatgaatatacttcagacagggttccacttctgccaaattctgctcatccgcctacatacgttgttggtgatcctatctatggatcaaactcttcttcctggggtatcaggattaatggcaaggtataaatctttaatccttcatttacatctcaaggccagtactgtaccattggaaacattcaatatcaccctcccaccctttgtttggtggagtggaaaactggaagaaagattaggttgaggaagatgggatattatctttttacgttgcgtaagaagatagagaatggaagatttttaggaacaaatcctagtagttaataagtccattttcaccaattcgttgaaatttatatttatgtttaaatttcatgtcttcttgtaccaaataaataccattaccaatacccctatgtttgggttgacttccttatgttctatccctcccttgtggccttgatgttattctaacatagtctgttccgttttggttacaaaagttcaatcctaccaaacagtcattggttaatcagttcaatcccaccaaacttgaacttattttaatcttcccctaaccaagtacaatcataagggttattattattttgtttggcttaattttttatttctcatgttatttgataccagacaaacaggtaatccatatgcatcacttgggagacacaaaagttgcagaaaatgtctagtaatcaaatgcaccattggttgtcagaagttgatacgtcttgaaaattgaaatggcatcaaagatggtagaaatgaatgaaggaaacacttgcagatatggttatagttaatagcactagtcactcgatgctcaaacctaaaaccaaaacttcctatgaaccccacttgaaatcatgtaattgtttctgtgataactttattcatttagctttatagttactctactagatgatccatgtttccaattatagtcacaattatcaaataatagacttgtacacgttttcttttttcattgcaccttttattttactagaagaaaaaaaatataagataggtaatatgaataatttcgtaagtaatctttttcgaatgaactcttctgtttttttttaccaaaatgttagaaaagatttgccaataaaaaaatggtgcaaaagtaatgtattgctttaaattacaaatgaactaagaaatataatgaccccaaccaaatggattcttaattttacaatcacgagtgtcttagattgcaaacaaggaattattccgggtttaaaaaccttgacaaaccaatattattgacaagaagaaacgaaagaacatattatacaacaaaaagataggtgatttttggaggtaatgattcggtaaaaaaaacttgcgatgaaactttttatatagagatatttgtagcactatttataattaaaaaaattaatagtaaaataaattaggggtgttcatataattcgtaatccgtgatttcaaattatttgagatcggaccaaatgaattctgtttgagtgacttggtcaattcgaaccgtttaaaattctttgattcgctcacgatttaaaaattttggcagctgtgtaactcaaaccaatctgtataattattttatatataattaatgtgtaatttttttgaacgaaatattgatatttgcaaacaactttaagtaaaatattgatattgacttaatattgttatgataattttttttattgttaattatatattgtagatttattaaaagtaaataaaattattgaaataatgaataattattgtaaattttttttaagacaactacgaaatgtatattatggttttgaaccaaaccaattcatttttgagtttattggtttaatcatttaattagtctagtttgactttgaatttttaaaaaatcataatactagtttagttttaaaaaattaagaattcgaaccaaaccaattcataaacaaccttaaaataaatcacgattggtgtgccaaaattctttaaatatagaaatttgttgtgaaacttaccagtaataatcttaatataaatttagaaactagtagaccaccttttttttttcttcataaatttacattagacaatacatctacttcattattctttctatatcatttaaatattatatttttaatatatttaaacattttattctcttactatcaataatgtcatatataagtggtcataggcataatttagtggttccacacttctactcacaaaaaaaaagttccaagttcaaatattcctccccaatgtcaaagaacaaatatatttatatgattcacatattattatatcaaaaaaaagaccaaagccttcgtttttctctctctctctcaacaagcatgttggcaactcagatctcttc

SEQ ID NO: 380083 - DNA, 3309 bp, Cannabis indica
tgttttgtttgtttgtttgtttgaagaccacgatgcacgttccatccaggttcgatggaaccgtgtctcgacatcgacggttgaaaatgaagaccacggtggtccacggcccatgaaatcaaagcctgccctgagattgggtgagccttaagagaaaaaaaaaatatcgggttctttatttaaaaaatatgtagtattttcgaaaaactacttaaaatatgtataattttaagtaaaaaatattttttttggcccctaagctgggtgggccctaggcgcgggcctaatccaccttaacccaggcccaaccctggatcaaatatttatataagttggtttccataatttttctaattttgctttgttatattcatatgtagaaatctgagtttggtcattaaattataacagatattcatttgcagtggaggaacttattaattatgccaataatatctgttgtaaataaaatcaaattacaacttgaagaaaaaaaaataataattgaagataagaactctattgcacatagtaattaaataaactcatataatttggtttatattaagaccttgagcttttcattttttatgtcattgtttacaatatttgagtaacaaaagcacaaagttgaatacaacttaaaaaaactcactttctcaccaaccaaacactcttaattgaacttaagagtccattaaagcattctcagttttcatcttcattgttgcatatcattgatctgcaaatattttgatttcaaagaaagaaaagaaattgagtacttaaatttcttaacttaaatgaagtaaaattagaaataaaagagcaaaagtcaagtacctttgggaaaagatgattttgtaatgtcatacttcttttcgatcaattcgaataagcgatacatgttgaatcttggaccaatcttcccctgttcttctttggcatctaggagttagtaaagggcatttgtagatttccaaagaagtaagagtttgaggaaggccttcatttggtaagcattgtagttgggagcattcttgaagagtcaatccttgaaatgaggtgaggtgttgaaagccttcgttgtttagagctttaagattctcaaaacatgagatgttgaggtacctcaaagtagatggaagtagcccttcttccgggaatgaatctatgtccacttcatcataataattacccccgaaaggcgatccatagagtgtgaagttaacaagtgatgaggcgtcttgaagattccaatcaaatcgtttggcaaagagagcactgcagtcgcgaaaatctaatgattttaagcttgatggcaatcccattttcgagaaggattttagtctcgagcaagaagagagttgcagggtgtcaagggagggatatgcaacatcaatatgtggatatgatgggaatacttgaaccatgtcatgacattttcttattgtgatttcttccaatgatggaagataacaaggaggtagtccaacacttaactttctacaactgtttaaactgaactttttaagacatgggaaaacactacattcatcaacaaatgaccatccccacttgctcattctagacacctctaaggttactaagcattgaaatggcttagtcaatgaagtaatagaagaaggcttatcatctatgcttagaaacctatcaaatctatatatttgaagctctcttaatgaaactagttgactaaatgatggtaacaagcaacaattagtaagtattttaagagatattttggctaagttacaataagatggatgtgctacccatttaggcaagtttgtacctctataaccttcaattgtgagtttcttcaagtttacatgaggttggagcgcgtcaagtacttctctatcttttatggaatcatcagtttcgccgtcccatatcaaaataagctcgctaagatgcttcttgtttcctaagttggcttctttagcatccattgcatccctcacattctccaatccaacaacacacaagcttccgtgcagatgttgtaatgctcctaactctttgatcctagagccatcatttttcgataaaacaaagtcactaagcccttgaagattggtcaaattgttcatttgtggcggcatctctttcaaaggtgtgtcgcgaatcatgagatgacgcaggttgattaacttcgaagtgttggttggtaattgtgtaagctctttgcaacttgacaacaacaatgtctgcaaattgtacaacgaacaaaccgaacaaggtagttttgtgatctttgtttctgatagatccaaataccttagatgctttagattgccaattgaatcaggcaactctagtatagaagattgagacaatgagagtgctctcaaacacccttttccatttagaagccactcataagcccctttttgtgtcaaccttggcttggaatagagatttttatgtgacaatggtaatgagagaaaggtgcgcaaacatttggctttgaatgaaccctcaagtttcaccaaatcatcgaaacctttcatgtaagataaatggcgagttttgcttgtaaggctattgaaatcttcaaatgtgtgatctataaaacaaaactcaccagatactcttatagctaaatcatgagtgatgtcatgcatgaagagagttgattcatcccgagtcgaatgttgaaagaaagaccttgatatcaacgcgttcaagtactcttctccaacatcttccattctttttccctcttgtggttgcaaaataccttcagccatccataataagaatattgtcttcctttcactcttgtaaaatgcataatctttaggaaataatgagaagtaagcaaagcatcgctttaggtgtcttggtagaaagtgatagcttaaccatagagctggtagaatgttgttattctggttttcttgaaattgcaactcccatacattactttgtaggattgttctccattcttctacatttgacaccgatcgcagaagacctgagattgatttcaccgccaaaggaaggcccttgcactttctaacaatttgcttgccaatatctaccaactccatttgtacatttgagccaagattgttaaaagcatgtcttgaaaatagttgccaacaatcatcatcagacatagtttgaagatcatacattggagtattgcccattttcaacgctacaactttactacgcgtagtcacaataatcttacttccatacgcaccagattcaaaagagcttttcaacatgtcccacaactcgtaattctcattccatacatcatcgtgaacaaaa

SEQ ID NO: 380084 - DNA, 908 bp, Cannabis indica
tatatatatatatatgtaagattacgaatttatggtaataaaagtagtaaaaggagcttacttgggagcaacagagcaagaaattctggcatattgagttggaggaagaggtcgaaaagcacaacgtcggtgtttgtgaagatggttggacaagaatgagatctgggaagattttaaaaggtgggtcttggagtatgatgatgatgaaacatcagctacggccatagtagcagaggtagcagccattttcagagaaactaacaaataaaccaaaagtgacaaaagaaaaagaaaaggtgtttgataaagaaaaggactgtctgttttggagggatagaagatgagagagaggttgaagatgatgttgaaatatagtaagaagaagaagaagaaggagaagaagaagatattagaagtaatggatagtttaagctaaggccatgcaaatgacagttgggaacaaaacctcatctctttttctctttgttctttggatttggattctctgtttttccgtggccaggatttgttgtggctgatatttgataactcacacttggatggacttgtgtagctaaaaatcttatactatcacgtggtttttacattttttttttttaaaaaaaaattactaataacacaagttcatattattaatgatatggttttttatttaattttatttttagtaaggttgtttggtgcgtcgttttctagtattataatttataagatcaatatctttaaaataatgaagctttaaaaaattcaaaaaacatcactaaaaaatactatcgcatatgttttaatttcttttttgaccataaaactgttagtaacatcttaagaggtggtatccgagtagccagggaagagataaatgagtctggacaaaagaatcaaatagt

SEQ ID NO: 380085 - DNA, 1431 bp, Cannabis indica
cacgtgatgagatgataaaaaaaaaactggttctatgttttgtctccatttcaaggtatattcttccgatagaaaggtctaatattctgttttatgtgttatatgttaacaggcaaaagaagcagcagagaacaaagctaaggacatggttactgctatggaatctttaagtgcagagttgagaaatgaacagaatgccagaatttcagctatgagcctggccaagagagccagcaaggaaaacgaggcttttaatcgagccattcaatccctaggatgcaaggtccatttctcaggaagtggtgattgcactgttgacattgaaaatagcttgattggtactccacagaaattttcttattccccttcaaagagagaatcggaaagtatcacacagaatgatgaaaagtcagacctctctgtttcaatcacagttatgtcagatgaaaatgctccgaacaatcaaattggtcgaatgtgtgaaacattatgccctcttcgcactcgagaaggaggctgcaagtggccagatgccggatgtgctcagcttggcagccaatttgttggactaaaggcaaatttcgatgcatttgaccgactttctatttacgatggctactttcagcccaagtgaatactaggttaggttagagtagtagttctaagataatttttggcttgccgtcagattaagtggagacggcaatggcccctagaatttgaaatgggggtctcggaactgtttgtacaaagaatgtagagttaatcttaatcaacctattagctcaagggattttgttgtacaagaagagtggataatcatttgagaaactgtggagtaattggtgatcgacgacccatacaagtttctttaggtgtttttagctagaccatacatttcaattcatttccccaataagagaagcccgtgtacatgttttaggcttagctatgtgttgtagctaatcttcaccagcatccatttatatgcaatgatacatttagatttcgttattcaataaaaagttggttactgaccgaaacaagttctatgtcagtcagcttctttgtttcatatattgtaggcttgtaatgtttatgtggtgctatcagattcaaaatggccgttttgttatcctctatctatcttgattgaaaaatttatctaataataataaataaaaaagaacaaatctgtacaattatctttccaagttgatttggaatgcgctgtggtttctcaagaaagaagggaaaccttactaagtacaacttgccataaacttaaaactaaataggtggaggagggttctatgggtgcgtttgggatagcttttaaaaaagttagaagcactttttaaaaaactatcattcaaaatgtgtttggtaaaattagagaactagcttttttaagaatttaagaaaaaaatt

SEQ ID NO: 380086 - DNA, 2590 bp, Cannabis indica
gtggcggccgtatcttcgtggtgatcgttccgcttaatgcagtgcaggttggtcgtcctgggtctgtttgtttcttctgcggtgcctatttagattaggtttaatttattttattttttgtttgctgcagctttcgtttgggttaattcttatcatggatactcttggtgcactagcagttggctactcgaaccccctactgatcacctgatgcatacgaccccagttggccgaaagttaagttttctctataagttgctttagtgttgttcttttttttggtcagaagtgttgttttagttagtttctaacataaaactcaaatttagaacttttgaaatataatcgtctagtttagattcttttggggtgttattttctcagaagaagtgtggatggttggaatagtgagctatggttatctgatgcaagattaattggaatatatgaaacgttgtataatctgctgttgaaattcgacagtttcttcctgaaaacctgaactttccttttattgaccttttgagttctctatttgactttgactggatgttgagaaacacgtcatatctggtgggactgctcgttcactgtctgctaaataatgtctttttatttttccagagaaccacttataacaaatatcatgtggagaaacttgctgctccaggtaggtttgattttcaattccttttccagccttttagtgtgtggaaaattcattgacatttttgtttggctgccaaatttcaggctctttatcaagtcactgtcctgcttatcctcaatttccgtggtaaaagtttattgaacttggaacacgataacgcggcacacgctactatattgaagaataccctgatattcaatgcctttgttctttgccaagtaagtcctcaactccctggtagtggttaaaaatggaaattgctaacatatttgttagatctgtgtgatttagtcttggaatatgccatttcatttgaagcagaagcagaaaatttaaaaactagaaataccaggaaagtggaaggatttagatagatgatatccatattttactgaaaagaagaaaaaaggcttgagaatattaagaattgtcgccaagtcaagaatgtgctcctctggttaagaagcccatcctagagtgcctttcccgtatatttttatatctggagttaacaaatatggatccctccgttttgtttcagtgcttccaattaaaaaatactactaatacagaagccaataactaacttgatcatgaaatttgacatgtcatggtgccttaatgctaacattacattggtattatgaaattttcgttgtacacaaatcactggttttgatgcctcacttatttggaactgattgcaatgcgaaataaatctccttttcatgtcttgaataacaaagtcctaatactcatctcaaggtttttggatgcctagcatatgcatcaacactcttttaagtcatgggaataaatgttctatttcttttattcatttttcatgggagtaaccacttcgtctctggcagatatttaacgagttcaatgcccgaaagccggatgaatacaacatatttgcaggaattactaaaaactacttattcatgggaataattgcaataacactagctcttcaggtgatatgatagtgaaacttagtctacttgtttgttgcgtgttgttcgacatattagccacttataatttactttcttgtgtccctttagattgttattattgaatttcttgggaagtttacaacaacagtcaggctgaattggaagcattggttgatttctgtcatcattggtttcatcaggttaattattttcaattagtattctccatgtttttcaagagttgaactacaattacgttgacgatgatatattactattctaatctctatctaattttgctgcttttcttttattcagttggcctcttgctgtcgttggaaagatgatacctgttcccaaaactcccttaagtactttcattacaagaaagtttcgacggcgaagaaattcaagaagtggtttgttttctgtttcatctttcaccttgtttggcaaagtgtttcttttcaaaagtttatatgccatatagtgattaatctttccttttctttttcctctcctcttttcagattagtgtgcagcagggaaaacaaaagcatgttctacgtaattttgtgtgattagtggagttcctcgtttgatgtgttgctaattcattggcaccaaaaattactttacattctgctttttctttattgtgttttatctttttctggtcattttgcgtacacatttgttttgtaatcctcggtttacgttagtgagtgccgagtgtggatatgtaggaactaatcatctctcaacactgaaaagcgtgatatgtttcgatcttacctattgttactacgaattaaatttcaccaaaattgccttccaaaatctattatctcttattttgtgagggaactcaagacttttcttattattattattattatttttttacaattggaggtattctatttcttagagcacgctatttgtcaaaataattcac

SEQ ID NO: 380087 - DNA, 4459 bp, Cannabis indica
ctacacaaaaaattaacaaaaacatttaaaattgaaaatggaataaatcatacgtgtagattaaaaaaactaagttagtccaatccaacaaagtaaaatagaattaattacataaacataaatgccacaaagggccagatattgtctcggccagaagaccgttgttcaaaatataatattataaaactaagtccacatagtttgagaattagagagcacttcatcttcatcctcgacaaccttagcctcatttccctcgtcaaagccaccccctcttcctattcagtctgcttgacgtaagtcagcatcttctcgacaacatcacctaaaaagctaaggtccatacttttgtttgtcaacgaagctttgtaaatggagcgtttggccattaaagtaactcttgcacgagcatcttcttttatcttgtcgaggtctttcttggctttttgagtggcgtcaagcagttgttttttagattctcgacctctaccttcaactctttctcagatttctccatatcttgagctttcttattaaggcaagtagactctgcctcaacatcattcctttgaagagtgagcagctcacaatgttcgttgactttgcaaagttttagggatggatgatttaaatattagagattgttctgatggcccaagcgtgccaggaaagaagcctacataaaatacgaggttagaaagagaaaagagaaaaggtatgatgagacaagaaaattgaaaactaactaattgtatgagcttcacaattcttgccaagagatcgctgagagcaccgttattgatcaagttccaatcatctgattgataagtcctaaaatagaaaaatgtttgagttacatatctcgagaaggccttggaaccttcaataccagcatccaagggcaatggacaaatggggtccaacagtataacctctagtttggctgtagaaaaagtgacatggtggacagaccccaaagtttgcttttctatgctcgtagatcaagggctgaagtaggatcagctggggcaacattgtccttttctagaacaatgctagtggtagaagtattctttttttccagcctcattcttcttcttgggaaccttggactacttttcaaaaatatctgcctcaacggctctttattttttacctcgcttgatcgagtcaccagggatgcaaaggagattctccaaatcatccatccatacaaagacaaaaggaagtacaatttaaaaataaagaaagggaagaatacactctttctacgtaagagtaatattcaacctaaactataatcaagaaggttaaaagctactcggagaggcgaaacatcaaggcgaggaggttcaaaaatagaaggaccactagttcccctagactcagttttatcgtaaagatcaaacacatttaaaggagataactctcagtcatccgctcgcaaattattagtcccatattgataagcaatcccataaaaggagctattgtatgaagtttggacatgaaactgagggtaccaactatgaaacctatgggctattaagtctacaccgttccaaatgtaaaagttacattgaatatctaaattttactaaattggttggctcagtcctaaggacggtagaagaccatccataaaagcaagaagttttacctcagggagccctctctttagcctcggcaacttcccaagtggttaacttatctgcttaatgggtccgagtgatgtcgtcacaatcttcctcttcttcaggcactgagatttgtttccatgtgggatacttgggatccttaaaattcattgtgtattggtctctatcgagaagaccacaagactttaaatttgaatcatgaagaaggaagtctatcgctcacaagccataaaggtaaattcataaagattttgtgtcgcctttgaatcacaggtgttgggactggtctctttgaagcagctaaaaaggacaaataaaagaacaaagaattagtaaaaatgtccaatcacaaaattctaactcaaaactaagattttgggatgaaggatacttacgtaaaattctaaattgggtggtgttgattggatgaagccttgtcgtccaaaagaagtcatgcttgaactctttcttattggggagtctaacgatgattttatgatcattggaatgagtatccaaataatagaagccacctaagtaattactcctcgcagagcatgcattaagagcataaaaacacataatctcaaatggggttggacatttccaccctaagatatgaaaaagcgagttcaagcacgccaggatcctataagtatttgggaaaagttgaaaaggtacgaccccaatataattacagaagtccttgaagtattgcctaaggggaaggacgacccctgccttaatatgctcaattctccaagctccaatccttgaagagtcgatgctagtgctgcaacttttaccatccaacaggcgagatgggggaacacaactgaatttgcctggtgtgacagaacaaatacgacatcatttctcatttttgatgacacaagacttaaaaatagactcacatacggggcaaataacctaactttggattcaatcaattaggtctcgaattgaacagtgggattatagggtattttggacttacgctctttcagacacatgatgtcaaatcttagtttacctggagaaaaagcaacgataattttaggtaaaaataaaggccttgtaaagggatacttagttaaaataggagactctggccaagccgtgtgtacaaaagtgatgtttcccatcaacaatctggtttataaaacgtttaaactgagcaaaagtttcttctcagtcaagcttctcgttgaacaatctaattctttcgttgtttatttctagtattgtttttgaatgttctagtcgcgatttgtaaggtaaggtagacaattttgggttttcctgttctaaaaactctaaatcccaaagttttgaaccatgaataaacattcttttcatagattagaaaatatcctaggagttcaaaatttttttgataaaataatttagggaagagaatcactaaaacaataatcaccttatctattctaagcgaaaataatgtctcaaaaactaataataaaataaatatatgataagataatttagggaaaaatttagatatttactaatttctgggtttttttggaagcgttaaaggtttctaactgggaatttccaataccaagggtctggaatataacgagaacgaggttgggaaaaaatattgtcgatcacacgaaggaaaatagtcaaggaaaaactaggcatgcaagaacttcttaaaaaaataggtttttactctctgattttgtatttcgaataaggtgaagaagataatggtaaataaaactcttttatatcaaaatggggaaccattgattagatttaaaattggatcaaacggctggagatatttctaagaaatacgaaaagacagtttaaataactatcagatgaaaggatggttaattaataattaacttttcttggggaaagtaagactgccaaaagaatgtactcattactgaatagggtaaagaccaaattgtcctagtttggatcgtttaaaaaactcttccagttccagaaagagctttataggggcaattattatgcccatatttcgagccataaatatgggcatgacatgtggaaagttagacacgaaaattatggaaaaactcagtaataaacgaattatctcagagggataattgattgtgagcagtatctgtctcacattgtgcatttgcagtaagacagtgagacaaacaatgcatggcgagatgataacggtagaagtcttctcggatgtaacagatcaaaactgtatcgctggaaagagtaaataatgaattttttaagaacttgcaacttattgacccacatactcgtgagtatgttgaaagattaagggaaataagcaaagtataatttatttcaaaagactaagtctaagagttgccttagaaatgctatagcgagaacaaacatcttaactagtatctcataaaatgcgactagcaatccttaaacattgttgagagatgcgagccatgcttgaaacgtgttacctcggtaataaaagaccacttttagataagatgaaacaacagttattagcagttatttcattatatccacatgctgtaaaactgaaacgtgaggattgtccatgtttcatgaacggttacctagataagatcgaaaagaataactgtcagaggaaaaaccatataaatcttaaatagggacaaaacctaaagggaaagggatcgatcatttttgggaggagaccctgtgagattgagtgaatattcttatttattcatctgtaatcaaagtactttaccaagaaatacgcataaataataatgactcgtggagtatgtagattt

SEQ ID NO: 380088 - DNA, 2983 bp, Cannabis indica
tctgttttctgttacattacatgacacaactgttggctaaattatgaagcataaactaaactggcaaaacaccacaagtccataactgcaagtgtttatgaaaatgtttagtctaacaaaattctacaatcgtcttaaaaatcttactgcaggcaaacaaattaagagaatagaatgcctagcataaattactaaaatgagttgtggatcaccaataagcagaataaggaatccgcgggtgtaaaaaacgtgatcagctcgatttgcttctgtaatatggcaaagtttagaggcactcagattatagttagatggctctagcgagcagcagcggtggctcatcttcaaatctcgtctcaactgttggatggtctgtggcaacaaattacatatcttccgatgatgttccgtacaggaagaggtcccctgttagtaatttcacttatagattacttagtaaattaagatgaagaagcaataaaagtgagagtgaagattgtgctaaagctcaaagcatatagaggggaattaaaaaaaactcaccaataatgggaatcatagctattattacggttgtcacccaacacataaacatgaccttcaggcacatactgcaaattcaggtcaaactaaaattagttatacaccaacacagatgcaggttgtaacactaatgcacaccaggatcatttacctatttaactagttcatattgtgaagtagagaaatttgtttatgtaaattacgtaaaaaaaagtttgaaaatgtttttataactaaactatcaattggggttaaaaaattcttcctgtgaagagtaaagagatgtgggaattgtgaggaggttattatatagttattgggtacatggagttagttgatattgaaaatctctatgtacaaatgattataagccaagtaaaatacagtgtttgcgtccgtcatataaatatatatatatatatatatatatggtagaatacagagtggcaaatgcaaatgcttaaaaattgtacaacgaagttgaaagtaagtggtatgagaagaagggctcaccgttaaatttaatacatatctatgtggttctgctataaaatcttcttgctgagcaattccattaacgtagagtaatccattattgacctgtaacaaccaaattatgcagtttgagtaataatgactaattgatgaaatacgaataatatttataccagaacaacaagccttagtttcaagtgtggaaattatcaaaaattagagtgattgctttgggaaacacttatgacttgtacaggaagtgtgagagagagttgagagtcttcaacattgttggttcaagaaattgtttgtaaaagggcctttctctgttctagctcttatagattaaaacatctctataggcatttttgagtagtggaacctctttaacaaactggattaggccaatgcattattagctgaaccagtattaaactttagttgtcttcacttcatcctttattttaataatttgtctgttgacttagtattgttgtttgtgtttgaatactctctactttgagttgtgtgttgtgttggcagcaataatttccaacactataacatcaaaaaatggatatttaaggcttactttcttataggttaccttgctccaggctgttctgttgtacgagaactcttattggagggtttgaaagaagggtatgtttggaataaataggattaatccatttttaattcattcctattcttttttcattaattagtcttagcctaaactagaagaccaaaaatattaaaatcaaagcataaattaatataatcacacctcaacaaagtctccagctttggcaacaattctctttatgaaaacagtcctttccgcatcatctggtggctatagataagacaacaaacatatccagcatcagagaacagaggaaactaattaagtcctaatatgtagtttcaatttattaataaacctgtgttggattccaaaatgtcaccacttcatgtaatgcaggacttcttatgtaatatgaagcctggagagtggagaggttagagaaataagccattttattgttaaacaaaattagaaaaccaataaactattaatagtaattacaacttaaaaatatcatcaaatttattgccaaagtagaagcaaaaatgtcatttgaactattgaacatttctagtgtttgtatgtattgatttttggaaaccttttcaacaatgatgcgatcgccaacaagaatagtcgggtacatagaagaagatggtatgaatcgaatttcagaaagcatggaccataaaagaaacaccacgaagagtctcataaacccatcaagacctggcgatcggagaaaaccccaactctggcacggcatccatcgcaatgaagggtacgtaaagaagagataatacagagcggaaggtcttaagaagctcattgcaggtatacccagaaccccgggagtttaaatttacagaagcaactatatatctagttcaaatgaagaccataatggggtcgggcttaaggctaacaaaaaccacccacattgaattttgggtcaaaattgcttctgtggtatgaccaaacgaagaaagaagaagaaaaatggtttagaattatggtaagaaatatcgaggagaaaagagaagaaagaaaaaacaggggatgaagagagaatgtagatatatatgaacgaagaactgaagagaaaacacaaaaattagctctgggtatctgaaaattttggcttgattctgcttgagcttcagaaaaaaatcacaaaaaaaaaatggtggtgagaccacaaatataaggagaaagagagagtaatttcttgatgagtaagtttcagtggcttgactattatttgacgcgttaaccgagctgggtaacgactaactatgtcccaagtgtcaatactcgacgaacactaaaatgttttcttttctttttcttttt

SEQ ID NO: 380089 - DNA, 1262 bp, Cannabis indica
aaaaaaaaaaaaaagaatgcagacagctagacaaatttaactttagacactttttcacctgcatgagaatttttggttaaaaaaaataaaaggacaagaagaaatgggagttagattgtgtgtaatgtgtatgtatgcgcgtgtggctcgagacttgcatggctagtggcccacttacagtgcggcccacccagttatatgggccgatgatcacggggatcaagtgggcccggcgcaccaccacgttggatgctccccacttactctccaaatgtttttttccaaaagaaaaaatataaaataaaagataattaattaaaatcaagtgtatttttgtttaagttggtagtggaactttgcttttagctacgagaaactttattattatttccatttacaagatacatatgcattaatgcatgctttgtgcaagaaaataaaaagatacatatgcatgctagtatgctactgcctcttctcttttggcccatgaaatctttgatgtaaccccactcttttgtgttttacgatcacagccgttgattacgcccattcttctgattgaagcaaagccaacactcaatctcacacttttaaattttaacctatagtataatttgtttttccacaatttgcttatttctattatgatgtcacctaatctcagcaagaaaccaacatagctgctaagggcatttaagtcttaccaattacaactcagaaaacgcgttacgaatattctttctttaattgtttttgtctgaatctatctctcttttactttctttcttttttatcttttgatatttttgttaaaataaataaaattattttgaaggtgcggttacggagggaaaatcatgtgcacgtaccacttccctccaaaaaagccaaaacccaaacgagtgttgtgtgtatgtaacaaagaaaatttgggctacctctccaaaaaaaaaatatatatatatataaataacaaaatctaattaaattaaataaaataatttcttctctttcaaaaaaaaaaataatataataacaaaaatgttttagcactcgccctaggagcgtaccacacagtgtttccaattaatttggaaaataacaaggctatatttagtagacgtggacccctaatttttatctgcactagcccatagaaaaatgaatgacaaataagagtgtgcaaaaaacgcgccaaaattgaaattggctctctctcacaccccaccaaaaaaaaaaatattttatttcacaaaaaa

SEQ ID NO: 380090 - DNA, 3404 bp, Cannabis indica
aattcttcatagaattagccactcatgtgttttattgccttagcttatcatgagagaatttaactattttttttaacttggaatgacaaaaataataataacaataggaacgacccatatgatcattttagagatttcatagataaattctatgtagaggtgttagattttgaagggccaatgatgacttagaataacaatcatttaggaaaagttagactaggccttaggaaacaaacattggaatgctctatttcttaatgctagtcctagccatttagacttctttgactctgatcatagagccatacatttaaagcttcaacaccaaccccctaacctcatttcgggtcatagacataagatattcctgtttgaaaacttttggttaaccaaactaaatcgggaagatgtcctacttaaggcttgtaactataatcccgtgtctggttcctccatccaaagccttgctgtgacttaagaggtctgtggctgaccatctctctaactggaaacacaaagctttccttgattttcagaagagaatcatcaaaccccaaaaaaagattgaaaaggctaggaacacacttgttgactctgaagagactctccaatgtaagagaaaaatactagctaatttagataggctcatttacaaggaggaaacttaatggaaacaacgacctagagtcaattggctccagacagaagacaaaaacactagatttttccataggtttactttgaataaaaaaaagagccaaccgaattaatcacctcaccctaaaagatggctccaaatgggataatgttgatgatatcctccaagagatagaaaggttctacactgacatgttcacatcacatgtgacacttcctcaagaaaagtttttcccctcaagaaatcaagagaacccttttccaaatgccctcgacaaagctcctggtattgatggttttaataacctttttaaccaaaagaactggcatattctaggaggcacattgactgatgctgtgttaagttttcttaatcatggacctaatatctctcacttcaacacaactctcatcactcttatacctaaagtactgcgagatctatctactataaatgactttttccctattagcctttgcacaatcatctacaaaattgtctcaaaatttttgggtaataggataaaacaagttatcagtccactcatatgacaaaattaaagtgcctttctcaaagggtgacttatctctgataatatcctgatggcctaggaactcctgcatgcattaagggtaggaaaaaaaaagaaaactagctagatggcaatcaaacttgacatggccatagctttcgatcgagtggaatgaatttttatgaacataatcataatgaagcttggcttcccaagaaaatttctctccttgattatggcttgcctaaccatcgcctccttcaaaattaatattagtggccatgcacttggctatgttactccctctagaggaattaggcaaggggatcccctttccccttacctctttcttctttgttccgaaggcctctcaactttactcagacaagctgaggcgactgaataagctatagggattcaaattactaggtctgccttaaaactctctcacacttttctttcaggatgataacattctattctttaaatcaaatatccaagtctgtaatgatatcaaagaaaccctctcttgtatgaacgtgtctcgaggaaattagttaacttcaataagtcatccatctttttcttccaaacgctaacttaacctaccaaaacctcattcaggattatatgggcatcccttccactaacagcttggataagtacctaggcttgcctttgtgttttggccgctcaaaaaacatttctttaatctggtaatggaaagaatctggtcctatcttgccaaatggaaaggaaagtttttctcaaaagggggtaaggaagttctccatataaagccgttattcaatcaatttcatctaatgttatgcctgtcttcaaattccagcctctttttataagttttttgagagagaaatgactaagttctggtggggatccaatgagggggaaggaaaaatttattagaaaaaatggaatgccctctgtagctctaaattttgggggggactagggttaagatcttaaaactgctttaaccaagcaatgctggacaaacaagcttggagaatccactccaacccatcttccctacttgacaagcttttcaaagtaaaacattaccccaagtccaccttcttcgaggccagtatgggccacataccctcttatgtttggtagagtttgcaatgggcaaatagctcttaaaaatgtattcgttggagaattgagaatggaaaactgtgtatatatttaccaagataactagattctaaattgcacctatctccccttcatttagctgcatcacaaactcgagcctctgaccttctccttgccacaagtaactagaatgtaaacaattagtaacctctttcctagagatgttgtcctggttatcctctcctccaaacactaaaaagctagacattctcctgtagcagttactcaggcaagtacacagtcaaaacaagttaccatctcgctcaaactattcgtcatgctgccaagccagcttcctccaaccctaatacactcaccaactggtggaagtacccttttggaatttttgcattgcttccaaaatcaaactttcacccataggctttgtcataatactcttcccacagctatcaacccgcatcataggaaaagtagcccttcccccatgtgttccaggtgtggtaactttcctaaaaatactcagcatgcttttttgaatgcaagggtgtcaagagggtttgttaaggtaaagaaaggaaaaaaaatacttttgacacactattttttttttcaaatatcaattgtaattaaataacttcgaattatttctttgtgttatgttgaagatttagaatagtagaaactcctttacttttaggaatatacaggaacaacctctctggatatatcaagaagacaatgacttccacagattctatcaacaagattaacaaaagcattctccaggtgtttctaattacatcacaacccacaaccgtacatgaacaccccagagacaagactcttaaagcttaatgtcgatggtgtagcgtccaatagaaaataaaaaataggatcaagagctctggtttgaaactctacaggccaagtgattgcagcctttacaaagagttgtctaagaatgatgcccccaaacactactgaggcatgggccttgttacaagcattaacttgggggaaatttacatagtatactaatttttgttcattttttttacaaaaata

SEQ ID NO: 380091 - DNA, 4408 bp, Cannabis indica
aaagttattctcatgcttgaaggaactattgaagtttcaattcctcctgacccaactcattcatcagttcaatatagttccattcccacatttgtgtacaattatatggtttgttatgtaatcagtcttagtgtaggcttaatggtattatatgtatcaatcaaacactttgtgcgcaatgcaatgtaggttctcaatatccaaatacaatagttgataaattcatcatcatcatcatagttaattatattttttttttgaaaagagaaagggtccataagtcatagacagcacccttccagaaatatattaagaagcctcgcttatggcggaagaaaaccatattacagagaaacatttagaaaaattagcacaccaaaggtgctgaaaaatagtagagataattaatgactctcctaccacaataaattccaatctctacataaatctaataaagacaaatcctcaaaaaacttggttttaaaaagccaagtagctgtccagaatttaactttctcccacaccgcctctatcgaattcccaaccccttcaaaaattctagcattcttttccaaccacacagctcaaattgatgctagtattgccattctccaaatctttgttttacgtttgctgtcatttaatttgctaactatcaaggctagtattctagcattcttttccaaccacacaacccaaattgatgctactattgtcgttctccaaatctttgttttacaggattttgggctacaaaaacagagttcatcaaggctaattctgcttaagaagcagagctaagtacaatttccatggcactagtgtgggctttagaagaagaaaggcaagaaattctcttagttccggactgtcaaaccgcagttcatgctctagctattaatcaatgtcctaaggattggagactccttaacaagtcgttgtcaattttagattacagtagtaagtttaatatttgcaagttttattacattaatcatagtttaaatcagtatgcggacggtttagcaagaagtgctagagtttctagacaatctgcagttctgcttcaaggggagggtgatccccctgtgatccccaattttctcttcgtttaatgaacttcagttcttccaaaaaaaaaaactatcagttgtggtacaaatcttagcataacccacgacaacttaaatacctttatcagtctggcccataattgccgagtgaaactgcatcctaagaacaaccaacgtcttccccgctagctttgcagcaaacacaatcagctataattaaattggttagttgtcgtcgttaaattaaatcgatttatgcacacccttcttacaaaacatcttgcttccttttccaaaagcatcttgttttctccccctttgtattagaagagactaatactccctctgatatgttatccttatgcttggatgatttttctcaatttattcaaaataacaataataataaataccccaattatctacatacatgcaataaaaaatagcttcattttattttaatttattaattcattattttatgttcgaaactcaacaagaagatatacatttatacattattcttccatatagacgaaaattaagagacaaaaatatcaatatgctatcttatgaagctagtgttggttagcttatttatcaaggaatgaatttggcagtgtgcttgaatttggcatttgaattagaatccgacatttggattgcctgaacctgctgcagcaactcccattccgccaccgccatctgatgtaactcccaacttctcggcgtcacttgagtcccccagatgaatcctttcaccatccaactcatgtacaagctcatcaatctttcggaactggtaaggccatctcacattgtagagaaattggcggaggtcgaatctattgtcctctggtgagtagctctgcacagagacagattataaggatttaatgactaaacaaacaaagtcctcacaaatgaagatgatacattccaactcaaagttcacacacagaatcaactttggtttagcgaataacattatacctcagcatgataagacggtgtcagtacagtcattttgtgccgattaatggaatagtacttgaagaagaattttactttgtcagccacctctaatggagtcaacctcgtaccccatctgtagcagagattctgcaaaaaagtaacaaccacatctcaacaagtcagaaccaaactgttatggactccactttgtacctggcaacattattaggaaaatgatattatatataaggtatatgaataatttgatggaattagtttgttggggtttttcggtattcagatattgagactttgggtccttggggttgggagaataggagatcctctcgaattaccttcaaactttgtatctgaccgaaaattttaacaagaattggggtcctaacagaaaaagacaatgagatgtgaaaattaaccttgaacatagatagaggtccgcaacggaaaatcttccttaaccttccatagattgagagttcctcataactcattcccatgtctacttcatccagctgaactccacagaaagtttaatcagtttctctctatactaaggcttttttctgtctcagcaaaagcttgagctagataatacctgggtgtaatcagaacgtataggctccagttcagcagtggggggagctgcttcaatatcagccaaggatgaaaaaccgagatggacagctgcccatcgtagaaatgctcgaagatcttgcttactaatacttccgattggatttatatctgcagagctgcagtcgtactgtgaggaaggggtgattaattagctctagtattcataattcttataactgaataattgcatatcatagtcgggaagaaatcaaactcattaggatctaatttacgaaatttaatggcaaatatctaacaacctttgtaaggtaaccacgtaagccttcatccacattagagctacccagcacaagataaaacccgggtttgctatgcacccatggcaatagtgatgctaacataaaagctagaaccattctaattcgagcttgaatattttgcaaacctaagttctcaatatttgatcctccatctacctgtggaaaaaaaaagtaaaggtaacagcattccttttctcaaatgctaataaacttggttgttaacagcattctgatgagtcaaaagcatgagaaaagagaattttaaacagatttggatcgtggattttctggtctaaatgttcatagttcatctgattttatttattgtcatacatacgtgactacattttgccaaaaactattgtagtttgtgaccaaaaaaaatataaatgcttggatattaattaattcttgttaccttatagcgtggtcgcttcccagtaacggtttgaaacagggttaaaagtgaagagataacaccgtctatgcaaacatcaagatgccatgagccaacctcatctgctagcttttttgcccttgattttgtggcttcagaactgcaataaagaagtcaatttaaaggccttcacttatttcatattaaaaacatttgtcaatttcttgagcgtgtccacctgttttctgttcccatataaactgtgtaaaatatgcgttttgcaaattctctactgtcagtaggaaactgtccgtctgtataatttccaatcctaatagcatcagccttgacttgttcatccccatttgcaatttctacaagtgagtagagtaggccttgccagttagttatcagaagcacatgattattatcatcattattttagcagtagtgatgataacattactgttaacatttaagtagaacatatagatgtaccgaaaatgatcgaagttaaaagtagcctcttaacagagctttgctgtatcgagaaaacaaacctttgacaacaagctggcacatacagccaactatagcagcgacagatgagctatctgctccaccagatagaggaagcaaaaagccagaagctccactccttcgtaaatagtcccagagccaacaaccaggaccatatgctatttcctcctcaggacagtggtaagtaatctatgcatgatgagcaatttacatttagtccattcagcaaaaatgtacattagtccacagatgaatgcctaacagagtcaggcctaatatatatgtagttactaaggaaaaaaaaattctagtcaagtattgaattttcagacaaaattaattaaacaaagttgaaagtgattgtacttcctttctaatgtagacggtggttcaaaatcgttaccatctttttcccattagtaaatgatccatggaaccaagtactaacatatacgatttaagctttatgagaacttaagtagtaa

SEQ ID NO: 380092 - DNA, 1460 bp, Cannabis indica
tttttatattaattatattctacataatattattctcaattctaattctagtaagtggtcataattcgtaacctaaattatgacttaattttgggactaaaaacattaaaatcatgagaaggctattagacaagctaatatccattgtgaaaagagctttccaatgccatttgaaccgcgtcactgagatatgatcaatatacggaagaattgtgaatagtggcacatagagatggcactgctcgtgaaaaccttgcatgcgacgagccttttcatttttccatggcaatgctcatgttttacttgtctactaacaccttgaattgtgtttggaaagtctttatggttggcaagaagtttcttgggtttgattttggaaaccttgagaaactcttattgtataccctacacgagcagtgtcattggggaatcacattggtcgtgtatgacttcaccccaccttttggtggcttctctcattttttaagtgtcccttgatgttgaaaaaactcatttcgccactttcctcctttacaatttttttgggcgagcactgccataatggtgtggcaaggctcatgtagcacccttgggggattattccttgtccaattttgactctatgttcttgcacctcaataagtcatatacttttaaatttattctagaattaggcttaacaacaaccctatctcggattcataaagatgccaaccctaggtctgaaatcctagggtgcaagcgctgaaactagtaattagtctgtgctcgcgtaaaatattgatgctaaaacttagtatcaatgtcatattaatttctctctcttaataaagccaaaataaataatatattaaataataatctgtaagatatatggtagcaaatttgaggagtgcttatcattgtagaactttacaagtaagagtgccaaaagtgatgtggaagagaaatataataaaatattatattttcagatgatacagagagttttaacacttttaaaaagtgtaccattgaagatgctctaagagctctctcatcaatgtctcagctctattcttcaaaatatgtcactaaaattttactttttgtattttacatcaaacttttacattacactatacatgtatttttctattttttttttctctatatcattcaaatattatataattattaatttaatatattttatttattcaaaaattttatctcattatcaataatatctctatatctttaatatttattcatatataattaatattaaatataattataatatattttaaattaactccgattgattaaacaaactaaaatataaattaatataaattttttgacaaaataaatatatgcaatttatatatgtgtgagtgccactataaaaaactgctacttttagtgacaacttttcagttacaatataatttttttgtaactaaatatgactttta

SEQ ID NO: 380093 - DNA, 1288 bp, Cannabis indica
ttttttttatatatatataattaggttcggattttgtcaaacttctaatacttaaatatggcccgatttggtatcgggttgaactcgaacttggccttgtaatttttaaaactgatttttttttggatattttgaattcgggttgattgggtttgtcggataattgatttagtacaaatgttttgcccttcaaaaaagagttcgtggtttgaatccaccccctatatcaaatgagatattattttttggctaattaagatttttaccccgaaatgttgacatataccaaatcatgcctcctaaacttttaagatcgttaaaattgtcactgaactatgtagattgttggatttaaggaattttgtccaatgttagtaaaaaaatctaacatggatgaaagttcagggggcatgatttagtacttataacagatcgaggggcatgatttagtagatatcaaaattcgaagagcatggtttagtacataagtaattattaaaatagtaaaattgaataaaattagacaaaagcctttaaatctagtaatctcaatagttcatggagaatttttaacattcagaataattcaagaagtatgatttagtacatgttaaaatttaaagggcaaaaatcttaattagccttattttttttagctaaaataaattattatgtatagtacaattaaaaaaaatctgtagtacattcattttaaaaatgtggtttttatatacacttatttgtttttctgtttaggagagcattttagttcttatatttttgtataatcatgtacgttgtacttattaaaaataatatataaatttttagaaaattttaaataatttacaataataaaaatataaaatccaaacaatttaccatccacataaaaaaaactatcataagtataacaatatatatatattttttttgtagagaatgaaacaaaatatttcaaccttaattttattctgaattttaaaaataaaatactaattatcctaaataattataaaaaaaatcaaaataactaaatagatagaaaatatacgagaaaagtctgagtgtattgtagaattatctcaattcttattcttctattttgattacttagtgatggaggtaggatttatacgtgaaaatatatataaatttatatgtgaaaatatatataaatgtgacgtccccgcttcaagtttctgttgggccctaacacccacggactaatggctcttatacacgagtacgccactctggctgcttcctggattgatgactgacccta

SEQ ID NO: 380094 - DNA, 3137 bp, Cannabis indica
atatcgtctagccttgactctagcactttgagcatttcacaacgtattccttatctctatgttacaaatacgtttcagatcccactcatttgctgagttatgagagcttggaacttcaaccagatctatcgtacgaagaacaaccagttcaaatcttggacagaaaagacaaagtccttgggattaagaccatagtattggtcaaggtgctctggagaaacagtaaggtggaggaagccacctgggagttggagtctgacatgaaggctcaatatctagagttgtttaggttagatttcgaggacaaaatccttttaacagggggataattgtaaagaccgcttagctttaaattggaattacatataattagggtataactatgaaactataatattaattatgatttatcatttaatggagatttatttgaattcaaggtgtattaattatgacatatatggaattttacatttttgcatgttttgggtctgacaacattagaacgcgatgtttggccaatagaatcacatcttagtattttagtactagcggggcaacttagttagacattaggaatgttgggaatgcttgaggttttggaaatgaccattttacctctagatcactttactagttaagcttttttttatcaagaaggagaataacttcattaatcaagaaaccaccaagtacaaactagtaaataaggaatcaaaactaaaccttgaagacaccagtaaccacaaagccaacctaatacacttgcatttttacaagaaaggctctctcaactctagtcattctcttattcttaacactttgtaatctatacttgactatattttttacattatccacaattgcatcagctgtacaagagtatcctttaaaaatacatatgtttctatttacccaaatgttataacagaccgcagcaacaccacaatcaagagcctattcagcctactaaaaccaacaacagataataaaacaaaccagcctttgaaaatcaacggccacaattgctttcccaaccaattgaaagtgagatcaaaaactttccttgacaaccagcaatcgaagaacagatgctcatacatctcaaaccactcttcacaaactgtacagcaaaaagaattcaactgaatattcatctttgccatgtttcccaagttaaaagctgagaattaaccacttgccaaagcacaaattgatgcttaggcaaagttaaagagctccacactactttgtagtaagaaatcggttgatgaagtagaaaagaattataaagtctactggttttaaacataccaaaggtagcagcaacactaatttcctattcagaaaatctcttccttatctgacacaacttgcgccaataccaactcacatccggttttagagtataggaccaaaaagagttatcctttaagtaaatggtattgatccatttagcccaaattatgtctttcttagaagtcaaaggccaaaaaaatttagcacgattggcatagttccatctagctccttctttgaaccctaatccaccataagcttttggaagaaacaccttctcctaagaagccatatgaattttactccgatcgccatttaggccccaaaggaagcctctacacaatctctcaatttcctcattcacactttgaggtaaaacaaatatattcattcagtaattcctgagaccaaacaaaactgaatgaattaattgcatcttaccaggaaacgacaagtgcctactagcccaagtgtgcagtctctgcttgattttctttatgatgatgccacaatattttatcttccatttagttggcctcaaaggtattccaagatatttcagaggaaaggtcccttcagcaagtctaattttagatagcatagcaagcttctccctacgatctacatccctaaaataaatatgagacttctcagaattgatttgtaaacctgatgcattgttgaattcctccaacacctgagtgagagcatcaagggactaacttgaacccttgctaaacaaaataagatcgtcaacaaagtaaagattgatcaatctaagaaacttgcacatcaggtgaaacctgtacttggttgtcttggctgccacaagaagtaatctagtaagatattccattactagaacaaagagaagggggaataaagggtcaccttggcgcatcccttttcacctttgaaaccccgttgaactcttccattcataataatggaataagatgtagaccaaatacagatcatcacccaacagataaacttttaaggcatgttataggcattgagaagatcttcaagaaaatcccagttgattgtatcataagccttgcttaagtcaatcttaatggcacatcgaggagaaactatcttccttgagtagtttttcaaaagatcctagagaatcatcacattatgagctattgaccccctttttatgaaagccccctggctctgatttataaccttaggaagtaccaaagatattctagagcaaagaagcttagacacacatttatagagcaccgagcagcaatcaatcgacctataatcaattgctttagtcagattttcatgcttaggaatcaaagatatcatagcagagtgaagcttaaggggcatgttacctgtctcaaagaagttattaaaagccctgcagatttcttttccaatatcatcccacataactttgaagaaacctgaactaaatccatccagaacaggagatttagtattcagtatgctaaaaagcactcttttaatgtccttgtttgagaaaggctgcactagtaaaagttgttgttctaggtccaatccccctgactgatcaaagcaatgttgattcaagccccctgctcctgcattttttgttcccatataactccttaaatggttcaaaaagtgatcagcaacatggggaaaatgatcaatgacagtcccttgctcattagtaaaagttgcaattatactttcaaccttccttttcttaagaaaagcatgaaagaatgaaaatataggaataggaatggaatagaataaaatttaaaatgcataaaaaatttgaaaaaaaaaaattattaaattatttcaaatcttgcattggaatg

SEQ ID NO: 380095 - DNA, 1296 bp, Cannabis indica
ataaagaaatagatttatttcatatggttcacatgtttatttcctgaacatttgtttaatttataaattcatcaaaattcttatcacattgatattcatctaaatctttaccactgaagaagagctatcttccaaggcccacacaaagcgctcctaggaacaacataattatggtcaacccactcttgcagaaagagaggaccgcttgagccctagggctagaccatccaattgatatggagcaaagttgagcagaacgatagacatggtattcaagtatcggagcctaacattagtggaaggaaaaactgccccagtaattttgttaaccaaatcgtcgaagtggaagacttaaatctcaaagacaacatgtcaacaacggacctcatggaccgtttgtatgcgaaaagggaaaaagtaagatgtgaaaaagccaggcctcatgaaggagaccttaaaaataatatcaatgaccaaatgcgggaacgtgatatcccagatgataacaccagaaggctggagaatcaaatcatcgccttaaccaagatcatggaccagctggttcgcaagtaaagtggcactgttctcactctcatgatgagaacctggagccatgaatcaaaaggattttaaaagcgtcgctacctacactcttccgcatgccctaaatggacttatacaaaggcaggacagaccccagaggtcacttgtcgcgatataatagactgatgattgtaatgattgcatacttaaaataaagattagtagggaaattagcactaattagctatattatatgattatatgtgattattttatatatcatatatggtgggccctatttttaagaaataggtattagggttataatttctcaattttagatattttattaaactcttggtgtattatatttgatatatgtgcaatttagtatttttatgatttttgttcggtaacgatagaaatgcgactgtttggccattagagatacatgggtatggtatagaaccttttttagaagggtatacttatttgatattgaaaatatcaggattaatcggggttatggtaatggactattttatccctaggccttaagattacctaagtgagaaacaaggggcaaattggtcattttgcctaagaggttggttttgtttttagtggtagtggtagaactttctaatgttttaattcattttattacctaaggtttaataaaagaaattaagggtatcgcattagataaacataagtaaaaagatcaagtactctacccttctctctctctct

SEQ ID NO: 380096 - DNA, 3828 bp, Cannabis indica
gcatgcaaatatagaagtgtcattattgaatgtgtcaactatggtctgtctatccgatacctgagtactgagtaaccaaaatcagactttgtaagtacgcgtgataaatttagatgagctacaaactatagttcaaataagctactgagataacaacagacaaaggtacttatttattgagatagatcagtttgaatagacagacctaaaataacatctttctttttttcttatttgaagcaaaacaccactacttttattattattaaaaaagtagaaaaatacatgaggtaggaaggtgtgtccaaagattgtaccacccacgcacagagaaaaattaaaaaacaaaacagaaaattcaggaaggctacaacattgcgagaaaacctatggttaatgtagtatcttcaatgaagcttcagattactaatagatcaaatcactgatgtgaaaaaacagatgtttcatgcatataaaatcctaaaatttctgtgagaaatggacaaggattcaatgtggctcaaactttaatcagatataagtatgagctcttataataacattgaattataccattcaaaaacttggttgtagaaataagaaataatatcctataattacaggcatactcattgaaaagtaaactactttagcttttgatctttagccaaaaaagattctaacagagtagaatctaggaaatggggtggcagcaaataggggaaagagataaatcaacttcaaaaccataggttcaatcaggcttccaacttcagcatttaagtaaatctacaaaacttcaacttatcgaacgcgataaacaaataaataaatgaggggaaagagagagggagacggaggaaggaagaaaggaagagagaagataaatgatgcaagtggaaaacaagagaatgtttttgaaaagatgaataggaaagctacataatgcgatctagcagtcagaccgtgcatattgagaaagaagcaagcgaaaaataaagagctaatcataaaacccaagaacactatacatgcagaaataaacaaaccacgtcttatttcatcaccaagtgctacaactgacaatagaagccgcatataaagtcctcaaaatagattaaccacaattcataagtggactcaaatattcagacaacttttacatcacccaaattgcaaaataatacagtgggaacaaaaatcttcatatttactcaataaaacatatcagagagagtccttagaaatgatttagccaatcagttaggtacaaacaattgaaagtaacacaaaccagatgctagagcaaattttttaaatcatgatgaataatttgtccaagtcaaataaagagagcacttaccttccatcaagacgtctatacgaaagcccaatgacatccagagtccactccaagatatcaagcattgatgtccactggctaaagatcaggactctatgcccagcttctttaagtgaaggaagaagttcggccagtgcctattaaaacagcttagatctcaaatttaagcgtaaagttcataacaaaacaatatccatccaaactgtgtaaggccatttaagcaattttcaaaattaaaatcatacctgacattttcctgaacgcatcacatgtttgtcatcaaggatacccttcgaatcagtaatactatgataaagtaaaagctgcagaaaacaccattaaaaagcattaatgccaaatagttacttaagcatatgaattgattctagtaaattcatttgggacactgtaagggtgctgatattatatggttggacactgtatagctagtagctactggtatttggcctagtaaagtcgtgtgtgggtgcgcaaaaaccattaaatcagatacagtgtccaaccatgtaaaatccaatgattcattatccgttcacagtagcagatttaacagagaattacaagcaaacatgagaggaaaactatgatccacaacaaacatgaagttacatgatgccccacctaaccctataatatttggggacgaagaaactattgtaggtactctgagaagggactcaaatttaacagtgtccaaccatgtgaaatccaatgattcattatccgttcacagtagcagatttaacagagaattacaagcaaacatgagaggaaaactatgatccacaacaaacatgaagttacatgatgccccacctaaccctataatatttggggacgaagaaactattgtaggtactctgagaagggactcaaatttaagaccttgtggtagcgtagcgaaaaccatttgagctacacaatatttttatataccatgacaatttatctactgagtgtttacaaaaacgtcatagctggtaaccttttatacaactggcaaggatagagcaataggcaaattgtagagattggtgacataaagagaggaatcacaccattcccataaattatggacagaaatacataacgcaaaaaaggtagaatattttttaaattctgtggtggttgcatattttctgcagcttcgaggtggaatcattttcatcaactagcaaggacaatgtgatagtcgacgaaatgagaagttagattttcatggaaacttcatcaaaaatttgatacaacggaaatcagagcagatctcgagattgataataatactggactcagttgacttccatgaggcagtttttgtatggtttgaaagctggaaaattgggagatcttgtaattttgtttaaagaattaaccgtgtgatagtttgcctattcaacattattcctttgtttggaaagctcctattccgccaaagtataaaccttactttcagctagcttttgactttggtcaaattaaatatttacaatattctatagagggataacttaatttagatatttaaaatgaattgtatatctacggttcaccttttgctgcactgttctatggtagcagggctttgattcaagccttctatacaaacattctataaatataacagcatcagttcatgtttctaatttttattttctttttttgaaacccatgggtaatctggccccaccccaactaatcccatagggaaatacccagcagcaggccctaccatcaggtcttagggtacaacagggtcttaatgtggtggccaggattcaaacctgagacctcggcctaagttagactttactcaaggaaaccttcccactacactaaagccctaggggcaattttatttgtttattttaaaaggaaaagtttgatcctaaggaagatgaattggcaacctcatcatgaaaagtaaataaaatctatggatcatggaaataaatgctaacatcgacatggaaaatcatgtatccaccctcactaaagtataagaaaaggctttgctcctcgagcttttacccagaaaatattcaaacttgcttagcaaatccaagttttaaatgggagctccccacctaatcctataatattttgtaaaattccagtaacaagacatgtattgaaaaaaaaacttgtagagaactcaagttgatcaattcactcaattgtgttttcaagacaaaatagagacttctctatatggtcactatgccaaaaacataattttgttcacattttcccctgaaaaaattggttgacctcatcatgacaaccacacacaattttaagatattaaaaagggaatttacacaatatcctcatattgaaaaccaacaaaactaaacatgaattaccagcccacattactaaatactagatccactaaataaaataaataccaaaaatgagatagtaacaaggatgtaaaatcactt

SEQ ID NO: 380097 - DNA, 1303 bp, Cannabis indica
atatatatatcatcacctctataccgttggatttgaattactgcatgtagtaaagtacgtgagaaaaaaacaatacgatttttcttatttttgaacgaacacgccacaaagaaacaaaacgacataatatgatgcatttaaaactgatgaattagtctgcattattttttcttctttattgtaggtaccttatccattccagattcactttaatattttacaattattcattacaaaaattaagaaagaaaactagtagccctgctgccccacttttccctagtttcttttttttctctaccaccaaaccgaacaactcatttttttcttcattaagataagaaaatcataatcatggatgacaacaacttcttgcgaaaaaaaaaacaaaacaaagggaaaatgaaaaggaagtgacaaattagagcaaaaagataagaatacatcgtaacttgagaatcttatcgcatcacactaggctccacgacgctataataaattttgtatgggcccaaaaagtatcattacataaataataaataaataaaataaaatataaaccattctcttaccaaaagtgagacactatataaaatccacaaccaacctcaacaacaccatcttccttaccattcttaccaattcatttatagtttcagttatcgatcttaaactaaaaaaaaaaaagaaaagaagagcacacaaaaatgttggccatatttcacaaagctttcgctcacccacctgaggagcttaatagtccagcatcttacaagggttcatcgaaaccaaaactcccagaagaaactcttcaggattttctctctcatcatcctcaaaacaccttctccatgacctttggtcatgctgctgttctcgcttatgtaagaccagatagacctttctccctaaaccagaggtagtaattaataaaccatttcgttttccgatctactactctttcacttgattttcttaaagatcctatttaattatttgttaatttttttgtacaggctgttctgtggttttgaggatatttactgcctcttcttggggaacttgaacaacctgtgttcacttaataaacagtacggactaaccaagggaacaaacgaggccatgtttgtcatcgaagcttaccggaccctccgtgaccgcggcccctacccggcggatcaggtcgttaaggaactagacggcagctttgcttttgtcgtttacgacagtaagaccggttcagtcttcactgcactggtaattaattattatttaatttcaattaattaattagttagtaaca

SEQ ID NO: 380098 - DNA, 2036 bp, Cannabis indica
tatattatttaattaattaacataaatgatctcattaaatatttattaattagtagtaataattttaattaattaacataaatgatctcattaaatatttattcattaatgttactattattttaatatataatatttttttagactatcattgattcatgttgatatcttattcttatttcagaagataaaaaaacaaataattttactagatatgatttttttaaaaaaaaattaaataattgttacaatacccttaattattttaaaataaaacatatttttatataaaagatatcattagaagtataattttccaaattttcttaggacatggtcggtttgacatgtgtaaaatattcttattagtaattactcgagaatttttttacaaaaatataatttttatcgtgtaataaaatctctcagttattttgtcgtgtattgtttaaaattatcatataaaattacactcaaatacaattattaatgtaattatttgtgtaagttgccattttttttagtgtaatgcatataattttttaaaaaagataataattaatttttatttttaccaataataaatgattttttttttctttttcttataaatacatatttcagcatttaagatgtcactaaaactacacttttaatcattttattttttacatttaaatattttttattctaatatgaaatttaaaatatagtgttgaatatttttgaaaagtacctaatccaattttagaatattaacaaatcaaaaaaatagcaaaaaagtaactaaaatgacattagatactctaagaagattctaaacaaaaaattgtaatctaacttttatttttttcaattttgataatatttaattaggacataaatataccgacgtggcaggatttcaatccaataaaatcccaccacgtgtacaaacataataacccgagtatctagcctacacgctttaactttccccaacaataaacccagaccgtcgatttcaaccaagacccttaatccaacggtgaataagatccgcgctttctcatagaaccatcatagcctcgctttaggaaatccccaaaataccctcaaccccttttaaacatattcacaacccaaccatcacaacggataatgtaattacccaaatacccagaggctaaaatagtaaattcaactaaaacaggttttgattcccccaatacgcttacaaacactgttaaactcttctccccaaaaagaaaaagacctgtcctttttcgtcttttcccttatattattaaaccttctctctctgtttttctctgtctccttcctcgagctctgaaactctctttctctttctctctctaatttatattataaatacctcaaatttctctctctacaaaaacttctcaatccatttctctctctatatttccttcagaaaataaaaaacccatttcatcagactttgaagatcaatcaaaacccatattctatttccaagatcaactttttatttattcaaggtaattatccaaagtttcttcttttatgtttttgatccaaagttggtgctttttatttattttgtttataaaaattgtattttaaaaacttttttttttgtttgaaacagaacagagaagagagagagttgtcacttgtcgacggttttaatgttttcttgagattcacgttacgaagacgacgatgagaaattgacggtcgttgtttctgtttctcgcggtattttgaagagaattatttcaggtgagtaatactcgacgatatattgtattttttatttgctgcttcgcatgtccatggtagtaactgtgtggagtccgtccagttcattgtagcctctttatttgattttgggccggtttgtgggctccacatgaaatctagcgtaatgtagtgggcccatttggaacggttcaagatgttaattgaaattaaaaaaagaattatgtttatgcagatttttaaatatttttagatttttttatgattttattcaaaaaaatatatggtatttt

SEQ ID NO: 380099 - DNA, 2971 bp, Cannabis indica
agcttgatggcttatggggtttttattgttgtattgaggaaagaactttagtaataaaaacacaatacaaatgtgaaagattacaacctgaaatgtatgctaattttgaagttttttccttttctcaattacttgaagaacatggaaacagattcagggtgtttggaaagccacattgtaaatagaattgagtttaattcgaagtaattacaaggtttgagtgtgtgtaattacaaaatattactatgtttagatttttctatctaattactatgtgattactacttattatccaaacacaacttatatcttaaagtacaatctaattactaaactatggaataattattgtaactcaggaaaaaattgaataaattgatctcagcagttttttttgagtagtggattctgttttattttgttttgttatttaggcattgatattggaagactaccaacattttgatttttttttcatgtgtgaagtgttatgattaaatgtgtttaatccatccaaatcaaatcactcttaaggcccttatgaagttttttttttgacattgaggcaggtagagcttgcaaagcgcctagtggattcttcttttgctgattgcgtgttcttctcaaactctggaacagaagcaaatgaagcggccattaaatttgcgaggaagtttcaacgacactcaaatcctgattcgaaagagccagccacagagttcatctctttcaccaactgttttcatggaagaacaatgggtgctcttgctttaacaagcaaagagcactacagaacaccttttcaacctgtcatgccgggagtgacatttgccgagtatggaaacatacaagctacaaaagatttgatcaagcctgggaaaactgctgcagtttttgttgaaccaattcaaggcgaaggaggcatttatagtgccactaaggagttcttgcaatttttacgccaggcttgtgatgatgccggtgctcttctgatctttgatgaggtaatcactatacaattatggtacggttgggaggaatgaaaacacatgaataagaatagaataaaataaaatttaaaatacataaaaaaattattaagcataggaatgccatttacttctatttcaaaatagaatagtctttccaccaaaacgatgaaaaactcattctattggaatgatatctcaatacaaatagtactacatccttatcgtgaaatattgattgcttgttgaaccctgtaaatatgaattatgtgaaagcaagatactccaaatttgggagtcttccattccattacctctaaccaaaggcaaccttaaatcttctaattgcttccaaattacatttttgaaaggtcatctgtacaacatcatatattatagtttctatagtacactatgctacttgtggtagaaatcttcaaattttctttctataatatacaaatacaacattatagttactgcttgttttgaaagcattggtacttgtagttgctatgttatgattgaaatttttgcttcatttgttagatccaatgtggtttaggcagaactggatatctctgggcccatgaagcttatggtgtgttcccagatataatgacactggccaagcctctagccggtggcctacccattggagctgtactcttgaccgaaagagttgcttcttcgatggcttatggtgaccacggaagcacttttgctggttcacctcttgtatgcaaagctgctcttgctgttctcaataagatctcaaatcctaatttcttgaacagtgtctctaaaaaaggtctatacttgaaagacatattagaacagaaactgggaaagaattcacatgtgaaggaaattcgagggtctggattaatcgttggaattgagttggatgtatcagcaacaccctttgtcgatgcctgtcgagactcggggcttctgatattaactgctggaaaaggtaatgtggtgaggcttgtgccgccgttgatcataaccgagcaggaacttgatcgtgcggtcgagattatgtgccaaactttgcctgctcttgatgttaatgtttagaacaaactgcaattgttgaaatcattttccaaagttggttgttgtgtttaggctatagcaaattctgtaatttaatttagtttagtggcttaacactttcatgagagttaataatgttattgttttgctaaataaattgtcattaaggtaactctagtgaccacttcttttgcataagccataagtgttgtttgtttatttattttgaggaaattgcaaaaaggttaattttttttttttggctaaaatacataaaataatgtcatcaccaagtaaaacaacaccattttggtgcctttgagaggttacaacttaccagatattcaacagaaaaaaaaaatacagaaaatatcattttttttgtctaattgtaatatttatacagttaaaaccaaaattttacatttttataaatctctttactgttttatttctaattataattctaaagcgtcacataaaatcagcataaaaatacaataaaatagtatgaagataacataaaaatatagtaaaacaatatgaaaacaagataaaaatgtggttatattttacaacagtacgaagctttggcagagtgattatctctaaatatttcatttttgcaacaatttttcagaagttcatatattttttttctcattttttgctgaactagtttagggaatatcttagtcaacaacaaattcagagtttttttttgaaaaaaaaacaaattcagatcaattactgtttgcaatttagcttttttttcattctaatttttaactacataattataaatatgaattgtaataagaaagagaaagagaaaactatgatctcaatctcatgtaaaaggttgtagttggatcgaagaagtaatcacatgttgttgccacctactttttttttttttt

SEQ ID NO: 380100 - DNA, 3368 bp, Cannabis indica
tttttggcattactgccgtgtgtaacatatagcagataataaagagtatttcatctctattaatctcataaataaaatatttgaaattaaaaccataagaaaaaataaataatttctttatttatttatttttgaaaaaacaaaattctattggataagtcctaaatcattgttttaaactaatgtatttttatatatgctccttttatatataccgtaaaacaagtgttaggccgggttgtatttatttttttattttcttaaaaagttaggcatgccatggattaaagcaattacaacaaatgaatatatattgaaagaaaaacaatttaatgtatcaatgttaataaaaaccgtagattgtaccaattaaaatgtattaagctattagtagatgtgaaattttaattgaatttaatgattttattgatttggaaaattgaaagaggtgataattgagagaatttggataccaaattttacattatctcaaatgttataagtaattaaatagatagcagtgtatcaaatttatgtataatttatatgtgtattattcattaattatatcaatttcaacatattcagattaattaattttttgatgaaaataaatgataagtaaattacggttaaatggcctgtatattatctacttttgtcttttattttattttatttttatttttatttttattttgaaaggcctgtatattgtctatttgtttattgcatactctttatgaggacaaatatatatcacgtcaaggcgtcactagcataaccgtaaatatttatcttgtaacgtacgtacgcaaccaaactagtttttaatttctagtacttacgtagtattgcacaattctccatatgttctatttaatttttttgtttctttcataattatgagtttgatgatataattgaatgtctgagtacagtaaattatagtgtcacatatgtatttgcatgatttgtaacattatccattcacggtaagaattaaatgtgctaataagtagtttaaagttatgggtaattgtacaattcattgtctaaaagtgttaatttggtatagtttttatcagttttgagatccataagagtttgttaaataaattatttttttagtaaaaattacatggaatatagaattttatataaaaaaaaaaaattgcaaaaatatgatatttataagtgttgataaatttacccaatgccaacctgtccaaacaattaatagattttcatttaacagtcaattaacaacctacagtaaatctaactgatttccagctcagacaaaggtagttagaaatcgttaccttattactcttgaccacgactgtatttaaatcatgccccaacacccagaagtgacagagtgattttttgaagttggttcacctcgaagtagagagaaaacacaatgtgagagagaagaaaaagatgaaactttgagataaaaaaaaacaagatacaaagagttgagaggagaaatctttgagagaaacaaagataaatcgattaccttctgagatgtggctagttacgatgaactctaatgtaatcttggcctgagtaataagattgactgagcaatccttgtggcgagctcgacagaggacgtaccccagaattttttgggcgaacctctataatctgtttgttcttcttaatcgtctctttactttgttgtttgtagtgctaatcattgttgattaatcttcttgcatgaatatctggagaaatattgctaagctttgtgtatttgatcatttgtttcatcgaagattgatctggaacaatgaaatcaaaagcaagattagtaaagtgatatatgtgtgtgatgttttaaactactacgtgttctattgtctgtccaacacgtgttttcgattgaaggttaaaagagttgaccttaattcttctccaattgaatattgtgagtttgtgtaggtgtgtgtgcacatgtctaaatcctacagtggtatcagagcgaacattcttggggcaacaatttaactcacaaacacaacaagtagataatcaacactgggaaaaggaaaagaagatcaagatcaccaaatcttgattattgagaactgttcaaacattcataaggatgatttcttgaaaactcttgaacctagattaaatctgttttcaaaattgatatcatgaatactatcaaggctgacattgataaatttgatggttcgggagattataggatatggaggaggaaaattggatccttggtagcccaacaaaaattactaagggtgcttgatgaccctatagaatggctagtaggaacaaccacaacccggcaagaagaacttcttgaaacagcaacaggcatcatcatattcaacttgtctaattcaataatcagactagttgaccaagaagaaacccctgctaagatctggaagaattagaagatcaattcaaacaaaaatctttgaccaataagatctttctaaaagaaagaatctttggttataagattagccactcaaagttcttggatcagaaccttgatgaattcctaaggttgtacatagagctagcaaactcaagggagaatggggctttgagtgatgaaaatcaagccatcattatcatgaattcactaccagagtcttatagagaagtcgaaactgctatagtatggtagaacctccattacactagaagaagtgatctctgcactaaagtcaaaagacttggagatgaggaatgagaaattaggaaatcacaatggggaattgaatctaagcaggggtagacctaatcaaagaaaaccatgacataatagagagaggagcaatggccagggacacaacaaaggacaacacaacagtaataaagggaaaacaagttctaaaggaaactctaacccaaatggttgttaccactgtggaaaaacaggacactatagaagagattgttatttttggaagaagagcagtaagcacaaagatggatcaagagaaagattagacaataacactagcaggtagaaagaagattttcacaataccaacctaagttatggatatgatagtggagaagtctacatgacaacaagatcactcaatggtgattggattctagactcaagttgcacttttcatacgactaacaataaatctttactgtctaattacagggaaaccaaaggtggtaaagttatcctaggcaacaaccaaacatgtgaaattgaaggagcaagaactataagcttcaagatgtttgatgggttcattattgttggaaatattttaccaggatctagatttattaccatgtatgtttcattaacatcctagtatgaatgctaaaataatgaaataaacaca

SEQ ID NO: 380101 - DNA, 3028 bp, Cannabis indica
ttttgtcatagggatttcccttcgaggttgtctgcttcgattcccccaaagaatggtttgctttaattaaacttgaaaatcaagcgagaggacgacctggcagctaagcctggagtagttgttggtaactctaactcttgagtatttcttgagaatgaactcctcgtcgtgagagcaccatagaagcctgtcgagccattcatgtaaatagccctattaaatataagtgtcatctacttatgcactgtgacactgaaatgtaatttagttgaccaagaatcatgtgacttatgaacggacaaagcatattgacaaaaagctccactaaattagagatgttactgagaagggagctgtgacaagtaaaaaggcacctactgaacacaacccaattgacatgatcacaaatttgaacactgtttggagttgatgtgggttgagccctctaaggcttgaagaagaacatcactgaagtttgtaaagctacttgaaccaaggtggagatttgttgaaacgtggttacacttacaagtatctggctactaatttgagattgccaaatatacaagtcacacttcctaatacttgtcactcggattgatgacaaagcagggagttagttaacccccaataactattaacacctgttatgtctttgtaaatagagttaattcattcattgttttcattctagaggagaggttgtagacactagagagagaagcttcgatcaaagcttgtagctcagtaattgttctttagtgttaaactttctgtagctcatgctcaagtggaatcatttaataaacgattgctttccaaatgaggagcattgtgcagagcttgatcttgtatgcaatggtgtgttctttctaattttcttgattgttttctaaagctaaatcctcttaattacttcttagttttagtttagttcaatgtttgattgtttgtctgaatttcttgatctgcatatttgattgttttgacaacagaaaatatgacatgattatttgtagagtatcataaaaacgtttgaaaaagaagcatttgttcaagaaaatgaatcactggaagagcaattattagctcaaatgacgaattcgtaacatggaaaataaactgtggtcccaccataaattttctcatcattaatcattggttttatttgctaaagctctcttctatttttttaattcttgtcatcatacagaagagtagagtaagtgtgcaaaggacttcagtgggcagtaatgattttcttctctatttgggactttacactggcatggcatttgtttgactttcatctttgattttttattgataattatgcaaggaatatagacagtattcttcggtctctaacttttttatttcttcaattgtcacttcttggccctataaattaaactatgttgaatgcatttggaatcccaacattggactgagttttgtccaaattaggattaaaacatatgcttgatatcatttatataataatatcaaactagccaatacctactagtgttgttgctagtaaaaactcattaaggaaaaaagaacagaatttaaaagattgctgtataaaccgtattaattaatttctagagtactattattataatttaaaaagctcgattgataatcaataaatccatgttaactttatgattaaattatgttaattaaatctataatgttcacaaatcacaatgatggattgattattctccttgttatttacaactgtaagtgtagtggtgcatcttttgcaataacatgcctcatcagtggatctctttccgcaaaagaatgattcatatatacataaacatacacatttatagtactgtacactatatcatgcttacgttgcaattatcactcatgctttacccgacaaagttttaattcactttgctttattggattcacatattatcaaagcgtgcacgaagagtagccctgaaaaagcctactgatctcatatatattatctgttcaaaaccaaacacttataaaaactcatatcaaaatcatactttatttattaatgttttttgatttcattggtcttcaatggtcatatcaaaagaacacattcataactataataataaaattttgcataataccattttaagaaaattattttaaaatttaagagtatgtgtattcctacagaatgatagttataactaatgaggatgattatacatatcgtacacaaatatattgtgtgtttgtaacaaggttaagtacgtaccatcaaggaaggacatttattaattgttggtactttgaccacttaagagccatctaaagtcctctcgcgcacagctccacattttgagttggttaattttgctattaaccatctagtatgaataatactatttcattcatctaatcttctaatagagagagttcaagttacttaaagagatagaatagaactagaatcaccattgttgagttgcttttcggttttagtgttttggagggatgttaatgtgattccctattcttgaagtggtttttctcaaatgagttgaaattgtaattgagttagtctgttaggggtgatcctaaactgtgtattctcatctcttttgtactttgttcatcaataaaattcaactcttttgttcattgatttagcatattttattacattattgtttcctgaaatcgttgttatgattgttcttgatgagatttactctgcaacaaatgctatcagagcttgggtagctcaagaagatcaagaactgtgcgagaaaaggtctaaagattaaagaatggcactggccaagtaagaagtggacaaattcaatagggaaaatgacttcgggttcttgtgaatgaagattattaacggaaaaatctagacacagacacctgctcgctagactggtgagaatgtattataagttaaatataaatatgagagacacaacaatttacagtagttcactccgtgtatcgccacagtaatagagctatgtctacttcaagttttatt

SEQ ID NO: 380102 - DNA, 1472 bp, Cannabis indica
tagctcaattggaatgtgaacggtaattcttaggtaaattgttgaagtggtaatttccaaaaactaaaatatgaccacattcataagagaattgattttatctatcctagacaacggtagtctataatctttggcaggttagaaatgttactttatggaaacaaaagttgtggtaggttaatcacacagtctgaagaatccaaaatgattgtgaaatcagactagctttacgtttttccttgtaagatttctaatgaggataggaattgttaagtaatattaaagggtaattgtactggggtatagaatataccgtttgtttgtaattggagttttaatggtttccaattaattgattaagcaatacaatgatcttattcatcaaaagaaaaaagatgaatatctctcaggttgatcacttgataattttttcgtcctttaaacagtggtcttcgctcttatttataagatttctaatatgacagttattccttttgaacttatattaataactgctcataaaatccctacgtttcatataattacagcgtgtggtaaaatatataattgcatagtaacagtcatttagttttatccagttaacaactattttacaaagaagccttcttacactgtacgcatcagaaaattactattagtaattttatatttaagtctcaacttaaagaataattaaatgcaagttaaaagtattaattgttaaatagaaaacaaacgagatcaaaatagcatatattgtaattattttagagataactgagtagagaatatacacattacaaaagaaaatacaggatatacaaaggatagatgagtcaacacataaaatatctctaatgcgagacaaacgtaaaaaaaccctcatggagaagtgctaaagtaatttgcgagcagcacaatgtaggaaggcttctcggtgaaataatcgtttattagataaaaccaaatgcggttacttggcagttatgcattttatcacacgttgtaattatatgaaatatgagaattgttcatgtttcaagttattaagataagtgtaaaaggaataacttccatattagaaaccctataaataggaggcaagaccagtgtacaaaggacgataaaattatcgagtggtcaccctaagcaaaattcatcttttacgtaaatatcttgtgtaaattattctattatttattttctctaaagttttattaaagtttttcttttaaaccacaaaaaatatttcatttattgttaacgaaattttgagttaacatgactaaaaatgcatcattatttatatgttatcaataaaacattcatgattaaaaaatattagtcacattagaaaatttaccatttgttataactaatagtgcttttactcacaatattttctgtgaatgaaataaaataaatgaaaattttaaatctaaatagtactttttatttataaatattttttt

SEQ ID NO: 380103 - DNA, 902 bp, Cannabis indica
aaaattaacccatcctaggtattatccaaaattaatctacatctattattggacatactatttactaagcatatataccaataagacacaagaaaaagatcaaaccaaattaccattattgtttgttagtccatggattgaccatcatgaatggccttcttaaattgcagtaaatatgtgttattaaacttgaccattttatatatacatagttataattcacctaagctttttgtccattatttttagctttggctttgcatgtaaaatatattaataaataaagaaacaaacaaaaagtagtaggccctttttcatttgtttctttttctttttcatgtattatttgtacaactacaactgattgatgaatcaattttatatgagatgagaatgagaagatcatggaccacatattccataataataatacattattacacaccattttaggtgacttttcaatccttctatctatctctcaaaatttgtccttttactgttttgttggcccattagattagatagacctcaccttaaaccctctcattttttagattttttattttattttattttttaaaaataatagtgtagatttagatttacagaagaaacacttgtgtttgtgtttttatttaataaagttggatatatccaaaacttattaacatgttgaatgtaggattatgaaaaaattgaggtttaatacaaactagattcagaaggtatattcgtatactttcttcggttgttaaatcttttataggggcaaaatatgtcagatacgataacacaaattaaaactgcatgaaattgatgagtttagatagagatgtaaacgtggtggggtgggtgcggggattgctcccccacccccatacccgctttttaaattcacc

SEQ ID NO: 380104 - DNA, 3172 bp, Cannabis indica
gcaacagtaaggccagcgacgaaattccatgtcatgttgtcttctaccatattctccgagcagaggtctactccaaatggagtgagtgaatgcatctgtgtctggatgtcaacaaacaatgaatcaattacaattcaaaccattttctgattaaaatatagtgcataagttgattgtagttattaccatgtagtgcatatcgagcccgtcatcatcgattactacaagtgcaccacctgctggtgctctcatacacactatttcaacccttcctccaacttgtgttcgcaacaatgcaccctcaatcaaattgctgagggcctggcgcaaagcaggttcttctatggcaacttccaaagcttgttctagttcactaagttttactaagcgttgctgcttttgagcaaggggactcacagcctcaaccaaatctgccagtacatcagaaacgttgcacggtcttccttgtgtaattgacaaggtaagaaaaagataaatcgaatgaagagacagatgataattaaagatagaaaaaatctacagactacaagggaaatgatttcaactgaggtagacaagacatcaaaggtgatatttaggcttaccttatctcatgttgctttaggggagcgagagcaggaggtggcataggcatctctatatcctttaatgaagtttttaaaggaagtggatcacctcgactttggatcgtattggtagaaccatcccttgaaaagtcatctgataagtgtggcctcactgattcaggataggtgtaagtggaattcagcattttcttcattgtttcttcattgtagcggaatatattagcctaatattacaagtaaacatagtttagatgatgtataatttttctctttaaaataatgtcattgtgtttaagagagtttatgttcacagacaaatccacctttgtcaggtgaacagcatcctggagttgttggagagtatccttcatgtgatcaccttgcaccaatatgtcttcgacaatgtcattagatatctacatagccaaacttccagcattaaggcaacagaaaatgaaagagatttttcttcgaaaaatataatagtaagctaattctgggttacaataagatttcaaacctaactcacctcacctcttttcgtgtgaagagataacattttgcttaaagtccgaatgctagacagaggaccacgaatctgagagtacataaaacgaagagtaaattaaaattccaagctcattcattgctatatcaaaagtagatgtcttacacttacttgctcaatcaaatcactcatccggacattattttgccatgaggactgctggagtagcattgctttctgcagaagaatgaagcaagattgttatatatgcaaacaaagtcaggtgtacataaaccagtctccagctaagagcatataatttagtgacatgccgggatgttatgataactgaaaccaagggctcttaggaatatgagcatgatgattacccaaaactgttaaaaaaacaaaatcatttgtttgttctttttcattggaatgttataagtttcttggtttccaaattagtagaaaatgaaattaagacttaacgaccacaaaatgtaagtaggtaacatttttctgaaactagactcccttacaatatagcaattgctaggtaaatactcaagcaggaacgcctcaccatttcagctagctacccctagtctaagttatgtaagtacgcacataagtttcaatttgaatccaattaactatgtaaactacctgatccatcacataagccatagccaaagaccgagaaatgctgatagcatttgatatctgctccgcagtaaacttccccactttgaaggattcctccttcacagtctgaatatcccatgatttggagccagagtccaaagaaaaaccataacctttctgctgaggctcactcttttggctctgctcgctcccttgagttggcatttccatgttccgaaattcggcaaccaagaaccccaccacaaaagggtgcttaaccatgggaaaaactgcagctctatactcaggtacaaattccacctacccaattcaaacattcaatcgaataaatatcaataataagatatgggcacattataattttggttaagcatgtagtatatacaacattaataccagtaaaggcccaactatcatacttcttgattggaaagtaaagcttctgctgctcttagaccagcggggatgccaaaactaccaactaatatcacaacatcagctgcattcactccaggataagcagtaaccctacgcagctctagacgatccataacgtaactaccagctggtcttacatatacctatatcacattatatacttcagaaattccagtaatataattctcaaatatacttattaaaagcttaaatatccacccaaacttaccgagagaaaggcctcacgatcaacgattcgacgaaaaaggtccaattgctcaacgcagagtctctgaaaatctgaacttgggaggaccaatccgtttttgggattcttctcaatcttctgaacgaagtcgacgggggaagtcgaaacgccacggatggcagaggcaacggcggaggcggaagataccagagacgaggcttcatcggagtcctcattgtcggagacgtggcgaagagagttagggttttggagtgaagaagaagaaaagtttacgggggaaagaagaggtcttcgcggagttagtttaggtgaggtacaaagcttgtgaggattagaagggagaacaaaagcagaatctgggtttgagaaattggagagaagaggatttagggttgagttagcagagagtagcattgggaggaagaagatgaagactgaagcgaggaccgttggtgttggttgagagttgagagttgagagttgagactgagagttgaggtttcagtcgttttgagtggataagaacaaaaacaacaatggaatggaccaacctaatccaaacgacaatatgtgcaatacgacaccgtttgtatgggatctatcatatgtctcaccatatttatttaggagaatatgcataataaaacactctatatcaaatttaactcctcctactaatttttaccaaataattcttttaatttcatgaactttttattt

SEQ ID NO: 380105 - DNA, 1464 bp, Cannabis indica
taagagaaaaagcaaacccaataatagtatttttgaaaagccaattaagtttttttgtttttttttttttgaataaaaaatccaattaagtttggtactatatagatatgtttaaatatattataaattgaatttatatatagataactttcagtgtttttggtacataaataaattgtaattatatttttgtttttagtatatactatataatataattataagagatttctcacacaaatttcaacaaaactttaaaacaatttagaatgttttgatatttcatatgcacgtgtagtagtagcggtttgaaatcatcatttattatttaaaattattttgaatctatgtaactacattatatattggtgtgtaacaaaaatgccaatattatccatacacttgaaaatttcaaaagattataagtatactatgtatatatatatatatatatgtatttatgttaaatattaataatgaatcagggcaggcaagataattaaaataaatttgttaaaaatatttatatgtggatatatatatatataccgaaagaactccttctcttgcagcaagtgctaaaatatcagcacaagagacagtgttactgcaaaccctctccactcttgttttgatgtcatcgatcacatccattcctcttactgagttcctatttggaaaagcattttgttctcccgtgaagttcgctgtgtcatccaatagtatagatccatcacagccctgcaaaatcatatatattgtcataaaaattacacaaaatcccataaccaaaatcattttctatatatacatttacaaagcagtcgtggaagaacaggcgaagaatagaggcagccatgcgaggctcctttcgaacagcttgcctcatgccttggcgtacgatcagcacaagcaatggacacgtggatgcataataggatggagatagctgtgcatcgatactagaactactcataagtagccagccaattattactacaaaatagttgaaggagaaagacatgatatcagaatatatatgtaaatgtaatataagaaagcttttctacaatggattttggggtttgagagcagtggcaaggcaagattatatatgtgaagatatagtacagttatgaaatgaagttagtatgtatatataggctttataataaggtatcatctatattatattgggtaagtctataatctacactctttattttgtaaatctttaaatctgttttgggatttaattggattttttaatttttgttgttagagagtcctattaatgtatggaactataatagaatatataagaaaaattagctactcttcttactgtcaattggtttaaaaatgaaactccattcactttatctcaaattatgaaatgttagagagtttcatagggtttgaattttatttttgacataataaattttttataattttttaaaa

SEQ ID NO: 380106 - DNA, 2147 bp, Cannabis indica
atgcacattccatatgatccttcaaataccagtaataccatgaatgaatacttaaacttataagaaactttaaagtgtacataacttccctcaagggtaatccgaaagtggaagctgaaagggtgtctgagaccgtctacaatcctaaaaattgcttatgacacgcctttgacatgattctaaaaaatctgaggaactgccccctctacgaatcttcgaaaaggcacatgatgcagaaaggagattgccttttggtggcgtgcacctccattttgacatttcttttccaacgaaggtgcacgtcctcgcctatcacttttaacattaccacactttcgtacggcaaattgcttttaggaattgggtctcacttatctggcctaatagctcaaaatattgcttaaacaattatattttattctattactggaattatattttttttttttttaaaaaaaaaaacattagtattgtccagatctgtctagtctatttaggaaaactgcctaataattaggtaataaaaggggattaaggcttattaacgtctaaataatcacgtaaaaaatcgtgtattatttctttcttgatctattttctttggcttaatttttaaaaatgtttaatttttgaaaatgttagtaaataataactaaataagaaaatcataaactatccaaattaaatagatgactgacaaagattcatttaggttgatgtcaaatagtttataggtctaattggttaggattttgaatcaggcattctaaattgtatgaactttctcaccttacgagctacaatatggcatatgactattgccttaatttagtaatatgtctttgtcttatagtatatcgcaattaaattcaaatatataaaattctcactgaggtgcacaaatataatattctgtatcatttctccatatattactgaacaaaaaaatcaaagaattatataattgtcgatcataatttttttttttttggaaaggtattatcgatcgatcataattttaaggaaagttagaataataatacaagaaacttttcacacaaagtatttataattaatgtacacttataaattacaagaaaaaaaatacatattattgtgtatgacattatttatttgggataattatataaaaatatactattgtttataaaaaatttacaactttacaaatttcttacaattgtatttttataatttttttattgtttttgtttatttataaaatattccctatttattttatcttacttatatacatacttgtacggattcattaaaaaaccctattaacagtataaaaaattaaaaataaaatacacataagtgatgaccattaccattacgtacgtactgatttggctaatttgtttcgttactttatctcttttcatacatatggccaaatcacattcaacaactacttaagagtaatcgaactttaaaaccgcacaattatttaaataaaaccaaattcatacattggttgttaggtggattggtttaatagcatttaagtttcaaaataccgtaaactgggttgattccaaaattactattgctaaagggtattattggtgctcagcactttccttagtgtcatatagctattgctgtaattaaatagcgggttccatataactcaagaaaataaattttagagaatatcattaaccaattataggaacttataaaaagtgctgagcaccactgttaatcagatcgaatccaattatagcaacgctctaattaaatatgtagtttaagcatttaatatgttctcttattccattccatgcaccaaacccacttgtcgttcaatgacacattcagtttaggccccagcattagaatcagaaacttttctgtcttgctccatttctctatgcatgccacaacaatgactttgaactcattggcctaggggccttaaaacattaattgaaacaaacaaagcagggagcatattaataataagagaaatactaaaaagtatataccactttttaatgtaatgcaattaaatataaaattttatataatttaaaacaataatttttaaaaaataagagaattactctctatattattttttaattttttttacaaatttacggtttaggtttcta

SEQ ID NO: 380107 - DNA, 1525 bp, Cannabis indica
attgtaatattttgcataatattgattcaaaatgcatgtcaatatgaaaactgttttaattccagatgggtgcccttcaagattctgagaccaacagcccatcattgagaactttaccaggtcaacattttcctcttggtgtgtcagaagttgataatggaatcaattttgcaatattttctcagcatgctactgcagtcacactttgcttatcacttccacagaggtgactctgcttaatctctctcattcatgtttgaagccttattgttgagcattattactcttatattttttgtgtttagggaagaaccaaggaaattcattaatgctgatgtttgatatatattgtcttgctatgaagattaaataggagaagctacctgttgttgttacatcctttcctgtttattgagagaaatcttcttttgggagaattgcttgcaattcctattatattaagatttcaaagatttctttcccttgttttcctactataaaccttttgatgcttttctcagggaagcacatggaattgaggatggtgaaatggtggagctggcgttggatcctcaccagaatagaactggagatgtctggcacatatgtgtaaaggtattctcattgacttttttttaaggagtcctggctgtaataaaatagtgccgcacgcaaaaaaagcctatacagacgatcaataacaaacattaaagttttcacaggaaactttcccatacacatactagatttaagtgagagagtttaatcctgtttccattttgaactttttctcattgatctttcttcctcaaaaagtatcagtttctagctggaatttacctcaactttatcttctttgaactgttaactccatctagcactatgtgcaatgttgtctagatctatagtatttttcaattgcctttttcatttttgaagaaagctccactgccaaaaacctctttgttccattttttcacttcatttgatcatgaattcatacccttcccatctccctaattctatcttcttttcaccatctactaaagtctttgttaaagaatttcttttccccacatagtgtactgaaaagaccagtaaccccaatagctaggatttgaatctaaaatacatattagtttatgcataaatatgatcaagtctcttttagctttacttttggtatattcgatttttgtttttccttcttatataatgtatcacaagaataagaatgatcatctttacaggatttaccgaagagcaatgttcactatggttatcgcattgacggtccacaagattggcatcaaggccatcgttttgatagtagcattgtgctagtagatccttatgcaaagctagttgatggtcgcaaatactttggggatgtcaacgaaaagttctctaaatttcttggaacttatgattttgatagctcaccttttgactggggagacaactataagtttccagatattcctgaggtactttgtcaccttatttgctgttttgattttaaaaa

SEQ ID NO: 380108 - DNA, 1579 bp, Cannabis indica
aaaaaaagctaatatatgcaaattgaaatatagtatagtgtgatgaaaaaagtgaaagcagacatacctgtcttttgtacttctaatgatagtttaaattgctaatctacagacactgcttgtgtttgttttcaaattacttacattagctagtgaaaagatagagaagtgcttgcaaacacattagtaaaggcatctgttactttctggccctgagtttgttgttgttgatttgttcttaaataaactaataagctataatcatttttttatttcatgtgacagggaagaagcgaaaagaccaacatgatcctaatcaagctggaatgggtccgaatcctgcttatcctggtgcctatggtgcagcacctcctgtaagaatcttttcttttccctgtgcatcactatgtcaattatacattaatattaacttccttttgttatgtctagacagtgtattgttaaaaaaaaataaaaattgatcatgtcttcttctgcaattactacaaacaatgcagatgtcacaaataccatatcctggtggagtaaaatctatggtaccggaagctcctgctccgccaaacaacatactgtttgttcagaatcttccccaggaaacacaacccatgatgcttcagatgctcttctgtcaatacccgggttttaaggaagttagaatggtggagacgaagcctggtatagcctttgtggagtatggagatgagatgcaatcaacggttgccatgcagggactccaaggtttcaagatgacacagcagaactcaatgttaattacttacgctaagaaataggcaatatagacctttactgttttatgttatctcttaatgaacttttgagctttggtcctaacttgaatcttgtcaatcttttgagttgtggtatatcgagcgagacattttttcttgtgttttgattattctatttagagggaaatggaaaatggaaaagaagtgaacatagaagaattagtttggtttcactagtactcgtactaaaaattaactttagcacacgtacccattacaacaagactagcattattgttgttgttgaaatagcaagtttaacattgttagttatgccaagtagtattgttaatgcagaccgggtttttcgacccaacaccagcacaattgttagttatgccaagtagtattgttaatgaagaccgggtttttcgacccaacaccagcacggaaggtactacccgaacatgaaaaaataaaaaaagaaattctaaggagcatttcttaactttgtagtaacttggaaggttctccttccttttcctacttgaaataaggaaagagtatgttcttttgacttacactgttacacataatctaacttcagaatttccttcatgaattgttatttcctttccctaagcaacaaagtcttatagagcggaagctaaggtttctgtatctaattttagttcaactgttatcacaatacataatacaagattgtcgagaaagaaaaattgatttgcttatcaaaacataatcataaaattcttcctttcgtcgatcctagatcaacactttcactt

SEQ ID NO: 380109 - DNA, 3113 bp, Cannabis indica
tttttatgatcgtgtaacattataataatttaaggtctgcaataaaattttgagaaattcagaaaaatttaacacgttgaaaatagtatttaaactatctattacaagcgtgttaaatagactatataaattattttgaatttcttgaaattttataagatgtcttaaacaattataacgttcacaactataaaaaaaatagagtaaaaagttttttagatgctaaaataaatacgggtgtttcggtgtgcatccattttaagaggtgcattgtcgaaacaccctaatttttttattctaagaaaaatttatgtaattatttaaaatgttatttattttttattctatttatatattttttaagaatatgagaagaaaaatgtttttctaaaaaaaactagtataaattgagagtatatatttcatataaaataaaaatattaaaataggtgcttaataaatttgtagagtatttacttatttttcattaaattaatttatataattatattagtttgtaattgtactttttgtcagtttttttccccttccattctcttttctctaccaaacttagagaaatatcttctatcttctctttctatctattctattttctatccctcattattttgtttctttctaattttctttccacctaaccaaacatagtttattatatattcgtatagtttggtattcagaattctactaaaatagcttagctatacgtatataaacttttcatttcccataaaaaaaatgaatatattgaaaaagaaaagaatcaatgaaaattatataaaaaaaaggacaaacataaattaatggttattgtaatcatgggcctacgtatatacgtatacgtacgccacttaaatatgaagaaattagtctcaatcaacaagagaaagataaagacaaggtatgtatgttgtaattgtttttaaatgatttctttttagtagtggaaatagtggcaacataaataaatgcaaaattggggtacaaaataagttcccaaaaatcattatgtcctctcactcatttaataattagaaattcaaattaacacatttttcttcattataaaactctctcttaattaatatccatcagtatctcattacttttattcttctaattattttcatagaaaccacaataatgaaatgtaacttctacattttccacacaatttgatcattgttcttttctatatctttcactctcttcacactttttatgtttactatgttgtgtttttccatataaaaaaaggttgttttacataataatttgttttatgtttaaagttagtgaagtttaaagaagagttgttttgccacatcatcttttagccattttaactttttgtacgtcaaaaaaggcaattgaagtaaagaataagaacttgtttaatctgtacaccaatttcaaaaacaggacaatatgcatcaaaatcaatgactaatttgtcggctttcctatttatacatattataaaattttccttaattattatataaataaatacattaagtcaatgataaactatataattacacgtcgtacgtatatgtacgtaggcccaaaatggatttgagcccatccgatcattccagtgggccccgcacatgtggatctcctccccacgtgtgattccaccattaaggattgggcatgtgtggatagtgaaccctgaattgttccatgtgggggtcccaccaatacagcgctaatgccgtactacaaaagaaagtgtcatgctcctatgcgcccaataatatctgactccgacacgtgtaataattctattcgatacaagctgtaaggaacaaatttgttagccaattaaaaatctgattattgttatttgatggtgagcgtgcatccagaggatctaagagattaattattttaatagattgtcctatctgtacggcctatacggtgctgcgaaccgcttcggacagtagccggttatctgtaaaatatggtacacgcgctttcaaactttttttttttcatatataattaagataaatattaaaaaaaaatcaattttgaaaataaccagtaaaatttcgtcaaaactcaaagcttcgtaactcttctattattgtattgtttgttttcccaaccaaaaaaaagttttttttttatagatttcatgtttcacctaaaaatggttaatatatattttgagctacatttaactatttatgtaattaataagctaaatcaaagtcaattatctgtttatagtttattaatggttagtgtcaaaagcgtttgaataaaaaataatagtacatcgtggtacaaaaaagtcaaaagttactcttcatatgcgtattttagccatttgacagtctttattttatttttttaacaaaagatttatatttttttcgactaaaacaaaaataaataaataaagtaaaacaaattatcacttacccgtcatttattgggtattaatattttaggaccttataagacacataatttccatccaaatagaaaacaaaacgaacaaagattattatttttacttacccaacaacaataacgaaatactgtaatagaaaatatggttaaataattcggcctaattgattctcaaaacaaactcaactgtataacctagatatgatataaatacatgtatgcaaaaaaaaaaagagtcattcgtttttaacttaattagtagaaaaaaaagttgtgtgtttgtacagtaatggaaaattgtaaaaagtagaaagggatcaacttctttttggatgaatatacagtattactttgtttgacccaacaagattttctatatgacactttttagtaccaaattatttacacaaacattaccatgacttctaaataataaaatataccactgcaatgctattactatgatctacgggtgtagaaaataaaaggccaattaggattttttcttcccgaactttgacatgtatcaaatcatgctccctgaacttttttggtcgttaaaaattctccctaaactattgagattgtttagatttaaggacttttgtctaattttagtaaaaaaatttaacatggatgaaaattcaggggcatgattt

SEQ ID NO: 380110 - DNA, 1495 bp, Cannabis indica
tgtgagaaagtagtacataatctctgttatttacagctaagaatgtgcatctgcctatcatcatgcattttatttatctgttataggaaattttcgaaaatctccctttgctcaaatattctcagatgagcacctggtgcttaataatatgccagggtatttctttttcaatgaattgcgttataatttctcaagacatcctatcacacagaatatgttaaaaattaagggatgatgtgttcctcagttccccatagtgataattctgtgaaggttaaattggttaattttttcctttttttcttctctttctactcccacaaggtctgaggtttgcgtcccttctgggtacctacacagcagttgctatagtttcttgtttacaaatgtttgatccgagtttcaaaaaagggtaattatgtgtcttctttcattataattctgaggatccccagtcttttctctttagatgacttgctctttaaatattctctctttaattccaaaaatttctcattttttttttgtgttaatagaattggtcttctgtttatttatttatttatttttatatataatcttcatgactggttgaggttggggaattaccgacattattttggacctgctgtgttggatttcgaccaaatgagcaaaaatcaagaatttctggctttgagcttttatttcatattaatttaatacttgaatatttacttgacactaagcttcgagtcatgtgttaaacgaaaacttgaagataactatgcactccattttgtactggaatgtaaagaatatcacttgtttagtgttggaggtagttttctttgatgatatttattaccagatgatttagatgggttttgttattaaaagattctcaaacttcgatacgtacttttcaagtgtgtattttatatacgcttgtcatttgtgtgtgttttatgttagtacaactttcaaataactattgtttttgtctgatttgatcctttcaggctcggcataataaagctatatcaagggacacatggtctcagctgttggagtttgcaagagtaagatgtctttgcgaatgacaaatttctttttaataaaatcccaaatcttggaacccttgaacaacttggttttatcattttttatttttccaaacataattttataatggttcaattttggttgtgatgtattgagtaaaacttgctaggttttaaaaatcaggtgtttttcttttgaactattcatgatttctcataatgtatagaacaaattcataagccgttactcatggtaaagttcgttgtttttctgtgacagacggtggagccttcactttcaaattatgacgcagaaggcgcatggccatacctcattgatgaatttgtggagtacttacaagaaaatggtgtaatgcaaaatgatcaaacgacggattggagcctaaagcgatgatgaaacacacacacacacacactacaccagtggtgga

SEQ ID NO: 380111 - DNA, 3405 bp, Cannabis indica
tttttttaaaaaaaaactcaaataaaatgtaatatgtaccatactaaaattatttaatttattgtgactaatagtctctgtgatgatccccccccccctcccctcttcttcattaattttttgttattcaacacagtgatataccattagactctatattagtgtttctaatcttgagtgctcgaggagaatgtaatcttaaaggggagaaaatgggttttgactcgaggacagtacacatgtgtgtctttctatctcttgcaactagtggtttcgtttgatggtataccatgtctagatctttttgtttggttagtttattttccattgtgttgaagacatttaatatagttagagggttgttagagttagttaagcacaagtctattagctcctgttagtttattatggattctgttattgaatctcttataatgagctagtatatgagctgaaacacacataattaatcaatctttgtctttctttctctctgttctacttgtttgtttttcatccatggctaggaacttcaacatggtatcaaagcagtttccttccttgggtgtgaacatggcgactgaaggcacctgcaaccaattcagctactgctaattccacgaatctagctacttctaatggagctcctgtttgaactcgaacacattaagaacctgtgattttcaaccataatatctcgatctgatttattgatcataacttccttctatggaagcagtaagttattggtgcaataagaggaaattgcttgctgaagtacaataaagaactccaccagtcgagttcttgaatgatatagatcgtgaaatcaacagagttaatctagtgtactctgaatgggaagtacaagatcagcttctggtatcttggttactttcttccatgactaaaagtaacgagaatggttggatgcagctcttcacttcagatctagaactcacttgaaaaacacttcaccctgcaagtctcctaagaaatacttgagtttcaaaccaagctacaaaacttgaagaagggacctatgagccttaatgagtacttgctcaaagtcaaataaacggtggatctccttgcctcatttggttaagttctaagtgatcgagatcacatggctgctatcttcaaggggctatcgagtgagtatgatacatttgtaatctcatcaaacactaggattgagaatacacagtaggtgaaattaaagccttgcttcttgcctttaaatcaagaatttaaaaatctagcaaagagattgacctgagtgccaatctagttacaaacaatcctgattctattgctaaagccaatcttgcttttcgaagtttcaagccatttggtcgaggaaatccttagttcagctcatcacagttcaacaagaatcaaaatttcaggttcaatgactttgctcctaactccaatcaaaatatcattggaagaggtaatttcaatcccatcagaggtaacaagtttgatgttaacttcactaacagacctcagtgtcaattatgtttgtgttttggtcacattgtgcaagagtgctctttttgttttgtacaagtctttctcaagaccttctttaggaactggttgtaatcactcacaggctccaacacagtctcaagcacaagccaatcatgcaattagcaacaactctaatgacacaagttggtaccctaactcaggagccacgaatactgtacatttcaatatcagaatcttggcaattgcctggactatggtggttcagatcaactgtatatgggtgatggaacaggtttatctataaagcatgttggtcaatcattctttcttgctaaaaactcctctgaacctcttgttcttaataatcttttacatgttctagaaataaccaaaaatattattagtgtgtctatatttgcccgtgataataatgtattttttgaatttcatgctgatatgtattgtgtcaaggacaatttgactcatactaccttgttgatggggaagcacaagaatggcttgtattcatttgattcaagccatgtccagtatatccctcccatgtctgagcaacctctcaatacgaaaactcctcacatgtagtcgtaccattccagattcctcataaatcaaaactacatatatggtcactctaaataatgccaaaatagttgtgtctaagtgtatcaaatgtaactcagatgttgagaatgattttaccctttggcacaatagacttgggcacccctctgaaaaagttgtacaaactgttctacaatcttgtaacattcatatcaccaataaaatttctcattactcaatatgttcagcttgttgtcttggaaagattcataactttccattcccaaagcttcaaacactgttatttttaagcctttacaacttgtagtgtctgatctatagggtccatctcacactacttcttacaaaaattacaaatattatattcatttttttgatgtgttttcaaggtttacatgttgtaccttttgaaaaataaatcagatgccttcaaggtctttctaaactttaaagcaaaagtataattgcaactaggcaaacaattaaaatgcttacaaatagactgggggtgagtttagatcattttctaagtacctcacagatcatggaatacatcatagacatccttgtccaacaacacaccaagaaaatggcttaactgaatgaaaacacaggcacatagttgagaatggccttgctctttagctcaacattcccacccattaagttttgggatgaagcctttaggactgcagtctacatccacaatagactctactcaagttctaggtaaaaatcacctattgaggttctgttcaaaattaaacttgagtatacaactttcaaaacctttgggtgtaggtgttttccaaatatcagaccatacaataggcataagctagagtataggtcaacaccatgcactttcttgggttatagcctaaaccacaaaagatacaagtgtctaaatctaaatgggagagtgtatatctacagggttgtcacctttgaggagttttcaatcccctatgaaacactctgtcaaaaaacatctcacacacaaaaatcaaataagtatccaagtgtttttgctataattcccacctgttctcatcatcatttgctcttattcagtatctgatctaatgagtccacaacctgagattgaccaaaatgctcaaacaaatgttgtttcacctcatttggcttctgctactaacagttggctgccaagtcaactatttgtttttgatgtagggcaatcttctggaaaaaatgttgaatatgctaaaaatctagatgcaataactgttgggttttataccctaaataaaactctttacaatctgattagttatc

SEQ ID NO: 380112 - DNA, 4710 bp, Cannabis indica
taaattagttaaaaacttatcaaacaagcttaacaaattggattgacagatctaattgagcttaaacctacaaactggacaaatagaaatcgcactcgttataattagaaaaactataaattttggataaagtttataagtagacattataattggaaaagctataaatttcgataaagtttataactagtggttttattaacaatgttcaggacacctaagtattgcctgttcaattaaagtcaactccaattaattattattattatttatataaaaaaaaaggtcgtaaatttatccaccaagtccattcaacataaataacaaaaaccaatcattgtaagggcattgttgaatttagacttattacatttccagcacttagagaatcaatctttcaaattacctaatataacatagttttttcctcactgtacaagttagaatcactctgaaattttcactttataatactagtgatgccgaaacagagcatgattgcattatatataattttctaacgtataactcttattcatatatggaatattaaccgtagctcaaacgagaatctagtgaccgagtgttggtttgacgtcgtggaactccaatctcacaagcattaacccgagaagcaaagcgaagtgagcagagcgactcacccgatgaggagggatcgggagagatgtttacaaacatcagagtcttggagtctcctccaagacatggctgtttaaaatttaatttataagatttcagagaatccagaataaaatgaaagatgaagctaaaaaaatcacatatatctggatatggagaatttacctgaagaagatatgtaagctttgagttcctaaaaggtacatgatcctctttcttggccaaggcaaatatgacatcacttaaggatgacaaacttttattgatggcctggattgaaacatcaatagtttagaaatggaacacgcaatggatgatggttgttgacatatgaagataaagacaaagacagatcagaaaaaagaaagctttaataaaagtacttgagtttctttaagacgatctcctgttgacccgctcttagaaaggcgctcactgccagcaagatcaattaaattcaacacaccttgtacttgttgctcagtgctctgttgaggaaaagataacccgtgtataattattaagatagcacaaaggaactgatgagtcaaaacatctatgcacaacaacatcttaaccgacttgtacagaaagtaaacgttgaaaagaaaaatagaaaaaattacctcattataaccagatatgcgaagggtgaaaacaaaatgacttcttgatgactgttcattcatttgggtcttaccaacagacctgaaacatacaaaatttatgaacaaaataagttgtttaagatagaagtacagaaaagaaatgctacttaataccaatgtttactcttaaaatagattaattatatttcacaaaaccatttctcacaaatccagttttaaatgcatgacttgtatcaggtgttaagtcaaataataaggcattaacatcaccatgtaaagccctcaaataagtgcacatggactataaaattatggtggaaaagtataaatgaacatcttgtagatgcaatcagtctcaatagtcatacaagatgattaacaaaggggaaagtattgatctcttataatctcattacctgctctgcgcagctcggtccaagagatacgaaacttctttggcactacgaacatccacaactgtcagatcagacacatgtgtgtttccatttgcgtcatgtttgattgtgtattgcttcccaccgacactattttctgttcgtgaaacatctatagatgatctatttgtggatagcaaatcacgaattgtttcgttgtatatttccaacatggatacctaagatattttaaagagaaatgtattagtgaattaactaagattgcagcaagatgttcaaacaatagttatattaagtgataaagatagatccaactaacctgcatttcatatttccagccttgtagtagaagagattgtctagtttgaaatatttgttcaagtgaacgaggtatcagcccttttagatcaggctgtcctggtttgcccatcatggtatatgttttgcctgatcctgtttgaccataggcaaagatgcaaacctgaaaaaagaaacaaccataattttgctaagtattatgtcatatcagtaacactcaataaggctaacaaaaacataattatcaaagatgaacggtacatgcataatagaaaagagaaagtataatttcacagtctctcagtgcaatatcaagatataaattgaacaagatttggagcttaggatcaccttgtaaccatcaagtgcactttgtacaagttgtgaaatttcttcaaagacgtcttcttgtgatgcatcgggtacaaaaactttgtcaaatgagaaagaatgtttctgccctgattattgacacgaaaaaagttgtgagtgcaacacaaaaggccgaaagtaaattgaggtgtatgacttgtctatatatctactccactgaaaatgtagaatacagtcaacataccagtttgcactaaatcaatgccgcgtccgaaagcttccattgatgttggaaaagagataatctttccgtcagatgaaccatcatcaggcaacaaaggccgcactctacagaatacacgaatattccctttcagttcctgtgacaagaaagtggttcagtagtatgtcaagaatgtaactactgcaaacgtttgaaagaaagcattaccaaaatggtattatgtaacttctttcgaagcatttccccttcaataactttaaattctgcatcagccaaacgactttgtaagtcatcaataagtttttgttgttcttcatattctgatctcgtctcaagtgcagataagtcggacacctgaaagaatttgaaagaaaaagatatatttacgcttagattcctgaaaacaagtaatcacatgttatgtgcaaatccactttgtcacctgaagtctttctagagcagttgtgagttggtccttcagtgtccttatttcattactttgtgaatcacatttatcctgaaaagaacccagtattatgataaatttacaagtgaacaaatttttacaagcataagctacagagaaaaaagcgttgggcaacctctaattcactcgtttttgttgttaggttatctaactcagagcaggaattctcagtagattctttatattggactacttcagctgttaaagactccacttggaggagcaagcggtcacgatcatctctaacttgttgcaactccattttaaggcttgcagattcattgaccaaagcatctctctgctttactgcctcatcatgtgatgtctgcgcatgatccatcaaataaatttttctatgaattcatgaccaaaaaaaaaaaagctaaagagaaaatttaaaaaacttcagtattgttactacaggactaaaaaataggcattaaagttcgaaaccattggcaagagctcctgagaatcatagtcttttagaacattaaaatttactgaagaactctgtatcacaagggttatatttcatctacactgaagtgcttataagaaatatttgttcctactatatgcaaagtggaaacaatgcaaaaagtggaaaagataacatttagcaatgttgacttccacagtaaaataaagaaactcactttgcacatagtaagttgaccccttaacatgctcaggttctcccccattccagccttctctttctctatacgcttaaggtcatcctcggctgtagataggtcggtgtgaagtttgctattatactgttgtaagctagcaatgtaatcttgcaatcgcttgtacatgtcattcaaagacgttatctacacagttattcataaacccaattaccaaaaaatttatgtaaaagttttaataaatctcattcgtgaagaattctcaaaaagcaactaaggaatctatgattggcatccattttaggttttaccttttgattagcacttgacagctctctctgagctttcccaagctcttccgatagagtattctgtgatctctcaatatcaagcctggcctgtctttcttttgtgagagaatccattgcagactggttgacattaacaaattcaagacatttaagaaagcttgtggatgtcagtaatactatacccacaaaattatattaaaattcatctgcttaccaatttatcacattcttcttgttcaaatttctcttgtagaaaagagtaattcttcctcagctcctgtataattgagttgagctcttcttccttgtttttaagtaggttttctgcattaatcaaaacacagttcactctcaatcactattcaaataaattcactgcaatatataaatataaatatatataaatatatatgtatatatgtgaaaaatgataaagaaaaaaaaaaggcatacctgtttcacagcatctcagctcagctttgtccagcctattctgtaatttatcttgctcaaacacataacttgtttccagctcttgaaaccatttgatgcaaagtttaagccttttaatatactcagtcaagagatcacatttttcctaaaaacaatcacaacagatttcaaaataaaatgcaatttaagctaaactagactaa

SEQ ID NO: 380113 - DNA, 3099 bp, Cannabis indica
agaaatgtaaactgatcatactaaacaatgctcacaacaatcaaacaatcataatcaaaatctcaaaaaacacgtaaaaaaccaaacttctgatcaatttagtggaaatgaaattataagttgattgaacataacgaaattcctaatacataaatacaaaaagttgagaggaaggagaggtttagctggataagacctcaatcaaatcgaaccgtggagtgtgtgatagtgagatggtgattagggttttaccttttcttttttgaaagttgaaagagatatgtggtaagtagaaagaaatagaggagagggagtggagtttatgcttcttaagcgaatagctcctgacgaaggaacgagagaaaaggagagataaaatagtgcggcgtagttcttttcagtggaccacttttctcactttgacacctcagctcactgaaaaaaaataaaaatcagctttcaaggcggcacataattctattttattatatttacccccaacgtagaaaatctataaaggtatttttttttttttttttagaagtagttacactaaaaggagaaactagattctccctaacagaattcaaattttagccttaatgcttccttggcgttgaaatgcgcatcattgattttcagtgtgaagaatgtacggaagagtagcattagggaaaagagataggaactcccgaatttgaaggacaaaacttgaaagtgttgaattatcctaccaagaactttgaactttgttaactaattgtagacaattcgactcaatattagtgataggaatacggattgcagaacaccactgtagggctactagaagggcttgagcttcagtaaaaattggcattgaggcacctgtaatactctttgaaaggccggctattctttggttatgatcattaaatattgaagcacttaagccagacttttgaaacttggaactaaaagctacatccactttgagcttgaaaccaatttgagggcgagaaaaggttccttgggaccctactggtgttgagatgcacggagtggagatgagtttgcttccagaagattaggaattaagcagctgggcttgttgatagtcctgcaaaagattcttcacaatattttctgcatcatgaaatgagttagacttgcaattgaaaaatttattatttattgaattccaaatctgtcaggctaaagccaacaaaagccaaaattggtctttgctaagagtctccaaacctgtaaggtaaaaatactttatatcatatctatggtttgcaatgaaaaaaatctttgagggaagaactcttccaaacagacttagccatagggcattgcagcagggcatgggtaacggtcttggtttaggactgacaaagtggacaataagggtgagggagaacttttttatggtggagattaagagagcaagtaaggatatggtgataggctttccaggtgaaatgcttcatttttggtaagattttgctgttccaaacagctttccactaggagatttggtaaaggggttggaggtggttgcctgggaagggttagggatggagttagctaggtgataggccgagttgactgtgaaaatcccatattggtgctgaccccaaataagactatcaccctgagagttaatagggaccttaaggatttcattgacctggtaaggagggagttgatgcttaagggtggggatatgccaattaccgctattatccaagaagaaagatacagtcaggttagagggatcaatgttggtaaggaaagaaagggagtggagtccagaaatccatttgtcatgagtaagggaaatggtctctccatcgcctactttccaaatgaggcctcgattaagaagctgacgcccccagagaagacttttccaagtttgagaggggcagtgaccaatagtagcatgaagaaaatcagtgtttttgaagtatttggccttgagaagagagtgaaggagataagtaggctgagtccatattctccaagcttgcttggcaatcaaagcttggttgtgatgaataaagatcgaaaaccaagaccaccaaaaagtttggaattgcagatagtagacgagctttttcagtgaattttgttgttattactatcaaaaccccaccagaacttagagatgagacgctggatggagtgacaagtggttttaaggatcctgaaacacgacatggcatatgaaggaataacctggacaaccgccttaataagaatttccttaccagctttggaaaaacttagcattccaaatgttcaatttggaagcaactttttgaaccaggtagtgaaactgctcagaattgagtttgcatgtaccatgaggaaccccaaggtatttataccctttggaaaaatcattgtagcctagattaacacattttaaggaatgaaactgaaacttatggttttggtatggtctaatacaagaaaaacatgatggttcaaatgttttaagtaggttgtgatcaggtttctttaaaaaaaagaacttcaaatggtgatttatttcttaaaagtggtgttgacatcctattaatgagatatacagatgtttggaaagcatcaatccaatatttataaggcatcgtggcctgagccaagagagttcaccctatttcaactatatatctatgttttcgtttagttctcccattttgagctgaagtatggagacatgagtgttgataagcaatgccattaactttggcaagattatcaaacacctgatattcaccagcataatcagaccttaagcctttaattttagtttcaaattgattttctacaaaagttttgaactcaataaaggcatttaaggaattagatatgtttttcaaagggtaaagccaagtgtagcggctaaaattatcaatgaagtgcatgtaaaacttgtaatttgtgttggatgcaattgggactagaccccaaatatcagtgtggataagatcttgttggggtttattgttggaaattattttaccagaatctcagatctactcacaagtataattaaatgactccttctgttcagatctctagcccttgattcctttctgtagcaga

SEQ ID NO: 380114 - DNA, 6019 bp, Cannabis indica
cctgcatccttcatgccaaagataatcgatgatgcccaaatcacaaaagtcagctccactttaagatggcttgggcagatgaccctagctgtcgtgacatcattactggacattgggcggcttcagattctattgatattttgggtgtctgaaccaagattaatggtgttacaagtgcttcgaatgaatggaatggtaaagtttataagcgcactcgtgaggctattaagaagaagaagaattagcttgaggcaattaactcgaatcttaattctaatacttggccttcttgttagaagcttgaaaaggaacttgatgttctcttgtacaaagataagaagtattgggcatctcgtgctaagaattcttggctcaaattgggtgacaaaaattctacttaatttcatcaaagtgccactcatcgtaaaaagaaaaatgctattggtggtatttttgataaaaataaaaattgggttgagtcgcctattggtatttccatggtgtttgaagactattttcactcattatttacctctcataggccactagatgatgctttaaacatggtgcttgatttggtctagccccaagttactactgaggttgatggtgtgttagtgagaccattgatcgaagctgatgctcagattcctttgtttcaaatgcatccgagcaagagtcctggtaaggatggtatgtgtactaacttctatcagaaattttgggacattgtttgtacaaatgtgtgcaaagcttgtcttagttttattgatggctcgaattcaacatcctttatcaatgaaactatcattaccttgatccaaaaggtaaaatctctttctcttacaagtgaatttcgaccaactaatctttgcaatgttctttataagatcattacaaatatgattacgaatagattaagagagatgttggaatgatgttatttttgaagagcaaaatgctttcattcctgggcgtttaatttcttataatgctatgattggtttcgagtgtcttaatgctatcaaaaggcacaagaagggacggaaggggtttcttgcttataagactgatgtggcaaacacatatgatcgagttgattgggcctttcttaaaggcatgatatccaatcttgggtttcatcatagttggataggtttaattatgtgttgtatcactaccatgtcttatgctattaatgttaatggggagatcattggtcatattaagccatcttggggccttagacaaagggatcctctttctactttcttgtttctcatatgtgctgaggggttaacctcccttattaagcatgaaattatcttgggctctctttcggatatctcttgtggtcgacgaggtcctatgatttctcatcttttatttactaatgatagcttcttttttcttaaagcgtcggtggccagttattctcagttcaaagaaattcttttgttgtatgaaaattctttgggtcaactaattaatcttcataaatttgcggtttgtcttcttcacgcatgcctgtggatttctgcgtattttttgtgcatattcttgggggttcctctcgttccttgccatgataaatatctcgaattgccttgcattatgggtaaaattaagactggcctctttcaatcaatcaaggatagaatatggaacaaactctttgggtggaagtctaagcttttttcttctgggggagggaagttcttttgaaatctgttattcaagccatcctacttatgttatgagtttatttcgcttacagtggggattgtgaatgaaacaattgtatgtgtgctagattctagtggggcggggatgatgatatgaagaagatgcattggtgtacttggtatcgtctatgctagcacaaaaatgatagaggtatggactttcgtgatatgttcttgtttaaccagtctatacttgctaaacaggctgctcgcttgtgtttatcacatgaattctctagttgttaaagttatgaaaggtttttactatgccgatggttctttgcttgatgttgaagagacgaagtgtgcttcttttctttggaagaatatttgttggggttgtgatctttggaagtaaggttgtcattggctcgctaggctaggtgatactataaatattcgtgaggatgtttggataccaaaggctcacgtggactgtacctactccttcaagggtggtcctcattttcgtttggttagtgatctaaaactcaattgtggcaattggaattccattcttatttaggaagtgtttgatatggtggaagctaaagctatactatctgttccgtgctctttgttcgatagacaaaatagacttatttgatatttttcctgacaatggtgtatattttgtcaagagtggttattggagcaccgttttaagcttgggtttgggccaagaatcaacttcttcagtgacttctccttggtggaagattctttggggcctcaatctcccatcaaagattaaaaactttgttaggcaatcttgaattttttgacatcctatgcaaatctcacttgccatggtcttcatgcttctagagtttgtcctatttactttcagaataaggagcccactatccatgcattatggttctgcttctctcttaagtcaattcgttcagaatggtgtctcaaaggtcttgataatttaaaggatgcctctagtttctgtgaacttctgttgggttgtatgaatttttacgcaaacaggaattataagagttcattgttcttagttagcgcatttggcatagacgcaatacctttgttcatgaccataagcttctgcctgataatatggttagtccttgtgcacttaattacctttggcaataccaagatgctcaaattggtgggtgtgttaccaatggtcagtctttctctagctcaggttcgaggagtagtttggagctgattccgggagatgtgaatctctttgtggatgttggtcttcatgaggaggattcaaagataggattgggagttgtagcatccggcactacaagaaaaagtttttttgccagtgaattttctcacaggcaaaagtatatatatgtcgctgacatagttttaccggtctaatttttacctgcaaaagttttactggatcattattttgctgacaaaatttctccaataaaaaattattttagttttgtcggcgatatatagttcataggcaatttttttttttaaaaaaaactatatttataataaaattatttaaaaaaaattatatttataataaaattagtcaaactttttaagataataataaataaatataatctgaaatttatattacaattataaaaatacataaattgtctaaaactaaataaaaatattgttagtttataaaaacgaatattatctgcgaactaaaaaataaaactacaagtccacagcatcgtcattatcattgtcatcaccgagaagggcattctgtaaaaaagacccagtgccaggaggccgaaatggtgaaatcggtagaattagaggcattgggggcatgttgaatcctagaacgaagctggccagttgcatcatttgttgctgaaaaactctcatgatttgattctgagtttgcatcatttgttgttgccactcgttccgtgcttcctgctcttccacccttcgccttagggcctcatattcctccagggtggcagtgggttgtccaagaggacccgccctgggagttgccctctttgcccccgtcataagtctcgacagctggcccatccctctcaagtggcgtgtccactcacccagcacctgtgtcataacaggcatgtctgcgagaaaatgggtggggtcgatattgtactattgggggacattggtcagtgctggttgagtttcacgaatctcaaccattttgatctacaaaaaatttgaacaaactgttagagttgaatacaaattaaaatatagaatgagtttattaaagatataaaattacttacatgcggttgttgtgtgtgttcatcgtgccatttgtggtccttgcagtagaattttgcaaaagtgtctacaacactgagaagttctgccgtcttaggataaagttatttttatacaatataaaaaattagaaatatattattccaaaaatatgaatttttatataaaaatgctgacaaaatcataccccgctcatgatgtggccgactatggtcttagaccctcatccaccttgaattttcatctacccttggtttttcgcattttgtttggctctttcctgtaatttaaagtaaatttattgttagcaaaatgagcaaaaaatcataagttaatggatattcaattttacaacttttattttatacctgctgttttaggtctttccagtatgcgataacctctgtctacacctccggtgtaaccacatctacacgtgatctcctagtcgctttcacctctccatatttcttaatattcttcttccatgccttttttgtgtctactctctagtcacgtagcccttttcacattgatttaagaatgtaatcctcgaacataggattctcaattgggaactcaaacttgctctaaaaaaaataaacattaaagttatatatatttgtttttttgtataatagttttgtttgatctatacaaaaaaaattgaatgttactgctattctactcagatagtctgaatgactgtctcctcaatgtcctcgaactcaaacttgttcaaaggaatggtattgcaaaagagaaacttgatataattgtcaaacttgttaccatagtcatctattggggccctagtcgccttataaaatctaaatttcaatttctatcctgcaggctgcttggccagttcttgtttaatatttttttctcttgtactttcccttagcttcctttttcttattgttgcttgcacctacattagccattctacacatacaaactaggaataattaattaatcaacctattaacaaaaagaacatgtatttaatttaattaacagtgggtttaaatattacaatactttaaagtctacaagtcatcataataataatcatcatcatcattaaaagttacattattttcattatcactatcactagtgtcttcatcatcactataagcaataaaatcatctaaatcttgacagtgaggctgttcatggtccctgctggtcacttcaattgggttgacatcatcacggacatattcaacatcgtccagttgtgaaagttgaacaactaactggattcctgaagaatttctttcttgtatagtcgtggtctcatcatcatcctcattcttgaaaatctgcgaggggtgtaaacattgccaagcttccaatcaactctattcttcaggccgagaatgtaatatatcaaatttgcttggaatacaagtatggatagttcattttggtaccattgacgggtgacgcagacactagtgaaaaaccatcattttctatcgtgttactgtttttgtcccaccacttgcacctaaaaataataacactacaattctttaagtaagtgaactcgtagacttatttgaatacgccataataaaatttaccaccttctccaggcaccaaaataccactgttttgggtgtacaattgtcatctcgatcctcgactaggaatttaacactgttaacaatacatctaggataacaatagtatgttggattagaggaatttgtgatggcgttcaactcatcaaatactttcccagggttattcgcttggagttgattgatctatagttgagtgaaaatgtaaacaatactagtacaagaaaccgtatttgaatgacaaaattagtagaaagctatacttactcgagacttgaaccaactgggaaacttgttctctttaactgtgtcaagattttgatcactcctaagttgtagctcgttcctatgctcactacacataaatagatttttgtaagagaaggttgtgagtgaagaaaactaaattaagaatgcaaaaag

SEQ ID NO: 380115 - DNA, 2880 bp, Cannabis indica
ttagtcaacgcaacaatttgttcatccaatattttggtatcactttcggggagatcacgtcccctcttcttatcacttagatgatttctaaagatcaccccacgtggccttacgtttttgcagatctgtcgtggaccaactgtctctggagtgactggcaaggatcctcccatcttggttaacagaatcactcaatggatttacacatcttctaggcttagagaactttgtggctggtcccttcgacatagctctgcctcgagggtcagaagggcatctaggctcgaaagtgttgtcagcctttactcttttctttgcgagggtttgaggttttagccttattttgtttatgagctcaccctcacggcttctactgatgggtatccatcagtcctagtcaagtcatcaaacttactctaaagttgctccatcgtttctatcatctaagcagtaagtttttgttgctctactaaggctgcctgtgtagcttccaattgtttagttacccgtaccaaacttgggttatgttcatagtagaccccatcttaataatatccatctctatagtaataatcatcattgtcctcttcaccatcttctacattttggccatcatcgtggtctcctgcgactttctcggtgttccttttttggttctcagcagctgttgcaccttcttcatcattttccatctacgcgtcggctgcatgagagttttcttcttccataaccgtatcaaacagagttcctttaccagtagccttttgtgttttcaccatgatcgagggatgaagagtattaccaagcttccttcagctctcaatggaagcactaaaatatttaccgagtttctcaaaaatcaaatatatttagagcttaaagaaataagaaataataagaagcaataaataaatagattttttacgtggttcaggtgttaatgatccttagtggattactcaaatgtatcggcctctttgggcaagtatttagagattacaaaatggttacagtagggtttactctatttctttcactcctcttgaaagagagagagctttcttggagtttttgtagagtgtctgcaagtaaaatttttcctcctcctctttaaagaaaaaatgggagtatttataggcacatatggggtaaagggcataccctttacctacctagagtttcgtactacacacgccactaaggccagtactgctaaaggatgatctgactgttggctggtaagaaccttcttcatcgagcggtgtacagctgcttgtgagagtttttgtacgaactaggacacacatcacgcaaaggtctctcctttgcaaaatactttctaagtaggcctttgggccaaaagcatatttgagggtgcgtacgcgcacttccatggcctggcacaggagacaaaatctgattatgtgtcaaaaaaaatgtgtaaccgcctatggagcgactttttgcatggcgctaacgtggccaacatctatgagacctctatcgtgctctaagtctataacaccctactagtttaagcgttttgtcgtgattttatattatttgtgcaatccgttactaactaacgggtttattaaaaatcgtgattatctaaaactttacttaattactcataaatttcaaagtaaataacttgtatataactgagatcacgtgtttaaaatatttagtataaaagttgtcgcctagtgactatacaaaatacagcctgttgtcccaaagatcgtacactccaggtctaatcgccctgacatgtataatcttcattcactcacactcacttctatttagccttagctttgcccttacctgcacatgcaaacaatgactgtgagttgacagacttagtagagaaaagcataatcataatatagatataaaacagattacaattaggtgcccatacacccaatcataatcttatccccacatcctacactattgagtctagaatgttcctacgacactactattgaccataatattagcctatactcagtactctagtcattactaatgcgatagcgtcaatcagtatttgagcccaacatacatttatctgtatccaatagaactctacatatattgatattgctattttaatgtaatctaacaagcatacataacacatgcacattaaacatttaatcacatatgcatcccattatactgatcttaccttgtttccgaattcagtgtgctggtaaacttgagtggaataactgctcgacgatttacaggcccctatgtcaaattatttgtaaaactgatgagtgacatgctaaatcactttttggggacttaaaatcaaaactaaaagtttccctatcataggataatgtggcaagaccttaaatatcgcaaaaacatgaaaatctaaggtaccataaattgccccaactggaactgattctgtggggtcgcttggggaggaaccggaagatcggttctatagtaccaaattgaaccggtcgaccagtttagtgcaggtacaataaaaatccccaaaaacaccttaattcaaccccaaattgtgtataactctccagaccacctatatttatctaaaagaacataatacattcaaaagaactgaacaaaagtctcaaaaacacaaaacaccaagagagagaaaagtttgagctctaaagctcaaactttgctcaaaccccacaacaagcattcaatttatcttaaactcactaaatttatccaaacaaacataaaaaaactccaacaaacttaaacaatttgcacagtaacctaatttaagaaaacaagccacaagcttaacttacaacctaagaaaacaaagagagaaagagtttggagttttaccttggattagaatcactaaaa

SEQ ID NO: 380116 - DNA, 4251 bp, Cannabis indica
ttttagcataatttatcaaattttcctttctaaatttgaccctttcccaccaataattgtaagacacttcttttccataatgttgaaaattagttcaataaataatttgtattatgacttcaaattctttacactaggattgttcttattgaattaaaggattctactagtttacatacctaacgatcagcttcattccctctaaggctcatgttttttgaactaaaagtgcttcgaggatatattccagcagagttttgactagttaggtgtgatcaagaatttgtacctttcttaaattataaggtcttctatttataggcaggaatgaccattgaacctctccctttctctcattaagattggtccatgtggactcattctcttcatatcttcgcgcacacttttctgtctacttctgaacttcgagctccacaaaccctacttgcaatgaccatatatttagatatgaaaattaacaaacaattagtacattattagtaattgaattactgttttgattatatgtgtcttagtagaaaattagacctattctcataaataggcattagagatataatttttcaattatggagattttattagatttctagtgtgtcatgcatgtcatttatgaattttgatattttcatgttttatgaccgataactgtgaaatcaaagatttggcagacaatgtcaccttgatatggtttactatgatagaattagcgagacaagatttatggtcagttagaatatcaaagatatatagggttattggttattatgatcatttacccttacgtgaaaatgttacttcatagtgaagaaatgatattttaagtttgtttaaagttaattttaactctttgtctagtaaaatcttagatgtaagattaaattatactgagttagttaattaagaaaataaaacaagttagaaagtagcatatatcaaactcctctatgtatacccttttctcacttttgccctagaagaaccaaagaattttttgaattttccagaccaaatcaaaaagctttttattaggaattcaagtgaagtttgcaaggaatgatcaaaggtaacctcagcctagcttttctctttgaatttcttattttatagcttggtatatctctacgaaaaagccctcactatatagtctctagtctaccaacataaaacaaaggttaggatgcttttatttttgtgattggtggtaactggatctctatagttattaaccctggagtgttcaagttcacaaaccaactatctacttcaattcattggcctactggaaatttctcttaaaactgtaggttcacactcttaaaatcggggattatccattactcaaaagaacttacataccatattgatgatatcttgagtgaagaggtatttggttgtttaccagctttgtgtggatcctctattgttgatatctctactcttaaaactatagcaatggttggaagatctatcacaatatattgtctaccaactatgagatatttttgaatcaagtcaagtttaaaaatgactcatgcatgggttcttgcaaaatttccatctgctcatattgaatttctcttaaccaagattgacaaacacgacaaaaatatttctaaggaccataagcctatgatatttagctttgtagtctccttgactgaagacgaagtgttttgattctagtggctttaggcttttcactttagaagaagatttggccaatctttccccaagttttattcagcttgatactgataatcaaccagttgtagtgacttcaactgttgtcacttgttcctatatcactttaggcccactgtcctcaagtttggcccctataaaagttcatactgagcctaaagattcctgatgttctttgaagagaaagtccattcatgaaacttggaaaggccaagctcctctgaagagtatgagtgtgaagaagccatcttctgtggttggcacaactcgccatcaacataggttcaaaagtttttaggaagccccatcaaaaactttgacctcagctgcccctggttgtaccacatgccttttgggtctcgtcactcattcttctggatttactccacctttctctcaccaagacaatgcaagtcaagcagtattcccatccaagttttacctttagactctgtagcagttcattttgagagtaagattagtatagttgattacgagattgatacaaactcactagcttttggagttgtagcccaacagaagcatctccaaggtgggataatggagtcctttagatttgttcccatggaaattggtcaccctcagttgccaatatgttgcaaaatttccttgttattccttcttcccaaatctcctttatctttattggtcctttagatgcttcttccatttcatgttatattaatagtgttagggttttaaaccctaaataagtaattaattgttgtttcaattcttgtaaactaatctcacatttatcaatccacaaaaatctttgattctttctagttaattctattaattatattgatattttgaaaaatgtcaaacatcccttgtaattataacaaaaatcttttattctttctagttaatccatctttctttttaacaaattgaactagaacttcctaaggcgactcactgggttgggtaaaccaaatgtcaaacatcccttgaagttataactttagttcttctagttctattagagcaatctgataaggtgccttagaaattggctccactcctagtttaaaatcaataacaaagtctatgtctcactgtggtggtaagctaagtatttctttgagaaatacatcaaaaaaactctttcactattctgatgtcctcaagctcaactatttcaggtctgttggtgttcatcactcctagacaccctatgcatccatcttgcgataggtctctagctttcaattatgaaatgactgggatcgagaaccttgaactaataccacaaagacaaacagttattcacccttgagttgaaaagttaccatctttctcttacaatcaatattggtcacatacttagataggaagtccatttccagaatcatatcaaagtccgctatgactagcctaaaaaggtcagcactcaacttcctatcatccaactaaactggcgtaatagacctaatccaccttttggaaaaagcacaatagggttccaaaccctaattcaaaattatcacaagggctacttagtttattacttactctagcccctacatacgagtgtgtagctctaaagtcaaataatacaaaataaaaggagctactgataagaagctaacatgtcaccactgatgggctagccgcaacatcgacttgattggcaaacacctgggcaagagttagtttttcctcttctttagattcttctttctttagttgaggatagtttctcttagaatgcccaaggagtccatactaaaaacatgccttactgttacactctcctagatgacgtttcttgcaacgaggacactatggaaaagtacaatgccctttagggctacccaactgacacctcttgtacgacagcttcattcaattaccagcaacaaactattctaatggcaacattggagcaggagcaacgggaacctgaggaggaggtgcaatagaataaccccgatgccataacctgtgaatctcctcaacttgtctctaaattctggattttatttttgcaaacctcttctcccaatcttgcagagcctatggcagattaacattgcccctaccatgagcccaccaaggatctcgaccttggccaggttgacgagggggattctaacctccccaaccaccactagtctcaaccatattatattgacctctcatgttttgtggatgtccattctataggaaaattctaagaacccataagtcaggtcggtcaagcaacgatcaaaattgtaatctaagtaccacatacatggaaacttaaacatgctcataatatgatataaaaatgctaacatgctctgtaatacccgggattaagaaaagaattagcaaaaccctaactagataattatgagttaattgaggaattatattattatatagttcaacatatgtgaaattatatgaatttaacatgttaagaccccgttggtgagccaggggtattttggtattatgacccgagaagggtaaattgttgagattaatttaattacgtgcttaatagaa

SEQ ID NO: 380117 - DNA, 2966 bp, Cannabis indica
aattgtatttatgagatttacagtttgcaacttgcaaaatgagacaatgcatagaataccttctggtcagttgctagagttttcagcacataagggctcatcagaaagaactgaacctgaacatcatcagccacatatggaacccagctctttccagaccactcgtagatctccacggaaaagtcctgtaactcagtcaaataagaaaaaatgaagacaattgcaattcagcaaatacaagggtaggtaaattgaatgaatgtacgagcatgatcgcataatacatgcagcaataataaccctcaaacatgcttaccaggtcgtcattgatcctatatattgctggttcgtctgtttgttcaactttgtggtgcttcatgttgacagcctgaatttacaaaatgagttatatgtcaaaaagaatatgatacaataaaaatatatataacataaggaaaacctgatatgacagcagcatttatacttgagtgcatattcaaacctttaaatgacccctttcatggaagacccatttgctaagttcagtcacaaactgttcattgcctgatttctcatatctgtcaacaaaatttcgacataatgtcagcatgttgctagaaaagtcacgattggaaaaataataaaggagtttgttaagcaaaataaaaatatagttctttcgtaacattaagaaagcttgattatttgtgagttgcatagcttgatttagcttacaacagtccaagtacaactaataatcagttcttcaacaagtatgcagggatgtgttttcttatgtgtgtctccgaagaaattgttcatcaatgccggtttatcattattgctacacagtatacatgagaaaactcaaaaaatatcatgcattaatgcggtaaagttcttaaactaaatactacaatgtcaatacaaagggataattaaaaattcacccacttttgtgaacttccagccttctgtacggctgatgagaaaagcctgtatgacatgaaaaagaaaattccataagttacaagtatttagtgagagaaattccaagaatgaaataaaaccctactgtacataccggttactgaatatatctaaagaccccgagataataatccgagcattgtttctagcctgcattaaataataaataaggcccaggttcataatttcaacacaatgaaacaacattgtttcaaaaacagatgccacatatatttctttaataggcaaaattttatctgcaggcagactgagaaaaagataagtgaaaactgaagctcaatatcaacactaattttagatagcataaaattgaaagaacaaagtgagaaaaaaggtctttctgcttttaaaaatgaactttacaaaacgctgatgcaatgtgttaattaagttgtaaatgataaaaaagaaggtgcaagacaggagagagacttacttgaacaacagaaacaagtgaaatagcagatccagtgagtgatggaggttgcgacgacttagaatttgggttcaaagaataagcggccggggaagcagagagaacattcagaacctaagagacatatcacataccatagaattgaaaatctcaaacatcacaaactcaaacccaaaagaacataatttgcaaaacttatcaaaatcacattgctaaagcttatattacataacataaataatcgtaagactttggaccttaccaaactattagcaggattaagtgaatgtgcaactcctctgaaaagtattggagcctgttccataaattataaaaattactgagtgtcactatgttgcatctgcttcattcaataatgggtaccctttactagaaataataaaacgacaaactggacttgagaaaattaaacctttacctcaatcttagtctttccaagaataacgtcagactgaatgaaattatcgctggcaatcaatgtatgatccccttcagtgtctgacactgcataattggtgtgatcaatcaccatagcagatgaatcctaagataaaaaaaaagcgccatatccataagtatagctctcgcaatgctataaaaaaaatgtaccaagtagaacaaaaccatcatcttacctcatcaaaatcaactccaagttctgtagccacgttgcgaaacaaatcggaagaagaagcaccaccagccaagatcaagtcgtgacccgagtcaacgaaatcaagcacgccctccaaattcaaaccgcctccaaaacctgactccccacaaatcagatcacatcaatataagaaaaaaccaaaatcacacgaattaacaatgaaatcaacattaaaaaaacttactttcagtggagggagagaaaagaacgagaccatcgtacaagtactggccgtagcgttggagagcgagcttggggtcatcggcgagcttaaattcaagttcgaatccacgagatttgagagagttgaagaagatggagtgggttgacttaagagagaagtcatcgagcagaacaaggaggcgtcgacggtagggttttcgggggagaaggagttgcagaggaaaggaacgagtgagatcacggtgatgaagacgaagagtccccgcattgtgctgtctcactcccactctctcactctctgtctagggttttgggagcagagagaaatggtttttttttttcggagaagaagaaaacaaaggaattggatccaaaaacagaagggaccgtcgaaaatgaaaacagaacaagtcttttgtttctccggttgcagcttataccagagatcttgtaatttcggttaatcgcaaccgtccatttaatatctattgcctccgtatccaaacactagtcctactcctaactaagtcataataatataaagaagatgagtaaaattagtattttcttgcaaaaaatttgttaaaagttgtcaaatttgaaagttacttttcaatagagtttttttttttttggcaa

SEQ ID NO: 380118 - DNA, 2749 bp, Cannabis indica
aatattgatcgctatgaaaaaggaaacggaaaatgcaggcattcatttgtatgcaactattgtaccgtccgtgcatgagaagacaggggaagggctttctcagcccgagggaagccaattaaagtaggaaagaatcttcctctgaatgtaagagagaaaatcgtatcaaccatgaagaaaaatagtgatgtgttggcgtggagccattttgatatgactgggattagtccttgtgtaatctgccatgcgttgaacatagacccaaaggcaaacctagtctgtcagatgagaagaccctttaatccaatttgagcagaagcagataagttaaccaacatagaatttctctagaaaactctatatccagtctggctctctaatccagtgttagtccccaagccaaatggaaccttgagaatgtgcattgatttcacagatctaaacaatgcttgtccggaagactattttccattttcctgaatagattaaatggttgatgccacatctcaatatgagcttctaagttttatggatgcataatccaattacaaccagatcaagatgcacatggtggatcaagaacatactagcttccaaaatgataaaggcatttattgttatatggtcatgccttttagattgaagaatgtcagagccacgtatcagtgtcttgttaataaaatgttcaaggatgtattgggaaagaacatggaagtttatgttgacaacgtgctggtaaagtcaaaaacttccatggagcataacgaatatctagaagaagcttttcctatcatctagaaatatggtatgaagttgaatcctaagaaatgtacatttagagtttcctcatggaaattcctagggcttattgttagttccagaggaatcgaagctaatccgaaaaatgattcaagctcttatagacatgccttcaccctagaagcataaatatgtccaaagcataactggaagaattttagcactcaacaggtttttttctaaatcaactgataagtgcatcctgttctttaacattttgcacagaaacaataaatttgaatggacaaccgagtgtaaagatgccttttagaaactaaaagagaacttgactaaagttccaatattgtctaaaccggtggaaggagaaccactgtatttatacctggcagtgtccaaacatgctattagtgctgccctagtgcgagaacaaggaagggtacaactttcagtatattatgtaagcaagaaattgatgggtgcaaagtttggatatcctattattgaaaagctttcctattacttactgattgcttcaagaagctaagaccatactttcaagcccatgccataaatgtactaacaaatcatcctccctgccaagtactacaaatgctagagtcatttggaagactcttaaaatgggaaatggatctaagccaatttgacattcaatatcagccaagagtctctatcaaaggccaagacttagcaaactttattatggagtgcataggaataaatgacaatcctgaagaacctatcccagagttagaaatatggaagatatatgtagacagagcatcaaatgagaaagattctgaagtaggaatcattttaatttctctacaacaacatcaacttcaaaatgcactttgaattgagtttgaagcctccaataatgaagttgaacatgaagcaatgattactggcttacaattggctaaggaagttagagcccaaaatatttatctttatagtgattcacaactggtagtcaatcaaatttctagagaatactaaacaaagggagaaaagatggctagttatgtagcaaaatcttgagagctattgcaaaacttcaagcattattccgtcaagcaaatccctagggatcaaaatgcatttacgaatatgttagcaaagttagccaatgatacaaaaaataaaagtacagactagtccctatcacccacttattcattctaatcacataaacattggggtaaccacaattgattattcaacttcctggacggctccaattcataagttcctaaaatttagaacgctctctgatgacagagcaattgcgtgaaagatccagtaccaagccccaagacacgtgctcatggatggaaaactatacaaaagagggttatcagtgccatacttgatatgcatagctgtaacaaagatatgcgttgttatgtacaaaatacatgaaggattttgtggagatcatacgtttggaccaattttttccaaaaagatcatccgtcaaggatatttttgaccaactatgaagaaggattgcattgaatatgtctggaaatgtgaatagtgtcaacactattccaaagttccaggagctcccccaatagagataaccttgatgagcagcatgtggccttttactgtttggggtatcgatttagtaggatcacttccagctggaaaaggagtcaaattcgttatgtttcatccagaataatcatatgtggccatacaagccacgatttttcgttgcttgtggactcggtggatgccacgaccctatacacacatgggcgacaacgatccatgcaaaagaccttttatgaccaagtttggctttgttttgttctttttttcttgttttcttgagtttaactttcagttttcatccaaacaaatcctatgtttccatgcaagccacgattttttgttacttgtggactcggtggatgtcacgaccctatgcacacatggg

SEQ ID NO: 380119 - DNA, 4098 bp, Cannabis indica
aacattttttttattatattctgttaaaagcacaacaatctgttaaatgcataacaaattatacatttacataataggtagttttaaaaaaaaggtaatgttttttttttgaaacgaaaaagggggtaatgttaatgttagcctaccaatgtatataaagtgcaagtggatggacgcgcatacctgtggctttacttctacgataaactgaccacttttcactgcaactggttcatttgctagaacactttctagatggtccagtaactccttggcctggcaagatccaaaactaggatctgcatcacgatgatgccaaactatggcactctctttcttttcgatgtaagaaccatcagtggattccgtgtattgtttcataacaggttcaactatctgtatccacccaaaatcattacacgggccacaaatttgccaatccttgtcagcagaccacctaagaaatcaaatacatttaaaaatccaaatacgtatgtactttaaaaggcaaaaaaaagagtcagataacagatattacatacctcatataataaccatgttctgcagcaataccaagtttatggcaaggagaaaaccacttccctaagctgtctcttcctctcccgctgacaacaaatatggagtttttatcatcagcgcagagcatatttatggtggagatgaccgtcggacttgggactttattgatggatgtttgtggcattacagtaccatcataatccagcaatatagccctgtttttggatcttgaatatgaagaaacaatatgatcaattgacaactttttaaagttgggatcaagggcaacaaccctgaaaccaaagctaagaccgatgccccagcaccttcttctgaaatgatctctacatgttctctccatatcctggaaaaagcttctagaccagtaagctacatcgtgggtgctgacatacctatagtgcttttcatgccgcatttgcttctcagaatcagccatagaaattgcctcattcattgcctcagcagttgtctcaatattccatggattaatacggattgcaccactcaaagaaggagagcatccaatgaactctgatactactagcatgctctttttaggcccatcaaagtccgtgctagactctgaactagacaccccttgtctacatacaatgtactcatatggtgtaagattcattccatccctcactgcggcaactaccacgcactcagcaattgcataataagcagccctttcactcagagagactggcctgtcaataaagatgattggttcataaccagctcgaccaaatgtctcgtttattctcttgcagctagcatgtatttcatcctgaatttcctcaaggtctttccctcttgccctagcagggtttgcaatttggaccataacagcctttccatgccaggagggatgctgcctcagcagctgctccatggccaacaacttcaagttgacacctttaaagatgtccatatcatcgactccaagcaatacagtctttcctgcaaactttcgtctgagctcttttactctccactcattatccggatttctcaagactgactcgatctgccccatgtggatcccaacaggcatgattttaattccaaccgttctcccatagtattccaacccaatataacctctttttgattggtactctagaccaagcatccgactacagcaagacaagaaatgacgggcataatcaaaagtatggaaaccaatgaggtctgaatttaacagtgcctttagaatctcttctctcacaggcaaagtcctgtaaatctccgacgatggaaatgggctatgaagaaagaaccccattctgagcctattaaatctcctccgcaagaatgtgggcaacaccatcaaatggtaatcatgaatccaaacatagtcatcttccgggtttataacctcaataaccttctgcgagaaaatcttatttgccgcaacataagcctcccacaaagatcgttcaaaccggccaccatgtgtagctgagtaaggaagcatgtagtgaaaaaggggccacaaatgctgcttacagaacccatgatagaactttgacagaatgtcagcaggtaaaaatgctggaacacacttaaacttatccaacaaaagctgtgatacatcatcctgctcatttgcatcaacatcagcattcaaagaccctacatataaaacctccatatcatcaggtaaaccattctttaactgcaacaacaacgaatcttcatcccagctaaaagaccaccctttattatccagtcgacgcttagcttttacagggagctggttagcaacaatgatgatgcggtcttgaataatggaggaaggaacatcagacgaaacactattagcttgatcatcatcgagctcagatataacaccaggaacagtcattactcgaggcaatcgtttcttttctcgagccattacaggaaaattccctgaagctagatccaaaagattggtatacgatttggacatcattttgaatcaccttttttttcctcttcctttcaaacgattgttaatccgaactccaaaatcttataacaacaaaagaataaaataaaaccaacacagtattggtttcctactgatcttttaaacgaatcacatcaaccagtcctctgaaatgaaaataaataaaagcattataaacccatctctaaatcagattcaaacattacaaaatgacctattgattccatttccccactattaccaccaaacaaaatcaggcgataacattagaaaattccttacacaaaaaaacaaattgttaacacaaattcaaaacaaaacaaacaaataataataataatacctgcatctaccttgaaggaacaaaatctgaaccttttccagtacggttttggatcagaaggaagaaaaatagtatcttttcgatttcagctccggaaaactaattttagggtttcgtcttttcggcccactccttcaacccaatagccaatttctctctctatctcttctctttttctctctctaaatatgaatccttcccccttttggagagaacaatttgcaaataaagaaatattactaatgtgtttattaagagaaattaaatattaagtaaaataataataaaatattaaataaagaagaggataaggtcggccagtagactacccagaaatgccaactggcaatgaagaaggttcgtcacgcgctcttattcccccggctttaggcttacgtgtcttcatcatacactgacacgtcgccacgtgattgaccgcttaaacaagtcctcctcctctgctctggtggaacgttcatatagactccactccatcgtaaaatcatatggaagctagaagtaatcccctgtgatgcgctccatatgagattcctgaaaacatcccacattttgacacatgtccatgatatttaactcggtccaattattagtggtccccagtgcaccagactgcctggggagaactagtaggcgactgcctctacccagctggagatcacgacacgtggggccatgtaatgccgagagtttggataatgatctagcaacaaagaatgaaagaagttttaataaaaaaaaaaaaaaagtacaaagaatgaaagaagtctattttgctgaatagagaatgaaagaactgtttatttagctaaaaaaaagaatgaaagaagttgataaaagaaattacgctacctctgacgtcatattttgacacgtgtcgtcattgggttggtcagagttgggttgtatagtatctacgttggtggcgtcgcgtaatgaaatcatgggataggagcgaaaggaggtgtgtaagataaaacgggtttcgatacgacacgaattttatatattaagatgagaaaaattagaggtacgtggaattttacacaaatttaacatgtttaacataattttttaaatataataaaataaaaaattattaataataatttaattatataaaaatatatatttagtgatttaatgttaagttaaagatttttaaatttaattttttccaactataaaattaaaaaaatttaaaatttttaatttt

SEQ ID NO: 380120 - DNA, 1155 bp, Cannabis indica
tctaccccaaaccaaacccacacctgcgtctaccctgaacccagatcggcgtctacacccaacaacctagttcggtgtctaccccaaaccaaacccacacttgcatctaccttgaacccaaaccagcgtcctcaccatctaaactagtgaaatcgattttttctcagttgcagtagccccatgagcgagaatttatcgaaacccgaatagaaagcccctgcttgcgtcgtcaaatttgagaagattacctagataacctatcaaaaaaccatcgagaacctattaaagtatgttaatttcagtgaactatcgagaaactattgaaaacatgtcaaaaacataacaaaaaatttcaatcaacaatcaagtaaaagaattcagagaaacatgtagaccatcgaaaacctatctaaaaacaattgagaaatgtcgaaaaatggtcatttctgaccttggtacgctacatatcgagaagtcatcgataatatgaaaatgtatggaaatttaaataaatacccagattagactaaaaaaccaaatcttgctatttcaaataaaataataacaaaacaaaactaatacaaacaacaaaccacacatatctactagaaatgaactatatacttttctaaatatttaagaaattatttaaaacacttgcctattattgtgcgtcttttggccgtccatggtggaagagcagtgagttgggcattcgtgggatggtcgtgcggtcctacgatgtatgtgattgttgtggtctctccacgtgggtagtctctctgggggctgaggagagagatacagaaagagagggagagagagaagagagtttgagagatttctaagggcaagggtaattttggtataggatatatttgtataaaataatatagtgttataaaagggaatttatgtacgtcgtgttcatgaccacatatccaatatttttaggtctattcagatccgatctagttatgccatccgatctgatccaattgatcattttagtcatccaatcaattcgacatccattggatgttggattggatcggttctatccattggatgtatttcatgtaaatttattgcagtaatttgggtttatcaaatattttaaacctagtattttttggatcggatcggatccatcca

SEQ ID NO: 380121 - DNA, 3926 bp, Cannabis indica
actcaatttagcttcacattgttggtgtgagctctccagtagttcttggaaagcaacaacggaccaaattttcctttttcttttcctctttttcttttgttttctaagcaaccaagctgaaaaagtcagaacagtgttgaatatttatgacatttaatagtgatcaaaaccttttacgcattgggtcaatttgtttattgcaggtaacccaattgggtgtggatgccttgatggtgtctgtgattccaggggagctgggaaaaccgagtgtgaagttagataaagctaccattagagatgggagctgcagatgggaaaatccagtgtatgaaacggttaaattttctcaggacccaagaactgggaaaatcagtgaaaaaatctaccgtttcagtgtttcatatgtatgtgaactgtttgatgaaattactcagagctgtaaatgtttatctgtgtttctgtacagtggtttatgtatcagcattataacttgctcttgtgtgtttgtgtagggatcgggcaaaggttgtgtatttggagaggtttctattgattttgctgcttatgctgaggccactaaggcttctactgtctctcttccactaaagaattctagttctgatgcaatattgcatgttagtactctttctcgttgagtttgtgattctctgatatggaagtcttggatgtttgttttatcttcttgttaactcttctttttcttttctttttgtgagtaggttttaattcaaagggtacaggagaatgttgatcagaggtaacacgagtttcaatgttacactttttttttttatttttgagttttgcagtattttggttcatgaattctgatgtaattttggtttttagttagaaaatttaaaatgcagagaggtggaggaatgtgatgaggtgaagcctagaccccaagctaagagcttaaagacccacttgagcaatggtgatgcagataacaacattaagattgtaagtttcattataataaagaatgcttctgaattagtttatttcttatttagcatttttaaatcctgagctgtgtgctggtaatcatatgtttttgcatagctctgattgaattattatataaaaatcaaacagaaatgtatcaatgctctattttttttttcttaagttctttcttttctttggttgcaatgtttacaggatggggcaataaacaaacccactaacaatggtgaatcgaatggaaaccgccgagcatctagtggatcggacattactttgtcaagttctgatagcagctctggacttaacacttcacgagaacttggagcaagtgtagatgtccatagggagcctcctacctacctatcatctctgaatcacccttctgtgcctcataaaaaagaatcctatgaagatcaccagagatcacaatgggactcgtacggaagttctgaccatggagtaagtacagatggttcaacacaaagttcccacaatatccataccagagaagattctcaacaggcttcagatgttgagattgaaaagctcaaggccgacctcgttgttttgtctagacaggtggatgtgtctgagatggaattacaaactctacgaaagcagatcataaaagagagtaaaagagggcaagatctctcaagagaagttgctagtttgaaggaagaaagagattcatttaaggcagaatgtgagaggcttaaaaaacgtaatgacattggaaaggccaataacatatcacagttagaaggtggggacgttcgggctctccttgacgaactcagacaagaactgaattatgagaaggatttgaataccaatctaaggctgcagcttcagaagacacaggattcaaatgcagaattaattctggcagttggtgatctagaggaaatgttggaacataagaacaaggaaacatccaatcaacccaagcaatcaggctttgacgaagattgtgtgaagccaagagcaaatttacgaaactgcgagacagatgaagatgatgaacaaaaggcactagagaaacttattaaggagcacagccatgataataatacaactctcctggagcaaaagatcatagacctctacagtgaaatagagatatacaggagagacaaagatgaacttgaaatgcagattgaacagcttgcacttgattatgagatattgaaacaagaaaaccatgacatctcctataaacttgagcaaagccagattcaagaacaacttaagatgcagtatgaatgttcatctcctataaaatgagctcgaggaccaaaattgagagcttggggagaagaactgaagacgcagtcagaagtgtacactgatctttggcaacacaaaggagcttgagtcccatataaagagcttggaggaagaactgaagaagcaatctatagaattatctgactctttgagaaccgtaaaggagcatgaatcccatatcaaaagtttggaggaggaactgaagactcagtcagaagagtacagtgattccttggaaacaacaaaggagcttgagtctcatatcgaaagcctggaagaagaactgaagaagcgatcgaaagaattatctgattctttaataactgtaaaggagcatgaatctcatatcaaaagtttggaggaagaactgaagaagcggtcaaaagaattatctgattcattggtaacagttcaagagcatgagtcccatatcataagcttggaggaagaactgaagaagcggtcgaaagaattgtctgattcattggtaacagttaaagagcacgagtcccatatcataagcttggaggaagaactgaagtcacagtcaaaagaattctcttgttctttggtaacaataaaggagcttcagtcctgtaccaaaagcctggaggaagaactaaagacgaagtctaaagaattctcagaagcattggttacaataatggagcttgagtcccatacaaaaagcttggaggaagaacagaagattcagtcaaaagaattttctgattctttggccaaaacaaaacagtttgagtcctatataagaagcttggaggaggaactagaggaacaggcacaggtatttgaagctgaccttgaggctttaactgtggctaaagttgagcaggagcaaagagcaatccgggctgaggaagggttgagaaagatgagatggaaaaacaccaatacagctgagaagcttcaagaggaatttagaatgctttccatgcaaatggcttcaacctttgatgcaaatgagaaggtggctaagaaggcaatgacagaagctagcgaactgcgtgggcagaaaatccaactagagggaatgcttcagaaagctaaggatcagctccagagagttagggatgattacgaggcaaagttgcatgagctttccagtcaaacagatggaaggatgtcatcggacactgacagtgtgaccaagcagcttgagcatcagaagaggcacgaggaagaaataaaggagactttctccagggagatctctcagctcaaggctgagattgagaggctcaaaacggagaataattgtgtctccaagaaagaagagcattataggggtttgaaggttgagttggaaaaaatgaggacctctgccaaggaaaatgagatgctgatagaaacaggaaatgtggaaagaaatgagctcataaattctattgctcagatgaagaaggaagcgaaagagttgttggaagagttgaataaaataaagaatctcaaggatgaaaaggaggctaccgtggagctcttacagtcggagttggaaaaacttaaagcacaatatgatttcttaaagtcgtctgtgcttaaagacgaggcagaaaaagagaaacttagaaaggaagtagttaccacctaaagagtgaatctaaagaagaaagaggaatgcactc

SEQ ID NO: 380122 - DNA, 1315 bp, Cannabis indica
acaacctaacatataaacatattaattctacatcatgatgaagaaaaggctaataatagaattttcaactacttaacaggtctaccacctctagctactccaccaagtaacaagaaaacacagtaacttctctttaataaacactccaaataataaattcaactgggtccccaacaaatcaaatgtacaagattctcagctctctctttttttcttttttcatcaacacatttcccctttggaagattaggaccaaaaatccctagaatgcccttattgttgtcagcagcagattccgttgcatcactattatttcttccttcttgcatggttttgatgaatgacctctcaaactcacttacatttttattcatcttctctatcacttaatttccccgaaaaaggaaaacacataagtaaagggcaatagatctatatatgtaataaatatatatattgagagagagataaaccaaaaactaaagtttgcaaataaaatgattcataaatgggtgggactgagtggtagttgttttgattttctttttggtagattgcattagctcctaggttttgggctctggtttttgtaatcctggaggtgatttccattggtttatatttggttttaatgttgggattcagttttacttgttttgtattctttttgtgtgcataatacatagctagtgaaaccgtacgtaagcacatggttttgatatgcttttttaagcagctgttagttaggacaacaatattattatcagctatatgattctcccaagatctcctatacgagtattctagtatgcaatattgtcatttagccccttttccgttttttgcttcatcacttggaaatatgttaactaatatcagggataatatcaaatggtcccctctcttattttaaattttattttggacctccatttaaaaaaaatgataaaaataaccttcagaaaattaaatctctaaaattgttatgaaatattatatataaatgtccaaatcattaaattaattatcaccattaatacttgattgtattttcttttattatattaatttagtttctcattcttttagtcattcttttagtcagtacttttatattaataaaagtttattctattagaataaacaactgcgaaattttcattaaatttctctttctctcttcattttccttttcttttcttcttatatatttaataacatgttatcagcagagtctcttcccaagcttaggtaatttttgaattatttcaaggtcacgatacactaaatatatatttatatatatacttatctg

SEQ ID NO: 380123 - DNA, 1537 bp, Cannabis indica
attaaaaaaaacccaatattctcttatcacagtattcgtgtgcaataatcgttctgaaataaatactgaaacggtgttattgtggaaataaataagatcatagattactaaatatacataatgcctcaatcaacatagtgaacagagttgaacagagatgtaaggaagaaggaaaaatagaatagtaaatatgtcagcatttgccacaacataggtatactacacagttctttctcttcagttagatttgggcaccacctatgcaataactgatcaactatattcttgagcttataattcatatgttaggaaaagaaattgtggggactttaaatatgatatggagagctgcaccaagtagagaatgagtttggcatgtacatagtaatggcaacttcagagcaagttaagaatgttttatgcttcccctttatcgagattttgagatttcattcaaattaattagcctaacagacatttctttcttcttttgaataattgtatagagcattgttgttaagtgattgttgaaaattttcttccgtcttttgttttctctaaaataatttttaaatagcaatggggatcataaagaggatattagatagatctattgctctttgcataaagtttatgttcctcccctctaattaagtttgcttcaaattcggctaaccagataacatctaaatcaagtgctaaaaccaaaccagaaactaacaaaaactcaagaatactcaaacaaaatctatcaaacaagaacactataatttaaactagttcaatcttcaatttagagatctacaacccagattctgttggaggtaaatttctaacaattcataaatgatcactcaatcccttgagacaaatgacaaatcagttgttagtttctggttttagttttagtacttcaggaatctggttgattgaattgatttgatcatatataaaattttccctagtatcaatagtttaccataaaaacttttttcatcatttatgttttctcaaaagaaaaataaaagcttgtggactatgacaaactccatagttttcctgttcagaaacagataccctaatttatacctgattaaggcatatttcattacttatttaaacataaaacccagccaccataaaaagatacgatcaaagctataaacaaccaaaaatcaaaaaaatcagataaagccattaagaaagccaaaccaaaaatgaaaacccttgaccagaaataagaaagcccaaaatctaggtcttggattcaacagatagattacggaaattgcaatagtaatctatcaaagaggaatatacacgaatcatagtaaggaaatagaaatgagaaatttaccggtgggaatgaaaatgatcggagaagttggtgtcggaggcagagagagaggttttcacctaaactattatttaactttacttagaaggaatgtttgtaccaatttaaatagtttggttttataatatagagaaatttgcggccaaactcctttaagtttcaattagtatacacttaacc

SEQ ID NO: 380124 - DNA, 3927 bp, Cannabis indica
ttttaggttactaagcaaatgagttgtcttgatcttagtcccgtcgtcctactatattgatattccccaaaactctacatttatcatactctccaacatcaaaaagattagaccatattttatcaacatttttctgtcaaaatcttaactatatacctctcatctccgaatacccaaacacaccatgataaccactttgacagaaacttccaacttgacaagcctcttcctcactctttcagcaataatcatcacactcctaatttggtacataaaattatccaagaaactcaaccagtactcctcaccattgccacccggtccactaggtttcccagtagtgggcagccttctaaccctcaaaccagatctccattcctatttcaaaagcctcgcacacacctaaggtccaatcctaaagctccgcctaggcagcaagctcaagatcatcatcacctcacctaccttggcccaccaagtgctcaaagaaaatgacattgttttcgccaaccgggacgtcctcagcataacccgaagttctatctacggcatcaccaacattgtgtggacaccgtatggccctgaatggcggatgttgagaaaagtctgcgtcttaaagatgctaagcaatgcctcgttggactccgtttgctccgttcgccgccgtgtggttcgacaaggcgtgaaccagctgtataatcgggttgttcttgatcagtcgcctgttgaagtgggggagcatgttttctttaccgatacttaacttgataatgaacatggtttggggtggtacggttgatgttgaggaaggggccagtgtgggagccgagattagggagatgatcaatggaatttctgagcttatgtccaaacccaatgtctctgacttctttccagtactggcctggtttgatttgcaggggatatctaagaagaatcgtcagttgattcaaagttttgataggattgttaatagaatgattagtacaaggatgaagattgaggaaaatggtgggaatggaaacaatgatttcttgcagtttctgttgagattgaaagatgaagaagattccaaaactcccttaactttaacacatgtcaaatctctactcttggtacactattttccacattttgtaaatgtcaatgttatgtaatttagattatattgataactttctctactttattgatcaggatatggtagctgggggaactgatacatcaaccaatacaattgagtttgccatggcagatatcataaacgcaccagacgtaatgaagaaagcccagaaagagttagaagacgtaattggaaaagacaacatagttgaggaatcccacatttccaaattaccatacttacaagctgtgatgaaagaaacactacgcttacacccatctttgccacttttagcgccacattccccaagtgaaacatgtgttgtgggaggatacactgttcccaaaggatgtggcgttatcatgggctattcatagagatccttttaactgggaagatccattgaagtttgatcctgagagattcttaaaggacagtcctaagtgggactttactgggactgacttcaagtatttcccatttggatctggtagaagaaattgtgcaggaatagctatggcagagaggatggttatgtattctttggctaccctcttgcattcttttgattggaaaattcctcatggtcaacaattggatctttctgagaaatttggtcttgtcatgaagatgaagatacctctcgttgctattcctacaccaagattatctgatccttccctttatgagtagacctatctctctcatatatgttatgtgtgcatttcttcaatgtgcaactactacacaattgctttttacgagtattgtttgtttttttcctatgtattagagaaccttcaatagagttattgaaaaaaatatggtgtattgccatattttaactacaactctaatggtctactaaaatttgtcgtaaatttgacatattgtaacactctactaatttgaacgtattatcgtgattttgtattaactatgtagttcgttgctaattaacatgtttattgaaaattgtgattatttaaaactttatttaaatactccttaaaattaaaaaatgtaacttatatattatcaggatcccgtattttaaacttctacaaaatatttgatacaaaaattattgcctaacgacaatacaaaatatagcttgctttctcagagatcgcatgctctaggtctaactgctccgacatgtacaatcttcattcgctcgcactcactgctgctcagccttagctttatcattacatacacatgcaaacaatatttgtgagtccacagacttagtaagaaaagaataatcataaacataaatatatatatatacagaccgccgtaaccaggcgcccatatacctaatcacaatcagataactgggttaggaagttctcgacaaagtatgactaacctcgaatccaccctgtactcagtactctagttgtcctgatgtggtagcatttaattcataccatttggaggcctagcatgtggcatatctgtacaactctatgtacacttcactgataccctgatatgctaatttgatggccactgatttgcctaacatatatttattggtacctcgttgcaactctatgtacaccttgctgatatcctgatatgttattctcatggcaactaacatgtacattaaacatgtatacatatatgcaatcattatactaatcttacctcgttttcgaactcaggtgtgcctatcaacctgagtggaactgctactcgacgatttacaggcccctaagtcataatattcgtaaaactagtgagtgacatgctaaatccctttttggggacttaaaatcaaaactaaaagttttcttatcgatggataacatggcaatacctaaatatcataaaaacgaggaaatctagggtgccctaaaatgccccaaccggaaaactggttctgtggggtctgttaggggaggaattagtagacaggttcctacaggtccaaactgaactggccgaccagttcattgtaggaaccacaaaaaaccctctaaataactcaaatcatccttaaactaaaccaaaacttctagaccacctaattaggccacaacaaacataaatcaagcaataacatcaagcaatacacccagaaactaaaaacaccattaaagagaaaagtttgacctcttaagctcaaaccttgatcaaacctcacaaccagcctctaactcaacttaatctagcgcaaataacctcaacatcacctctaaaaataggaacaataacaatttaaacttatagaaccctaactccataaatcatgcttagaacttagttttgaacttaagaaaacaaagagaagggggctttgatgtttaccttggattgaattactatgatcttgctagaataccctgaattgagttgaagaaaccttaacttgctgttggtttcttgataggtcgagagagagggttgaagaaagagagagagtgtgttttgtgttttatttctaattttgttaaatgaaataaattaatatttatcttatatcaaacctatagaagaaatcagattaatctaacttaatccattccactaaaggacaaaagaaactatatggcgaaagaccatttgcccttacttacaccaaaaagcatccttgccacctaggggtatttcagtcaaacctaatacctcgaacattttcaatattcccaatgtatatctaatttgcctcgctattactaaatactaaatcataaaaaaatgtgactctatcggccaaacgtcgcgttccactgttaccgggcataaaatacgaaaaatataaaatttcatatataacataaataacacac

SEQ ID NO: 380125 - DNA, 1207 bp, Cannabis indica
tttttttcaccaaaaacccaacttgatatctgaacaaggtatacaaaaattcaaagaaaataaagaaagaaagaacaccattcaattccaaatactactaattcaaacctcaaaagagtgtctcaaagttgttctcaaaagagtatctcaaagttgtgatcttgagtcaaaaaccagagcgcctcaaacgaaataactcttcttggatcaacccaatgaaccgaagaaactcatgcgaaaatagccaaacgaagacagagaaaatgtgcagagaattcagaacagctcattcggcaacttggcatacagaaaaagacacccttcctctgactctctcttttctctggtgaaagctaacacaataccagtggtggaaagaaaaagaacagaaaaaaaataaaacccagctcccaaatggagaaaaaatgtgtttagtgggagtagatagagatggggttgggaaaatggacaatgagagagagagttactacaaagagaaattataggggcaaccaccaagcaccagaaaaatagaagaaaagagatacaagattgcaaaatacccgctctattattataacaataaataaaaggtcatgactttctctatgggaagagagagagattgagagagaaagaagtgttttcttagagaaagaaagagagtgtttttggttttggaatatgaaaaataataatagaataggttccttttctttttctgttaactttaaaaaaaatctacgattagaggagatttatttcggtaggaagagatttattaagataataagcagataaatggattaaaaaatcaattattttgtttttattatacgtggaaatagtttaataattttattaagttataaccaaagcaaattattgttggaggtttttgaccaaaaaaaaaacaaagcaaattattgttggaggttttttactagttcatctttattgtttagagaggttttaatggttattttttatgatcaaagctcgtggttttgacgtaaatgcaggctcggccctgaaatgtagtgggctatagggtaaaaattattttttgggcccttatttagaaaaaaaatgatatttttcaaaatcagcaaaaaaattgtgtaattttaaaatggcaaaattttttttttgggcccctggactaggtgggccctaggcacaggcctagcccgcctatgcccagcgc

SEQ ID NO: 380126 - DNA, 1773 bp, Cannabis indica
gcttcgcatgcggttatattttagtccaaaacctctacgaagaaagggttgagtggccaggccacgtccgccttaagaatagactcactgaaagccaccatgtccttgggtggcaagttggcatgatcattcgataggggtttgaaaccccgctccacgacatactcattgactatcctcctaatattagattgcgttatgatactcttgacatcggccatcccgtacaggagtgaagggtcacaagttggaagaggcgcactggacttgctcgagtgtcgtagtttgcccatatatgcaaaagtgcaaggaaagttagaacgggacacaatgcacttcatgttttcatccaacgggcgggagctttcctactcaatttaggtccagtgaaagctccactcccaggagggtctgagtggtgactagtgtcgaaggatcgtgagaagagctacctccccccttcggccgataaatgggcgactccacagccaaaggcatgggtaaacaactgggggtagatggctcgagagggaatatgcgctctaagtgagcaagcttccccgcgatatcagcgtaaagctgcttgaggtgggaaatatgggcatccatgtgggcatgcccttgaccctccaaaaactcagtctcgacccttgagtctggatagacgttcttgggattcacaaattgcttccaagcattttagacgctccgacaatgactggtagtatcgtacccaaggattaggaacctcctcgtctgagtcggacaaaagttcaacatagggaaccccttcgaggacgtaaggtgatctacggttttccataagtaggtgaaaaaggaaaaaatgctccagtgaagaagtaacaactggcaagactcgagcgtagactattatgagataaatgagtacctgcaagcatagtagaaacgcaaatataagagagaaaataaggtgtatgggtagagaaggtacctgtcgggataagcataagccaaggtaagcccgttgcatctaaattcacaaggagagcaagtgtcggaagtctaaaagcataagtgaaacttaaaggaggtaaaaactagaaagtggaagcaaatacaaaaggatgaaggtgaagtcaagttatgaaagaagagaaggctatttataagagaagggagtgattcatcgccgtagaattaaaataggatcgacgattaagatcaaacacgcgtacccatggaaaatcacatgtgcccacctaacctattgaagagtctcatcaatgttgcggtgcgttgttatagacataatgtcagatgaggtacaccgtgaaaatgaagaaggcaactcacttacagtcaaaaagagatcacttaaaagtaatcttttaaattggggagcaagtgttaaccacaaaaatttaagaagtaaagtattcctataaataggaaatggaaaggtgaatagctcaagattctccatacagataagaaaggacaaaggacgacccccgcctcttttatccttgaatcctctttagtcacatcaaattatcctttgaaagcacccacgcccgtgtgccccaccagcgccctcgcgctccgtgcttgcatcagcgcccgtacgtccctcgcacgcgccgcgccccacacactgcttatgctcgctcgtgtcgtgctcgcacacccacactgtgcctgcatgcccccgcccgcactcactcgcccacgccatgcgtcccccgcacgctcgcgccgcccgcaccgctccacgcgccccgcacgcccgcg

SEQ ID NO: 380127 - DNA, 3856 bp, Cannabis indica
ttttttttaatttttacacaaccataaaataccgtagacccgtttgaagagactgagttagtaagaactcgtaaatacgcttcttaaaaatatctaggactttttttagctattacttatttgattgtttcattagttgagatttcaggatgcctccttacacattctcgtaagttgacaaacttactattagtttgcttacttatgagagctgcaataattcttacataaatgaagcaatcttaagagcatagttgtactaggtctttacccttttagtaatagagtaagaaggtggattatgacacttacacttaggggcgtttatcaaaccgctcaaactgcccccaccacaccgcagcgcaaaaaaaaatgcgatttgaaattctttgcggtgcgatcacggtttgaatttttcctaagctgcgcggtgcggtgtaatttgcagttttgaattgttaatatgcggttcaacccgcaccgcaccgcacattatgaaaatactaatttttatatttatttaggtccaatatgtgaatgttcaacccaaagcccataaattattgtgttattggaactttattttttttcatatttattttcaagccttatgatatttttgacaagtgttgctcaagctttgttgtatttgtgatttggtgatagtccaaactacaaaaaccgcaccgaactgcaccattttttgcggtgcggttgccacggtttttagtttcgcggtgcgggtgcagtttgagaaattaaaaaagccgcatgtgcgggtttgtttgaaaaaatagtcaaaaactgcaccactcgcaccacaaacacccttgcttacactttttttgatgtattttttttgttaattactttatagaggaagatgtcgactgacaaaagttggatgactgggaaacaacactcaatcgagttttgaagtggcatcaacgagtttgttgtaattgctaggaaccacgtaaatcttgctggtttatctcgatgcccatgcatgcaatgtttaaatatgaattttttacacacctaaaaatattaggattcatttgtttgtcaaagggatccaaccttcgtacaactcttgggttttccacatggagtcttattctcaatctggtgttcaacttcctaaaaatgactaagaataaatggcacatgggttgacagacatgttaagaagagatctagggtttgacgactctactagcattactgattctttcaataaacccctaatcaatgaaaacaacaagtatgctgatttgtttaaggagatgaagtctgagttgtttctcgattgcaaaaaagcatgtatcaatgctctagtaaagcttatgcattgtaaagttttgaataggtggagtaaccaatatttcgatattttgctctctgccttgattgagccactatgagtcgaagttgagattacacaatctaggtttgagttatgactcaatagatgtgtgcaactataattgggtcattttttagaaggagaataagaagaaagatgtttgtcttgtatgtggcgaatcttgttggatgaaaagaaagggtaaaggtgaatggttcctcacaaagttatgtggttcgcacacacaccgagactaaaacaaatttagagtttaagacatttggctgaggaaatgcagtggcattactcaaagagattgaaagaagatagtgtgcttaggcatcctgaggatgttggacaatggaagcggtttgaccgactttacccgtctttctctgttgaacctagaaattttaagttaggtttggctactgatggttttaatctatttgggaacatgagcaactcctatagcttgtgtccagttatttatgtcccatataacttaacaccttggaagtgcatgaaatcagaatcgttgttattgcctttattgattcagggtccaacatcgatcctagaaaagacatggatgtgttcatgatactgctaattgatgaattgaatcaattgtgggagataggtgttcaaacctgagattcctacaatggaaccttttttttttcaatgtgtgtgtctgtgttgtggataataaataatttccttgcttatgctcaaaatctgattgaagcacgaaagagtacatggcatgtctcacttacaatgaacacactcattcctttgccctaaacagtaaaatttgatatgttggccataggcattttttggaaatcaatgaccctagaaggaaaagaaaaaattacgatcgagaaggctgagaagagagaaccacttctagtattgattggggttgatattttagcaaaattgcagtgagttaaattctatttgcctggagaacataaacaattcagaggtgtcaaatggaagtgttttgcttaagagctaaactggtcaaaaaatagtatattttttaaacttgagtatcaaaataatttattctcacaacataatctcgatgtaatgcacatcgagaaaaatgtgcttgaaggtttactaagtactcttctaagaattgatgggaagtcaaaagatacagagaaagcgagaatggatttgcaaaacttgcaaatacgacatgagttctggttgaatgaagatcaaaatgtgaaatggaagaagttgccagcttgttacacacttagtgttcaagaaagaattgaatttgaagattttattaagcttgtacaatttcttgacaggttttctgcaaacttagaaaaaaaaatgtatacttataccgacataaatcccatgactttcatgtgctgttacaatatttgatgacgtcaggtatccaaaagtacttgaaaaaagaaattggggacacaattattgagttatgtgtgtatttcaaacaattatatatgttaaagaagactaaatgtttgtaacatagaaaacatacaagcaaatattctaactattttatgcaagttaaaaactattttcccaccagatttctttcacataatggttcacgtagtatgcatctctctaacaaaaccatactaggtggattagtgcactacttgtggatgtatctcatcaagcagtcactgtgtgtgtataagcaatgtgtttggaattgttcccatatagaaggatttattgttgtatcttatgtggttaacaatatattaatgctttgttctatgtactttcaggaagtggaaactcgattcaactgtcacgaacaaaataataatgtcatcccaaacatgctagaatgataattttctgtattcaagcatgtcaggcgatcattgggtaagaagacagttgacaccttatccaactacacattacacttcatgaggcgataggcagtccatgcgaaaaaaatagaaaacacttcaacaacatgtgtagatttatgtctacaatactgtccccaagaataagttaacgtgagaaactgtttctaaacctaaaattaattcaatatgggtcagacttgagatatttattatattattcttaaatttataatttaatatattatttttaaatttatatttaatgcaattttaatgtgtaacttttttacaaacaaagtttgtgtgcccatgagataatcaagtttttgtagactatgctttgtacaaaatgtcaaaaggattgtgtgactaatgggccgattgtaagaaaaagtggattgaaaatattgaggagcttggataggagagggtgaacaggacaccttcagaaggagtaactcaagaggtgtagagtgattgtattgcttattagaccacagaaaatagaacaaatatgtaatgaaagtatcaatcttagtaatactttacattatagtcaacaataaataattaattgtaacacaaa

SEQ ID NO: 380128 - DNA, 3409 bp, Cannabis indica
aactaatctaagaagattataaaaaataagaggactacgtcaattcgatattggcaaaataaaactataaaacgtaaaaagggacactaggatttatagtagttcaccccatatagtcaggaccggccttaggctaaggcggactaggcccgcgcctaaggcccactcctatcaggggctcaaatgaaaaaaaaaaacttttaataaatatacaaatatttttaataattttttaaaatatcatttatttttataaaaagggccctaaaatattgtttttcctaaggcctaaattaactcaaggtcggccctgcatataacgatagtaatgaggctacgtactttgtattttattaattggttttaagacactattatgttcttaagattgtgtatgacaatattacaaaaagaatttatgggtgaaatttatgtccaaatctatgaacgatggctgatgggagacaaacaattcataaatctagtaaaagtaatggtgagaccaatttttcttggaaacaatagcagggaagaagccaaaaagagataatggtctcttatcctcggtgaaatcgtgtttcagaatgatgaaggagatttgttttaagagtgtcaatggtgacttgaaggtgagacttggtgcatcaagaaagtatgtgaaagaaagatcagaaagcggtcccctttttctaattttatcactatgtatatataggcctagagttgggttgtgagctcccacaatccaaggaactacattacaattaataagaaacaaatacaaaatagcataaatatattgagaagatcccacaagtataaaaactatgttgtgattaggtagttactctttttcttttaagttgcttatgtgccaaaatggcttcttccttgaagaatagtgaaagtggagagaatggtcacatcttggtttgagggagagcactaacacaatgaaggtggcacaactctcacaatagcctccttgtggtccccacttagtgaaaccaataaatttacgagtaaagtctatcagcctgtcttgtgactaaaatttaagccccaaaaatattagaattgtgctatgacaatgagataagcttagattcatatcaaaaagagatttaaaacgtaagttgaaccaaattatttggataataattaagatttattatataatatgagttaaccagatagtaatgagtaggattatgatcctactaatttaatatagtgtgagttataaaagtttgtcataagttgataaataaacgtaatttattaattactgagattttataagaatacgtggggtattatgtgagttatttgtgaaataaaaatattttcaagtttaacgaccttatttagtaattttaataggactattgaggtaaattaattttaaaattatcggggtacttcaggatactcagggttgactaaatacgctaaggttagtcttttcttaatggccaagaaaagagataaaataatttttactattaaattaaattaaattaattatattaaggtgaagtatatatataaatattacataaaaagtaaaaaaaaaggtcaaaaccctcatcttgcttcttatccttcttctctcgagcaaactaaaaaccaagcaaaagggtccaaatttgttgagttctctctgtccaaaaccagctcttctgtatgttaatagcgtctagaagtgaagcaacttataatgggaagctaaggtaaggattaattcatttcttctttggaaatcttaagtttaaaagtttgattatgtgctttctggctattgtggagtttgtaagttttgggttttatttctagagtgttttcagactggttttgatgctcatttaataggtttgcagttgtggtgaggtgagagtcaagttagagtttttcaactcaaagcttgagctctctggtaactttagtttaaaggcacggttttgatttctggcatatagagattgttataatgatgttgtatgattattttatgaagtttggaattaattggtgggtttctcgtttcctgtagaaaatggcagactgtttttggaaaaacaatctaccatttttcctactaggaaactctgaaaataggttaccatttttggtgatgttgagaaccctcattttctatattttcccgatattcagggtattggtactatagtgacctataaggagacttacgctgatgaattaaggacctaaacggattaggtcaagtgattttaatcttttatttttcgttgttatgacacagggctcgagatcgttgatttttctctattaggtcgaccgacacacttgaatcgaaactcgaggtaaaaaaagtacatccgtaccacatagcatgttaagatgcgattattattgttatgggtcgattatgatctcatcaaggaaacagtgattaccattaagcagattaaagttatgacataaatcgaaacaattgtcaggtttcttacttgttgattgtcttattagataaagacagagatatatggatgccgagttagggcatcagtgttgccttattaggcaataagatatatggatgttaggttaggacatcggcgttgccttattaggcaatgagatatgtggatgctgggttagggtatcatggttgtcttattaggcaacaacagaaatagttactttatgaagtaacatatatggcttgtcttattatacatgtacttgagtattactgtttaatcatgctattaatctaatgtagttatctatttgttatacaattttatcgtttacttttcttgttgagtctttatgactcacgagtgctttatggtgcatgtaagggcaaaggaaaattaggctagccatgagattacagtattccccggtaaatttacatatcaacttatctgacttgtgtggtcgagttgttaagaattgttttgggttgcacctgatgtgtatttggatgtactcttgtgttggaaatattttaccaggatctagatttactaccaagtatgtttgattaacatcctagaatctggatctctttctctccttctttggtgctgattttccatagtcttacatactatgattgaggtaccacttgatgtgtgtgggcactactcattcactcaagtgtttcgaaatttagagagaagaaaagagagagaggggcgtgtggcttttctgaaagaaaccaatgttcaaagttgtgtgtttcctgaagccaacactttctatttatagaataccctctaggtttaggttagaattgtatggcattaaaataatgaaactataaatggtaatttcttgtgcatgtggccggccatacaaagggaattgggcctcactttgcaactttcccattttgttatttttcattcccattttc

SEQ ID NO: 380129 - DNA, 1615 bp, Cannabis indica
aacaaaaaaaaaaaaaagttttcgtcatcttacccgctaggatgaaaaatgtcagaatcccccgaaagaaatctaaattaagacagatccaaatcattcccccaaagattcaaacttcaaaatgagttttacaaaattttgttcattataatttagctcaaagaaattcctctctaacatcttagagatcaccagcgatcatcaaccataatcacaacatttgtttggtgaagaagctcaaagtattgttaatttttaattaaaaagaaaaaagaaaaaggcaaatctagaaagatagaaagcttctcgaatagtcgagcctttaggttccaaaaaaattgcaagagaaaataaataaaactaatctataattagaaaatttggcctcttccgttgagttggagcatatttctcgcgaacatggccagataattgaaatagagagagcaaaaaaaaaaattgaagaagatacacacctgatatagcaatctcagtacaaaatcgcttttgtgtacggacttttcctgagaaaatgaggctatggattttcttgaatggaagctgtaggagggaaaagaatgaacttgagatttgaaattttggattacgagacagaaggcgtgtattgtatgtatgcaaactggacctggagagagaaagcgggttagatagagagagattgagaaaagtagccgtttgaatggagaaaagggaccgttgagacctcttaataaaatgttcaagttcagaattgagatttaagatttgctgtgcatcatcttaaaatatttgaatttcaaatatttcttaaggggacgactaggattcagtgtcacgcactaaattttttcactataacaggccaattaagcttcgacatgtcagcatgtaagtaagtacattacgcttcgcccgttaatatttgaactctttttttttaagtttttgaatttttttttttgaaccgagaacttgttttcaaaggaaaatacatagaacttttagttcgtatgatgattttataaagttttttattttttaccattttacactgatcttttatttctcttttatcgttttatttttttgcttcatattttataaatggaaattggactctgacaattttgtaacgtttttataggtcttaagtttaaataaataatttcattaatgttctctaattatacatttccaaattatcctcaaaaatatgtatatttcaaacaacaacaacaacaactcttgtagtgaattagaagttgcaaattttgtaacgttttaaaattttaatgtgcaaatattacttcaattttaaaataaataaacaacaataaaatatatatatatcattaattttttttttttttgagatatattattaattattttttagtaaagcattaattaaaatgttgaattcacatataaattatatttggtaaacttttatgaacacactactacaaaaacaccctttagaggcggtttttaagccctttaggcgtcggttttcgcaaaattcgcaaccgacgcctatcagggcgacgctaaagggtttatttgaaccgacgccatatatacccctatggcgtcggttcttagctaggaaccg

SEQ ID NO: 380130 - DNA, 2742 bp, Cannabis indica
gaagagaaagagagagagagagagatgggtttagttttacaaggcaaaattaacaaagttaaagcagagaaaaaacacctttggaataacaataaaaacccaaaaatctcataaaacttacaacataataacaatgataaaaaaaaaagagaaattattcattgattcattgattgattcattcaaagagaaactaatattgatctaagagtcaagctgagcataccacacaccctgaatcttgacatctttaggaaccttagcacccaaatcagtatcagatggctgaacactctcaaaaacaccaatcacctcaccagtctcaggcttagtcttagtaacactaagagtaattttgccagttgaagaagcagtattctttacattctccttttgaagttcctcctcatcacctctgcccccagctggcaatgctacagcattgtcatacccagtcgacccacctctgccctttgggtccaaaaacgacgaaccacggtaagacgggacaagaaactcaccgctgaagctttcgggtttgccagaagccacaagttgcttgattgtgaataggaatggcacgcgttcacctcccgggagctggacggtgactgcggcgtagtctatgccgtctttctcctcgaacttgactgtcccgtcgctcgagacctcgaaaggtccttcgatctcgtccaaggtgtaagttagacgtgtcatgagcttggtgttttggaattctgctggggcgttcttgctaactccttctgctttcactgtgaatgaagttggctccaaacagaactttttcgcgttgtatttccccgctttgaaggcgaatgactcgacaccgccgtcgattgttgggcattggtttgctgttcctgttcctttcacttccatgtatgtcttgctttggatttcgtcgaatgttagacgttttggtgctccttctgcacttgctccctgtttcaacatgataaaaccattccatttttccacttttgaacaaaaaaacccaataagactttaatacactttcatacaaaaataaacattactaaattttcttattagtaatataactaactttaaaagttacacttaattcgttggagggtcagctctaagtgtaggcgagctaggcgtgcacatggccccgaccactcagaccccaaatttgtaaaaacaaaaattattaatatataaataaaatattaaataacaaacaaaaaatataatatgtatcatttggttgtaatggcaaaaagttttaactttaagcaagagagcaagggatcaatccctaatttatttttatttttttaaaaattagttatatgtagctatgaccttttaagagttttttataacttaacaattacattaaagtattagatttatcattttgataataattaaattactcccaaatttaattttgctttagactccatataccttaggactgcggtggtagtaaatgtggtttaatttgacaaatttctcctaatcctaacttaggtaactgagtaatatatactatattaagagcatgctaaaccaattcaagtgtaaataagaaaaaacaaataaggagtagacaaactcctaactcatatttgaatagagacaataactcactaaacactttctttgttgaaatgaaaaatctatagtctctattcaaataccacagtgatcaaactcagattcgcgagtgacaataatcttttccttcaaaacataattaacactacaaacactgagaatcaaacaaagggttttatcataagtaaatattatgtatataaaagtagtgtaccgagacaacaagagcagaagtggcaagagcaaagccagcgatcttagtagcatcaaggcacttttgggccaaatccttaaagtcagtttggagtgagcaagtgagcctggctccaccacaactctcaacaccaaaagcctttgaaacactctgagaagacctcagttgcaacccacctcggctagcattagaccccatcttagtgggctgcattagagtggccgctgcttgtagcgaggctgccatgattggttacacctttcttcttcttcttcttcttttcttcttgtttttctattgtcctaactgaaaaaacagagtaagtaattgaaaagtggcaagagagagagagaggtgtgtttgtgtggagagagtggatatagtacacttattttttaagctgagataatggataggataaggtcttctctcattggctacttcaagctaaatgcattagtttctttcttgtgtttgccacgtgggctaagtccttgtttggggataaagatactctgtggtcagactgtttgttaacttaagcctagctagtttagattgtggactcttcaaatgaaatgcaccacataattgttatgtggttcttattcattcatcacttcactcttatttcaattgtcattgatctttactaattactttgatatattattgtttaagcagtaatttaattagctttttttagggtaattctatactcataattaagaagctaatcataatcatatatatacttgaattaaaaaattacgttatctaaataccaatctattatagaattactcatttacctctcggtaggaaatttaaattgccatttacaattttaccctacaccaacaaaacaaaactaatcaatttccaaggtcaatttcaacctttcactgttccactgactt

SEQ ID NO: 380131 - DNA, 2606 bp, Cannabis indica
cttaagtatttatctgcaactaaaagttaacttaagtatttataccgtaaattactcttatataatttcaagagagtctatacatatatccaaatgtattaacacttacagtgtagttaacttggtgagattagttagagccaaagggaactctccagtgagattgtttgcattaagatttctgcagacacacacaccataatgatttcaattaagactaaattaaaattatgtaactactaatcaaatggttactttgaaaagattatgaacactcacaagtattccaagttcaccaattttccaagctcagagggaatagttccggaaaacaagttactctccatgcccctgaaaatgcatatttctcccatgaatttagccaagacaaattgaactttacagcttcttatacacaaatcaaaggagtttaaaagagacaacatacaattgtatgagagtagttatgtttcctaaatagcttggaattggtcctgataaattgtttgcactaatgcccctgcaacaacacattcacatatggtattccattaccaaaaacctgttacaatatttatatggactgacataattaagcgtgactcacacagtattattatgaattagcatacaaggataattacctaatcggtattgtatgatattatcattaattgggccaaatgagatgcacataacgtctttggtcagcccattgggtcaaaagaattaattttctcatattgggcctctaggcccaattggcccataattcctcataaaagggttggagaatgaacaagagttttgttcatcaaatctctttgtgattattgatttgagcataattattggtgcttaatctttgattagtgttgtttgatgctcaatctatttctaaaaaaagcctttaaagcataatcttgaatgtgttcacaaggctaaatagaaacttacaagctttccaatttggtcaaagtccactcttttggtattgagccactaaggatgttcctgtcaaaattactacaaggcagaacaaaaagatgattattcttaactaccataatgttcaaaggcatatatatatatatatatgtatatatatttacatacacttgtttaaggtgaggtagcttccatagtgatgatggaagctcaccatcaagatcttgtccaataaaataactgcataataagaagaatgaaatcccaagttagaaatctactagtttgcatataaaatccatgaacaaaaagaagagaggaggtttatttacatgctttggatatggcatgtattagcagagattgtacaattgcagatgataacatttttgtactgttctgtgtgtggggtatcaatagttgtttggttactacaagggtcactgaagttccaatctttcttttttagttgttcagctatttctttaatggcttccactgcataatcaatgaaaagatgaaccctttactacccaaaagaataagaacaagacattttgtatacataattagagattcgataagctcaaatagttagacatgtggtatgcactgagggtctcgatagctcaaatagtcagacatgtgttagaatgttatctaacccgcatgcattagtaattgtagtaaaatgaaaacctgacctgttgacccttttgctttttcgacgtttgatagttcaaatagtcaaacatacctaatgtttgagattcgatagctcaaatagtcaaacatgtgttagaatgttacctaaaccgcatttcaagtaattacaataaaaccaaaacttatcatgtttaccctttttctttttcgatgttagccagttcaaatagtcagacatgtggtatgaacacccaacatttgaggttcgatcgcccaaatagtcaaacaagtagtatgcactcacaatatctaagtttctataacttaaataatcaaacatgtggtatgcaaacctactttcatacctaatctaaaaagaatgttatttaacccgcatttcaagtaattatagtaaaactaaaacctatcatgttgacccttttactttttcgatatttgatagttcaaatagtaaggcatatgatagatactcataatagtttaatagctcaaatagtcaaacatgtggtatgctatctatgttcgagtttcgaacttagatacacaaatagtaattggttataacattttaagaaaacaaaacaaaacaaagaaagaacaccaagaaaagaaaaaggagagctttttcaccttcaacaagtggaagagtagtagtactagcttggactttgcattgaaatggtgccaagaagagtagaaacaataacactctaaaatttgttgaagccatattgctgaaaatgataacaaaaccaaaataaatatatacaaaatatatatatatatatatatttatatatattatatatgagtgagcagtggcggacccagaatttaaagtgagggggggcgtaaataaatttaaaaagaaaatataaagtgtagttagtggggtttgaacctttaccctctaacctatttactaattgccttaaccattacaccaaggttactattatgtctataaatat

SEQ ID NO: 380132 - DNA, 2324 bp, Cannabis indica
attgagagtgtatgtttcaaatgttaattgagtagattatacaaaattctgcgtacaaaataatattgacatatcaaaattgatcgatttaattagagtactcataattcatctcattttatatcaactagtgaattatatgttttatctaaaaacatcgttaatatacctttttctcctctctagtggttgaaagttttaactatttgtcaatatttttattaataactctcgtaaaattcaatcacaatcaattttattaattattatagggaattcgatcgaactactatggtgatctggttggaattacttggagcatcaaaagtctaatttctcacaattgtcacaagcgaagttagaaataaaataaagtgaaacaataacatatatttttatatcatgtcgatattttaagattttaattaaaattatagaattagatagggaaataaaatatatttaattatgtttaagtgatttttatgtaatgatattttattttttttaccttagatgttagttgttaggtagttcaaattccaacaataaaactttaattttttttggtatatggagtgttgatatgttgaacttgtgacctccttaaatttttaaaattataataccactacatcaaacaaacttactttatattgtatgttcagaaaagtttttgtatatagtaccccaaacaaatttatttagaccgaaactctaaatagattaatccaaataattttagctggattttgtatgtccaaaaaagtatttgtataaaactcaaaataaatttatttagatctaaactttaaatagtttaagacggatacaaataatttcaactggggtggcctgctccacctagtctacacttagtttcgtccctgttacacctagcttcttgtgctttcattttacatttaaagaggcaaattataacttagctcatattttagcaaaatatacgcactagaaattggtgttagtgctttgtggaataagggcatctcctttgttgcttattctgctttattggcatggagataagcctattttgttgtaatccttgttttgttgaatgaaaaatctccattttcaataaaataaaataaaataaaaactgttaggttgcctataaataggacaatgtttaagtatagttaatgttcataaaaaatataggtataaggtaaatatgataataatcacattcatggaagttatctcattttggtcttggaattaactccggttccaactttgaatcgatggaaataactagccctccatccccctcttatctatttatgacaagactttcaagttttacccacttaatttagagaataatgcttggagagaatacttggtgaggtagaagaatgcttgaaagaagctattttgtttggttgccaaacgaaaaattgtacgtgtatcttttctaagtcattatcacttagttgatatcttagatcaattgatctcaatcttgaaatagttaagctttaacttattattaattatacaacgtaaaatcttagacttgttcgttaacagcttactagcccatacttatgttgggttttgtgtcctaaataaaattcttttttaatataatgagatttactaattaatataagatgagaaatcgcttttatgttgcatggttcacatgatttatttcatgattatgtttaatgtataaattctattaagtccagaatatatgtaatatatatatatatatattttactttcatgattatagtgtcgtcagcacagtggaatataatcatgattatatgttcaaaagtttaactttcccactgatttgtcagttcactggatttagactggcatgataatcagcgataggtatacttacaccttggataagtgttatgtcctttccagggcattggcaaagtttaccagtatcggatgtatggagtatacattggaagggaccgatattgatcttagataagatatcataaacttaccgttatatctttctaagtcaatatcaatggttgatcttaggtctatggatcttaatcctgacatggttaggttcgatctcaagagtgttatttgtgttctttgatttgttagttaagcctaccttttggtctgggtgatacgtacattttgggaacatgatagtacaattgagtgggagcgctaatcatagatatggaatctatagcttctatctggacatagaagtgaaacgatgatctccttcgagcttggctgaatagagataaatgattgaggcctcatttcagtaattatattagtttactgaagtatcattt

SEQ ID NO: 380133 - DNA, 4452 bp, Cannabis indica
ttcctcctattcctcatggatagaattctcatttggaacgtgagaggtcttaacaaccaaaataaacaatttaaggtcaagaaattgatctcgaactatcaagtcggactggtggggttgcttgaaataagagtaaagaataaaaatatgggtatggtgtacaataatatgttcatgggttggtgtttctcaacaaatggggcatggtatataggtgggaggataataattagctggaactcagctatgtttacggtcaatatcttgcattgcacaagtcaattgatgcatttgcaagtttggccaacaagacaacgagagtacttttttgttacttatgtgtatgcttttaatgatgaagtgggtagaggaagcttatggcaagaccttaaaggaattggagataacatgaaagagttgtgggtggtgttgggcgactttaatgatattcttcaaccggaagagagagttggcaggacagtgaagcgaagcaagttgaaagcgtttaaagaatgtgttgaaagttgcaaattggaagatgttaaatttgtgggctctttcttcacttggacaaataagcagggaattgcaacaagaatttattccaagattgatagagtcttggcaaactaggaatggctctagagatttgaaaatacagaagtagtatttatggcagaggggcaatttgatcatttcccgacattgctaactgttcaccctgaactaaagactggagataggcctttcaaatatttttgaatgtggcagagtcttttgggtataaagaaggtgttgatcgcatttggaaagaagacattatcgggacaccaatgttcaaagtggtaaggaagctgaagaaattgaaagaggtgtttcgaagtctcaacaaagaacaaatgggggatataaaagcagctgatttcagagctcaacagtttatgactaaatgtcaagaggaattacaacaacaacctttgaatactaaactgtgccagaaggaaagtgagacgagggggaaatacttagatatcatcgctcctatctaacattcctttctcaaaaagccaaactccattggttgaaagaaggagatgacaacactactctttttcatgcaagtctacgagctagaagggtgagtaattgaatttttcaatcaaaaccatgattggagagagggtttttgatcctaagaaggttagtgattcttttcttcatttctacaatgatttattgggctctactatacctaataggaggttagtgaacttcaagttagtgagacatgggccaatcctttcgactcaaaaacaagtttttttactttagcatttcacccctgctgatgttaaaagtgccttgtttagtattctatatatgagggaaatcaccgggaccggatggttacagcaaacattttttttaaagataattgggaattgatcaaagaagaggtgtgtgaagctattctatcattcttgcattcagggaagctccttaaggaattgaatttgactacactaactttgatcccgaaagtcaagtgccctgagagtgtaagtgattttaggcctatagcttactgcaatgtattttataaaattgcaacaaagatgatttgtgcgagattgagaatggtattaccagacttggtggctcaaaaccagagtgggtttgttcaaggtcgatttatttcctataacataatggtttgtcaagatcttgtcaaacaatatggtcagaaattgacgagaccaaattgtatgatcaaaattgatttgaggaaagcatatgatacattagaatgtgactttatcgaagagatgccgatggctcttaacttctcgggaagttttattaaactattaatgacttgcatccgaactcctcggtatagtctgctatttaacggttcaatgcatgtttttttttgcagctaaaaaggggctgagacaaggagatcctatgttgcccttgatttttgtactatgtatgaagtacctttctcggattcttgcaaaggtggggctcaaaaatgattttaagtttcgtgacaggtgctcggagctaaagcttaatcacgtatgattccctgacaatgtactcttattctgtcatggtgactttaagtcgattgactatcttttgcaaggtctaaaactcttctctatttcatatggtttacaatcgagtgatcaaaaatctgcattgtactgttgcgggatgggggagttggaggttcaaagggttatagatgcatctggttttacaagaagtgtgctaccattcaattatggtatctccaattagagttcctctaggatgtaaaatatatcttttcttaccacccccatactgtatgagataaatgtatgcggtcgtttaccaatatcagtacttggcgattatacaattcgaacaatttttaattcgccccaaattaaaaaaagtaaatcccttgattaatgattaaagaaaatttttgaagtcctaaataataattttttatcaattatcaatttgtttctggtctggtctcaatagggtcagatggcttattttgtgaaagaatttttgggcctataaaaagtgggatttgtgcttgtgaaaattatcgagttattggaaataacaaagaagacccaaaattttgtgaacaatattgccgagtctacctgagtatacctatatgtgcaagaagacttataacagctgaatgtgatggaattgttaagaaaacgattcaaacaatcagggtctggggcacaaggaacatctcctttgcaggccgagccacattaataaactctgtcctaatcaccatccatgcgtattgggctcaaatcatggtactcccaaaagcaattttgaagaaggtatactcaatatgcagatcatttctttagaaataggagttgctgacacttcttctcctggttatgttgcatgggattcactgtgtaaaaagaaattagaaacaccactatatggaactcgactgccttacagaaatatgtttgggccattgcgtcaaagcaagacaacctatgggtttgttggattcgtagtgtatatacttaaaagagaagagttggtgggactctataattcagctgcttcggggagttggtattggaagtagattgtcaagatcaaagaaaagcacaaaggtaattctgcttttcttctactaatgagctagggttatagtattaagaaaggatatgaactactcatgaaagaggaagacaaggttggttggtgtaggaaggaacatattagtttccttcaatatatgtggagatgatacttgtcttctctgtggtgataaagtggagacaatggagcatatattttttgtatgtttttacagtggcaggtgccttggtttgctgaaattgtggctgcaatggaggactcctagttgctccttggttcagctgctaaagtggatataaaaagcgagaatatctcggttcaagaagcaagtttttgcagcaatggtaacatgtgctgtgtaccaaatttggtgaaatagaaatgattgttattggacctatagagtacaaactattgattcatgtatacaaacaatgaaacacaatgttgaaaatagaatcaagagtgttaggaaaacaaaggctaaacaaaaagacatggtgtggtttgattcattgtaaataattagaagattggaactcttgatgggtgctgactagtttgtaaattgtattattttggaagtaatacaattttatctgatttatcaaaaacatatattttaaataatataactaataaatttactataaagtataattaattagttgaattaacgtctaattcaaattttattttgttaataattttatattaagtttaaatatttaaaactatttttttttaaaaaaagataattagttaattgatttaacgatgttagtttaacggttaattttaaaagataaataaaataaaaaaaccgttaaaccaacaatttatattagattagccatgttcaatataagagagttatataaattatttgtaccttttttgttgccatctccaaacaaaagcacagaatcggtagaaggaagatagtgaccgggttgctccaaaccgccgagaaagtaaccggcacaacaattagctgaaatatatgtaaaaggaatgtttgcttcttcaatggcttttctgacttccattttgtcatcaaatactactctttctgcacccattgcattattcttcattcgtgctgggtcagttccaaactcggatgggagaaacctctgcacttaattatattttcattcatttattattaatctattattttttttattaatggcaaaaaataataaattcgataaatatttcaaagtgaaaatggtatgaattaactattaacaaatatatagttaaaaaaaaggtcaattgaaaaaa

SEQ ID NO: 380134 - DNA, 2489 bp, Cannabis indica
ctggtgtgacaagctacatgtaataattgggtttcttatcatcattatatgatttggatgtattgtagaacagtcttcattcacattacttgaaatggtagcaaatgaggtattatatatgccttgcaccctaattctcctttcttattactatgttttttaattgataatgttaaaatttattagtagacataaattataaagcaaatcacatatgaaccccaacttttttatttattttcttcattttactgaccatgagttcggtcattataaattttgactactgtagttttttatatgtaatggaattagttaggtttgattgacaaaatctcagtctcaaattttaattgcaaaatatataataattaaaaaataatacaatttggagtatcataggatatgtatttttatttgttggtatatattcatgatataatgtattcaaacattatatgtctacaatgacatatgctactattttttttttatgcattctctttttgcgcaaaaccaactactcttaaatagtatcattttgaacattaaaaatttagagcatatttaatatttttttttgttttttatttttacaaaagtatttttagaaataaaaatgaaaaacaccttttgaagtttttaaacacaagttgacttgcgtttggttaatattttctaaaaaaaattatttttatttttattttttttattttttgaaaaatgcttcaatactttaagaccctgacatgaataagaccacaccaggacccagacctgaaccccaacccgaccctggaccccgatcccggacctcgaaccctgaacctcgactcggagtcggacccgaacccagatccggacctcggacctggacctgacccggccccagacctcgactcggacacaaaccctggaccccagacctggcccgagacccaaactccggccccgaccctggacttgtatcccaattcagactcagacccagacacgaacacggacccagacccgaccctggccctggaccccaaacctcgacccaaacccaaactcgaaaccgaacccagactcaaaacaaactcttgacctagactcgatcagccccaaacacggacctcggactcagacccaaccctcgacccgaacccagacccagacccgaacacgaacctggaccccgatcctcgactcggacttggacctggaattggccccggccccagatccggacacgaaccccagacccagaccttgaatagagagaaaatagtgagaaaatgatgagagagaaagtgatgagagagaaaataatgtgaaaaaatgatgagagataaaataatatgagaaaatgatgagagataaaataatgtgagaaaataatgagagagagaaagagagagtgaagagaaaataatgaaagagaaataacatggaaaatgatgagagagaaaatgaggagagagaaaataatgtgagaaagtgatgagagagaaagtgtgaaagaaaataatgtgtgaaaattatgagagagaaaataatatgagaaaatgatgagtgagaaagcaatgaaagtgaaggaggaaagagaaaataatgtgagaaaatgataagtgagaaagtgatgaaagagaaggaggagagagaaaaaatgtgagaaaataatatgagaaaatgaagagcatactttttaaccccgaaaatttattaagaagaagtatagggatcacatcaatattggagaaaagaaagaaaggaagaggcatgaaaccaaggagcttactggagctccatgccgcgacacccccaacaacgagagaatctctcgctaatcattagtgtcgtgccgtccccttcagcgagagatttttcactgtcttcgtgtcgcctcgcccccatcagcgagagaatctctcaccatcatttgtgttgcactgcccccatcagagagagaatctctccacgctgccctcttcagcgagaggaggtttcactcattatcacatcataacaacgtgctaccaaagtaaacaactttgaacagagggatctcttccaaaagccaaaagggtgtcaccaccaaaaggtcatcgccaccaaaaaggcatcttcttataagcgttggaagagaagccattagagatgggattaaagggaggaagcaagcaccttgagatacgatgagagattctaaagagaattaaaggcacgcttaagaaaggatgggttagaaagcacaactacgatagctgcaaaagctaagacaaagtagtggacgtacatgggcatgtatttggtacaagtagtggaggcgtgctggtgtcagtacctaggggtgttcataaaatagtcgatccaatccaatccgcacgatccttgtgcgattggaaaattcaaaatctgcacttgtgcggattagatgttgatggacatgtaaaagtaatcgatccaatccaatccacacattttcataaaaaaattaaaaaaaa

SEQ ID NO: 380135 - DNA, 1950 bp, Cannabis indica
tttggtgatttgaggtaagcagctcgtgtcatttaaagtaggaaataggaaacttggttggatgtaataaaatttgtaatgaaatcaatatgtaaattccattctttgttttccactttgaactcttgtactattttcactgtaatcgctgtgaacatcatatatgtgaataacaatttcaacactgaacaagtaaaaataataatacacaatttttccatttccgtaccattttttttttattctaatgtttattatagaaataaactaaaacattataatactatttcactatattctatttattaattccattcccattaccatctcaatttctttacataggtattgtggtgcaatgaataatataacatacattactggaaaagagtataaccaaattaagggtaaaaaggaatatgatttgttaatcatttctcaaacaaaagccaatcagcattaaccaaattaacatagcatattgttgtattgtcttccttggctttttcttttctgtatggactcttgtgcttagcattatttatttaccaggcacttccataaggatgttaattatatatatacttaattaaagatgattaactcattctgataatttaatttgaaaaaagaaaattttcagtgattatattttcataaatatctaaaaagacaaaaagtttatacaaatatggatttacagtaattttaatatttaaaatacggatgtttgttttttgtgttattttttttccctcaatcattaattattacataaactgtgacatatttactcaagttataaataacacaaaaatatcattatttaatgtatgcatggaagacaagaaattatctcaaaaatggtctataattcgatagagaaatacatatattattcttgcaagattgtgtcaattaatattataaataagaatctaagattatgaagctaaaaaaactcccatgacagctcaagaattaaggaaaagttaagggcaaacccccatgagatgtcggaataaagatagaaaaataaggtcacctaaatttctttctagtctttctaaaataagtccaaataatgccagcttattccacaaaaggagatcttagtgatcactgtgaaacttgtttgatataagaaaaatatataatgattaaagatctagaaaaaagaacatgcatgcttattattgttaggaattaggaaatattgttttctaaccattattgttatgattattactcttgttattacttagctaatcatgattaagaatattgcattttatacaccctttaatttatgatagcatatatactgctatgtgagatcattaatttattaggttaaactaataataatatataaatttggtcttatacgagcaattttatatgttgacacaatgatactgagacaagtttcactttaatgatataactgttaactaccaagccaagtgtcagacttctttactcaatttaatgagacaattttattatttactcaatttaatcagaattctttttttttttttgtctggtcaattaatcagatttattaatgattctcaattaataaatctccatcaacgcacccattacttgctgagactttggtggtgaaaagcccaaggtcgatcggcagttcatgaagaacttcaaactcaattatgtaaatgtgtgtgcatttatgcataaatgatgttggtaacttagtatgcagagttgtcacccgatctgacctaataaatgaacacgtgcaaacccaatccgtataaaaatatgggtcgtactcgtactgaattagactggcccatgagtcctaaatatttgtgtcgagctcaggttcatgttaagttttttacgagttgaaatatagacacgaatgttgggttttatgccctaaataaaactccatttcaatgtaatctattttattca

SEQ ID NO: 380136 - DNA, 3329 bp, Cannabis indica
ttattaagaagtattatcgaccgataatatttaacttaaagattaatattgtgatgaggtggatattcattcaacataacaatattctttctaactgtcataaaatatattaattacacaaaatatacctttcacacccaaagagagaaactacctaaaagaaaaactaacatatatgaaaaaccatcaaaagaaaggaaggtatttgaaaaaatagaatcaataaaaagaaaaaaagtaaaagcatgcaaggagaaaaaagcaaaaaagtattccattgtatgaagaccttaattaattcattgatatctataaggtgcaaaaatgaagaagggtattttcgtccaaaaaataataaaaaaatgtgaaacctaggcaaaaaagaaaaaacacacctgaaaatgttgggtaacatacgtgagttacaatataggagagacattaatgattggtttgttttccttaagttaccatatatgtatatgaatacttttttctctaaaagttgcactttttcaaacccattttgccctaaaggaaacacttttttttttaatttatttatttatttttaaaaatttgtactatatatgtgagcataattcaccatacccatttcactcttcttcattaatttcttgagttcttattactctctcactctctcactctcttactctctcactcaaacaattttcttcttctttttgtttagttttcttcttctcattaagatctttttgctccataactcgggttagtttgtttgagtactctctctttctctcttaaatttattttattaaattactgatatgaatcgatgtgttgttttgttttaagttttttgaatgttagaaaggtttttgttaatggctatataattttatatttttcccttgttgttgttgtagatttttaatggttttcttttttatttttgactatgtttttatttttactttagaaatggtgtttgtggatttgatttctctagaggtggtatagaagagacattttcaagtagtaatattattaaagtttttacttcattacgtgaaaactaataatttcaggaaaaaaactacatatatttgttattgctcgacttgtctgtagatctatgtttgtataaatcatatgaaacttttttgttgttgttattgttgtttgttttctctaatttaattacatgtgttttaatctaattaatcaattaatgttataatgttgaatttgttttgtagttttggagagaagagaagagaagagaagttgtgtttcttttcttttgttttgattcaaatttttcatcaacccaaaaacacaccatgaccaactctccaaacaatcctcctactcctcctccttctccttccaccaccaccaccaccaccaccgacactaaggttgaaccctcctctccactactgtcgctacctccggcgacggtgaatactctcacaaacttatcatcatcatcttcatctgatgattcttcaaccattaatccatccactgtgccaaaccctaagtcagagcctgagcctgagcctaaaccacaaaccaccaccatagccgctgccaccactgttgtgactgcccctattgaaaagaaatatgatccttcagaactgttaagcccaccaggcttccctccgttaccatctcagcctcagctttcaactcctgctagagtggcttcttctgtgaacccatctaatgtgtctcttgtcccaaacattcgtcatgttcggcctagtactggaaaattagtacaatttgtacgccgcccaaaactaccaataatttcggtggctaagacggctgcctccaccgccaccaccgctgccagctcagcacttgttgctcctgttccaaacactccttcttctattcggcctggacaagtggttagtataagacgcccaccaccaccactaccaccgccttttaccagtcgatcaacgccaagtactgtgactagtactactcctcttcgtcttagtagccaacaagctggtgagtctgttacactagctagttcaactcatgtccttggtaatagtattaatggtagtgctaattaacaatgtttatttctcctatatatatataacaataacaggagggggcctaactactatttcatcaattgagcctgctagtgataataataataataatcaacaacaagggcaaggagtagtaccaacaacaactttgtctatggcttttcctcctcctcctcctgctgcttcatttcctgtgattcatacaattagcggtagtgaagcacgagctatactatgcccaaacagacacagaaggtcgggttcttttgttccaattcttagtcgtgctactactactcaaccactgaaccctactcctatatcttcactaccaccaataataaatgatcatcatcaccatcgccagattactcctcctgctcttgttcctcaatttcctccatttactagaggtgtgttgagtagatcgattcttgtacctgcaagttctgctggagctagtagtagtagtggtggtggcgataacaagggtaagagtgtaatggtgtcagataatggtgatgaagaaatattgaagatgaataataataaaaataaaaggaagtttgttgagattgaggtcgatgaagatgctttaatgccggtttgcaacatttgtgagaaggattttcaatcatggagattactatttgaacacatgaggtcacataatactgaaagagattggcctggatgttttcctcctcctattaatcttccccaacaactaattccccaaggtataattacctcattgtacaagcctcccatttttttgagttccaattttcctgttcttattatacatacataaataaaaaatttataaattaataaaattgtggttttcatgctgacgatattttttaaatggtcccaattttaaacttttgcactagtttcccaatgcttagttattaataaatcactaattatatgaaactaataatatgtgtataggtgaagaagaattggcagcaacagcaggtagtgatgagactaataagtcagaaagtggatcaggtaggaatgttacaggttttgatcttaatttgccaggaggattagctgagattccagaagaagatgaagatgatgatgatattattgatgtagtaggaggagttgaggaaactggatccaccacgggttttgatctaaaccagttgcctcctcctgatgaatctgaatctgaacctgtaatatttgttcatgtaattgaatctgatgatgatgatggtgatgaaggtgatg

SEQ ID NO: 380137 - DNA, 4713 bp, Cannabis indica
tttttttttttttttgcttataactaactttcatttcttgtgcttctgttcacataatccaggtattcctgcaaaaataataacatgcttattaaatcattgactagaatattctaaagacttagaaactcactgaaattacacatgaaaatagtagaatctcatagaactatgtaagaaaaaaacaaagaatacctgtagaatgttaactgcagcgaacttatcaacaaatatctttgaatgaacaggatgcaaattcaaaggctttagcagcatttccacagtctgtaagcaaaaggttaccaagttaagaaatgggagtgcgatctaatgagtggtttagccaaaaacaaatccaaaaacagttgtttcaaacctttgaggtaaggtgctcatcccagtatgtatatttgataccggtaagtttgtttgtattacatagttcatctatgaagagcttcactagcacagactaaggttatgaaaaagatgcagttagtataaaagagataaacattataattaatgtaattaacgctatgaaaacacacctcagtagtactctttcgtctatctaaaggaaaacccacaacaaatccttccaaagaaagttcagatatctaatgtcacaatataaaaaccacttttttaacattctcaaacaaacaaagactacattggcagtaaaataaagaatttatatatatatatatatataaatataaataaaaatattgcaagtatgaaagactaaccagacacttcaaatcatcagccattaactcaatattggactttttcctgagtagaacactgcaacaataagtaatgagcaaaacccacatccttaaaccatgtgaaaatttcaaaaagccaggaacttgaagcagttagtcccttctaataataaaaacttccaggttaccttaaaggtgaagcaatcttattgttaatgtcagaaacagccaagccaatgtacttactaccaacatctaaaccgagcaagcgcccacgttcaagtccattagtcttaagcaagtcttggaataagctcaagggtttcacgtacctcatctatggggcttcttaagattaaagataaacaaaaaaatgggtctgtatgccttaaagcaaaggtgaatatgtagtatgagcatgtaaaattgaaactagtctgtacgcctacaaagcaaatctgaaaaagcaaccccatcacatggttaagcaaatgtcatagattaaaactagcaacaagcaacaatgtcttaaaatgatgtcaaaaagcaaaaaaccatataattgataccaaagctgaaatggttgacaaagatttcatccaaaaaaataaaaaaattctggtagagaaatttaaaacttctcaaattggcaaaagtagaaaccataaactcaagttttaagcttgactaaaattagcattatatacaaaatcaaagcatttaaggaaaaatcaatacatgcgtaaaattgacattttcttgaccagataattcaaaaatatacacaagcttcttgatttcttaaggaaagatgcatacctttttcttaccagcaagaatggttagaaaccaaactcaatctgcaaaacagagcatgagaaagagtattaacactatatcaccatctacaaaacatacatacagatttaccacactttaaaaaacatttagctatttattttcgtacaaaatggaaatttggcagctcttgaggttgattttgtattgcaattacttaataatagtgattagtaaaaccagagacataatataacagcacaattttgataagctatgattgaaatacatattttatgaaataatgaaagtgtgcttgcaaatcaatacaatacgttatttactgaagttgaaaaatatattctcaatatataaatcaataggccaagattgacatacatattttatgaaagaataaaagtgtgcttgcaaatagatacaatactttatttactgaagttgaacttgaaaaatatattctcaatatataaatgaaagacttcagattgtgtcagaaaacatattattatgtcatgttccttgaaatgtttatgcatagtcatgaatggtgggctaagtttaaaaggctataaagatctctccacagaccacaaataataccagtctgacagagctctctaattcaaatttctatgccatgttcctttggccacaagtcatagaaaacaaaagccactaacatggctataattttgccatcattttggtcataaatgtgtcccatttagctataataagcatggcttcttctcaatcactaattaacctaatatacctgtaaagactagtagtgtcataatttattaatttctcacaagttcagtcaagttctttaaggtatatttagaaactatcttcaactagcttgataatgaaagcatatactgcccacaataaggtataatataaaaatctggcttagcaaattagattttaattaagtaatatggacatacatgacaattaacttggaaaatgcccattatgcttagcttttcaaaagcaaatgtaaacagagaaaattttagtgaccacagatacttcctagtgcaaaatgtcaaacatgagcacccaatacttaaccaagcttatataatcaagtatccaaagacatcatttttgggcagggttttccttttccgtttttttttttatttggggacatgctcaaatttggccaaggctgcaagcctgcaaccatggattttgtgttacttgatatattgatactggctagattgaagggaaatacaaagaaaccactaaatttttatctggtatgttattttagtatatatatataaaaatatatacttatcttatcttatcttatcttacctatataataaatgccaatctaacagaatttctagtggattaacaaaacatttttaaaaactctattagttttaacaaaacatgtcaaatactaaaacaatgctaatgctgaagagatgcaaatgaaaaaaccataattgctcaaaacttctctaaacaagttactagttggtagctgttcaatgaaatattgtccattttggtacaaaacttctctaaacagattattaattggtaactattaaatgacgcaatgcctatttcgcttcccctattaaaataccggataaattttgaaacaactacaaattatctctccaatcaacatcacaacattgttccgggtaacttatttgccactagttaaagtaattacaattcaaattgcctagaaacaccataaattagattttatttggagagaagtttctcaatgtcaccaaacacttcatcaacaacaagatatggaattttcccaaacttaacacagttccgaaataaaacatatgcaggaacgaatgccatacaattgggattcacatgaaagaaacagaattttttttattgaaccaaaatcagaaaattatggaactttctttggccctggcccaaacgtttcaaatggaaaaagacagaacaaaatctcaaaaccatggagattagaacaaagtcgcttatgattattaacacatattcatattataacgtttcaaatagtaataatataacacaaattctaaatcttagaagtgctaaacattaaaaactaatcatgacaaacctaactattattaaaaagaagaaaaaatgaaagaaaagagaattggatgaaagctaaatcatatcctgtagaatgtgaatgtagaactctatacaaaacagagagaatcacttgagaaaactcaaatagccagacaaagttttcatcgtctctctctgtatttaatcctcattagtagcctcaaaaaccgtaagtaaattacctgttgcgagtgaagtaactgtttatccggccaatgagctaaacggagttcctcctctccgatctccgataattaatgaaggaggttgattatatttgtagggtaccgatgatgagttagtggcagaaaccgaaagagatccaaacaaggctgatgaagagattgagtcggagacggagttcggattttataaaaaagttgtaaaaatataccatttataaatgggaaatttgattaattatgcctttactaaaatttttgctctgtaggcaccaaaggtgtactttagcattattcaaacctaaactattcaataaagaaatgttaaaggacactagtagtgcctagcattctcttatgtgtcaatattgttattggttcaactaagtatcaggtgtcatgtaatttaatataatagttttagggagtatcgctagtcaatcgcaacatgacatgtcgagaaggtgctaggcactactggtgcctaatagcaatgctctattcaatattagtagaatatgtcattttttcctaaaatctcattctacccctctcatttgaacaaccctctctctctctttcctcctctctcttgctctttgtaaatacgcacacggagaagcacacaatcgacccacaacccactgcccaccacccacaactttggttcattctctccacgaccaccatgaccacagacccacggactcgaggaaattacattgtatatccactttacttaatttgttttaatttttacctctgcttttatatatttttagatatacttgttgggttttgtgccctaaataaaactcattacaatctaatctgat

SEQ ID NO: 380138 - DNA, 1695 bp, Cannabis indica
aatatatataaatattgtttagattgaattagatctgtgtagtatagttcttttagcaaacaatataaattatgagacacttttttctgatttgaattttttttcattgggtttactggtttaaacgaggcttttctctctaaaaaacagtactgaatccctaaaccccttagcatttctcctatgtaattaagaaggttaatcattattcttaactaagaaaacccttagctagccaggttattttgttttagtagaaaagccttttagccaagcaacaaccgcgtgtatatctatatataaatatatttatgtatttatgatgtcggtgaaataatatatattgatgatcgagaggctgtattagatagagacatagaaaagggaaaaacgcggtaacagagtaagattttaggtgtcatataatattggtaagtgtgcactaagtgtatatattcaaatgcaatgaatagaaagagataaattaatgaaatgaaataatggaagaggaagaacaaacatagtagtagcctttgtttggaagacattagtattagttgattttgttagtgtatgttagtgttggttagtccaacctgtttgttagttgattttgtaagtgtatgttattcttcgagtttgttatacaatcgtattttgtattaattcttctgcatgactaaactatataaataagtaacaccagtgataattaaagtttacgcaatttaattttatgaaatttttgtaaagttttctcgtacatttctcttcttatttgaatttttttttcatggtatcagagccaattaactaacgttcatggctaactccttaaacaatcctcaatctgaatctgatgttaatgatgctcctacaatgaagacctctgctccgaaaatgaggacctctacttttcctaatcaatcgtagaatccatatcctctaatttgtttataaattgattatcaagcttcatcgtgtgaacttcgtggcttagaagtctcaagttgtttctactgtaatcagacatgatcttttattcagtagcgataaacttcttcaattctcaatcaatggtgatctgaatccagcttttagtcaatggaaatgtaaatgtcaattattgttgttgtcctgtttatgatcttcaatgacaaaagtgttgggaatattttaccaggatctagatttactaacaagtatgttgattaacatcctaaatatgttttctctaaaacaatgaaataaacacaaaagggttccttacattgattgtagaagaatataatgactccttcccttcaagatctttagccctcgattcctttctgtagcagaatattaacaagatccgaacttggatctttttctctccttcgagtttagttaccaccgtcttactcactatgattgagtaattgacttgctatgtgtgggcatgacactcattcactcaaggttcgaatatggaagaacaatgaaggaggtgataaatcactaaagaaggaactctctcatctaggttgaagacaatagttaaattgacaagaggatgagatgagagtatcatgttccttttatagtgtttcaattagggcttagggctgaattatatggattaaaaaagaaataaaatattgggagaaattccacatcatggtcgtacactataggaccaatttctagttagat

SEQ ID NO: 380139 - DNA, 1527 bp, Cannabis indica
atattgtttctatcactattattattttttaaaaatatatgtttggacataatatataaaatgtattttgaaagtaatttattctttaattaaacttaattttatcaaaatattttctaatataatccttatatatagagatatcaatataaaatacataaaacaattaaattcattcttttatatatataatcacatctaaatagcacactaatgtaagtgcaatagctaaaaaaatttttcaaagactaaaatctcaaatcttattttaaaaattatataaaaaaaaatatattatttaattaaaaaaaatagaacatacatgtattgtaattaacattacttaattaaacttaattaaaaaaaaataattatacgtacataacatgaaaaaaaatatattaaagaatacttgtggtcgtactgtttattataccttcatgaaatattatattggtaaatgtataattaattaatgtagggttgtatttattttattttaataataattattaaaaactgttgtaagatgttataatgttggaagccatggtgctcacatgagtttccttctagatgatatattgaacagccataaactttttatggatgagccaataaataaataaatatacaaaaggaagctaagctgaagatctcaacctagatttatagctaagaacacgggatgtgagttactaccaattatgagacacatccgacaaaaattcatcaattcaatacaacacatatcattaatgacacacgttatttgtacaacccatttactgtatatgtcaatatatatttatatatgaaaaatgttaagggggcacccacccaccttaggtgccaagtgtcatagaatataataaattattattaatataatttaattttaagtgtgatatattttaatttaataaattatataaaaaattattatcataacatattaaattagtataatattaaatactttaaaatatcaataataatactctttatatacacactttataaatattaatttatttactttgtaaataaaaaaaaaaacatattcaatttattaacaattattaaatcaactcactcatataactagtaaagcggtcctaaatagatttatcgatacacatacacttttttatattattagaaactaagatactaaaccgcgcttcgcgcggtaacgtccaacttttataaattatacatatatattatacttattaagtaatataatctaaaatataatattttaatatatgtattataaacaaagtaataatattaaaattaaaaatataattttaaattacttaaaaagataacggttttgtaacaaatattaaatcgtagacttgacaaaaaaaattgcatatgtttttataataaaataaaggaaaaagataacaacttttgaatttaataaactgagtttgtgattgatgatgtaattatttttaaaataatttttagactttttttttttttatagaaagaaacaatttaacatacaat

SEQ ID NO: 380140 - DNA, 3728 bp, Cannabis indica
aaacaaggctcatcatcgactattacccacataagaaaggtatggtgtactaaccgtctcactgtcttcagctattctcaaagagaactctaccccaggatgtttttcgtacacaggcttcttaatcttatccaatgctgtaaacattatatttttagaaattagagttttccaaattcagaggccacattatttggtctccaaaggaaactgaaagtgaataaattacaattgaaagatctctttggtgtaaaacaaaacaaaataagaacagaaatcttcctcatgaaatacagctaacgaatgaggaaaacataccaagaacagcttcgggagtgcctcctgactgacgaatcattgtttgtaaggtcttgttctatacaaaataaacctatcagtacgtattcattttcaacattaacaaggcaacataaaatctaaaaaaaagaagcaaaagctaatctgtttgcaaagatttgtgctgttcaataacataaaaaatatgacaaatagcaatagttttagcttttattaatactattaataggttacaaaacaaagggagtgaagaaatccccagaaaaaacaacatcaaattttatttttctaaaaacaaataactggtctagtctaacagttcccaagtccttagtgacagaaaagggaaaaaacacaacaactccttatttcctcctctaaagaaatcacattttcaaagatacattagttttttaaaaaaagaaaaaaaaaagaaaaaaagatacataaaaaaagatacattagttttatatcccaacagccaacaaaattcttgttctatacaaaataaaacactcagaataatagaagacttggtatttactacgtattaacaaataaaatagcaaacattaatcatcctaagatgcagaatatatattgaagaaataggaaaaggaacacagaatccaataataaaataaacgtacctctttgagaaaacttaattctgaatctgataaacctcttctgcagaatatttatagcagtaactcaagacgttaaattcataatgcaagcaacttaaaatatctagcaaagtaggtcctttgcagtatggctttactgctatactagtatctctaatagcttaaaatcttttagcttgtcagggatttccaatgctaaaaagtacgtacctgtatccatatttaggtcgctttgcatcacgctttggattcaaaatgaaaacattatatgtattttcaagttgaagatattcaacaaggctagtgaaaatgacttccatagcatctaaatctacttgaaaaaatgcattcacattatccctggaaaagacagaaagtatgaataagtaatatggagaaaagtttttaatttgtttcttgtgtggtttctattccacattttcactcattattacaaattttgttcttataaaaaaatgaagtagagaatgaaccaaacaagtatcatggagtctaaattatgattgctttgtgtacatattaaaaggaaatgtaacaaataaataaatctgaaatcatatcttctttcctacagaaacaaagatattccacttcaccccagccaaatgtactacaattcttatccaaataaatattttttagtaacttcactggaattttatggcaactttaatgaactgcattatgggtaatgaattataaatctcaagaaccagaagttatagaaaataagagctaaatgaaactagaaaatggcaaactgcaaagactccaaaaatatgaaattttgtgaataatgcaacataccctttagcagcagaaacatcatcatcgcgagataaaacacgtaatgcttgctcaaatatggaggtaaccttttctcccatcactattgcatgaacagaaaagctgcaaaggcacaatgatgagctgagtgttttcatatgtagaaaaaagtaaacttccattccaactaatgaagtgggaaagtgaattgattacttgtaatttacatggctgactataggaagatggtgacgcagttctttttcaacactaatcttgtaaaatgggtccaaaacttgtccaatttggggaatccgagcatgttcaaatatgtgatcaatttttgtgaaccaacgctcaagttcttcggattcaagcttaaattctatgaagaaaaagacaagtgttaaggataacagagagatgattaggaagataaaacagaaaatgaatgatatatatttaccttgatttcctttgccttcaaatcctacgaagatgaaattgacaggaacttgaaggtaaatagagtcaacttcgagtagctttaaataattcgcaatgttgcctggaatttaatgaaaatttcaattaaaattcaaatcttattcaaaatttagagaaaaaatgagtgagattggcgcaatttgtacaatttcactcacctgccttagtgtagttgagaagaccaagcttagaggtggaagtttccaaatcatcaaattctgagaaagtaaaaaacgaacaagaatgattgaaattgaaattcaaactgaaactgaaatcaatattgcagcgattagagataagagaatgaagtagatataccaccggaacgaataacagactcgctccagaatttgctcctctgtttgagattaaacaaggagaaaaccgaagatgtacgagtttgaggtcgagctcttccaccgggagacgaagatccatgagagttgatcggcaacaacaataactgaaaattatcgtaattgttagtaacaaaataatcgataaagagagaaataggttaagtgagtagcaacagtaaccagtaagagagcaaataagaggaagaatggagattgaatagatcttagtgttggtgttgttgaaggtctgttaatggattccatggagtccaaaccagtcttcttctccaaaatcttcactcttctcattttcattttctatggaattgcagtgatttttattattctttttagttttattttaggacaaattcaatgtgccacgtggacatgacgtgtaatcattctattggctcttctcttgaaaatgtgccacctggacatgacatgtaaccactcttgaaaactatgatggggtgtaattttttgttaggacaaaattaaatccttctttaggaaaaagaattataatctccttccaaatttcaggaaaaatggtattttaagaatattttggtttattagagaggctgaggaaaatagcaaatatcttgggctcccaagctttattggcagaaataagactgcagcgttcagttatgtggtggataaggtgcaaaagaggattcagacttgggataataaatttatctcaagagctggaaaggaaatcctaatcaaagcggttgttcaagctttgccggcgtatactatgaatatgttcttactcccgttgggaatttgccatcaggtggaaagtgctattagtagattttggtggaagtctaataactccaacgtaatacattggttgagttgggataaacttgcttctcataagtttgatggtgggatgggatttcgggactttcgtgatttcaatctttcattgttagcaaacaaggttggaggttactaatgggggggatgggggggagtaatttggcgtttctaagagtataggctggttgggaagtgggtcaaatattgctatacttcataaaccttggcttatggatgaggc

SEQ ID NO: 380141 - DNA, 3254 bp, Cannabis indica
gtctactaagccaatagtgagttcatgtcttgaaaactaaggatgaaacccatgattgtttcaagaatgtgaaagcattaatagaaaatcaaaacaaaggaaaaaaaaaggttaagaactaataacgacattggtagtttttttttttttttagtatttcttcactaattattgtaagaaagctagtattgcaagacataagacacctcaacatactgttttaaatgaaagattaaatagattcatacttgaaagagtaagatgtatgttgttaagtgatagaatcccggagattttgtgggtagaagctttcttgaaagcttgttactcaatcaacaagtgttccttaacaaccttgaacatgaagacacctaaagaagcttattttggtcatgcttcaaattattacagattaagggtatttggttgtgttgcctatgcacacataaggcaggataaattgaaactttgggaaagtgtatgttttttggttatctcgaaagggttaaaggataaaagttatggtatcttgagccaggtcacaaaaaggatatcataagccgagatgttgtgttcaatgaatcataaatggcctacacgatcaaggaaaccacaataagtgataggactcttccaagctcagaagttgacaaggttaaggtggagcttagtgaggatcgtgaagaacctattgttgaaaatggaacttggcttagtgaagacgaaggccaagtgcagcctaaagcagaagaacctaaaaaaggatattgactagagatagaacaaggaggcagataatgccactgagatgtatggttatgctgatcttatagcagtttctctaataaaaattagtgaggtgcttgacattgagccaaagagttacaaggctaccttagaaagcaagcagagaggataatgattgaaagccatggatgaagagatgacatcacttcatgacaatcgtgcatggatactggtgaaacttccaaataggtacacactggtgagctgtaagtgaatctttaaaatgaaagatgtgattcttggtgttgaggaatgcagatacaaagtaaggctggttgcaagaggcttcactcaacaaaaaaaaaggattgatttcaataatgttttttcaccagtagctaaacatagatccattagaattctattggctttggttgctaattatgatcttaaattggaatagatggatgttaaaactgcatttttgtatggagaacttgatggaaccatctacatgaacctgaagggtttgtagagaaagaaatggaagaccttgtctgcaaactaaacaagtcttcatattgtttgaaacaatatcctagacaatggaataggagatattatgaaatcatcacttgaatcaagctcaaaaggaacaattatgacaactgtgtgtatttcaaatttaactcagatgcatcttgtattttcttacttctgtatgtggatgatatcctcatagaaaggaacatcaagaatgagattgctaaagtgaaagatgagttgaatatagagtttgaaatgaaaggcttaggggctgtaagtcgaatcttaggatgagagattaagagatatagggaaaagaagagtctatttatgtctcaagagatataactagagaaggttctgaagaaatttggcatgtctgatgtcaaacctgtgtctactcccttatcccaacaattttaactcagcatggatcaagctcctgatgcagatgtagagaaggaaagtatggatggcatcccatatgaaaataaagcggagtcactcatgtatgcgatggtttgtaccagacaagtcatagcatattatgttagcttaatgagtagatggccaaccctggtaaagcacactgggcagctctaaagttgatacttaggtacatcaaaggttcacttaggagaagtttagtgtctggtggagctactaatactctgaaaaagtcagctgtactcgaagggtttgtggactctgattatgctggatgtttggacattagaaaatccctaacatggtatgtttttttactgcatttggcactgcaattagtttgaaggctaacttacaaaaggtggtaactttttcaactatagaggtagagtacattattgctttgaaagaagcaatttaaaaggaacttcggttaagaggaatagctaaggaatcgaaggtccaagagtaagttatcacaatcaattgtgataggcaaagtgttattcacatgtcgaagaatcaagtctaccacgaaagaaccgagcatgtggatgcgaagttacattttgtcatagatgttattactgaaggtgctattgtgatgaagaaaattttaaaaaaagcataaccgcttcagacatgattacaaattttttttccaaacaacaagttttattaatatttggaccaattttgtttccgtactgtttttattatgttgtttgggttgaggataaaggtacgttctcatgatagggaatggaaatattgggtaaatgtattaggagtactgtattcttttattttctctttcaattacatttcttttagtccaagacactcatgcctagagagagagggacgaaatttgtgttagaaatttctttgtgggatgttgacggtggcaaggcatcgaaacttggagctggagatggatccagatgcatggaaaggggattggaaagtatggagcgcttctggtcattcaactatatattacgggtatataagtgtgatttgtatcttttttcagtttgtggattttactctgtttgtgtaaaattcggttgaaataagttgctggtttgttttgttggtgatgtactgttgagatttgtgaggttgtgtctatggttctggtaggtattatatggttcatgtgcatttgtgttaaaaattttcttcttccatagaagtgttaaattttaatccttatcctaaaattaactacccatctttctgtttattgagaatcccacgatctcatttcacttcttgttataatttttgattcagataatcatacgattcaagttagggtagtttctctcattctgtaccactaaatggtttctacccacgattcctcaaatttatcagccaactaggcgaccccatgaaccctcgatcacatgattcggtaaatgacccccattatctattaatttaaccatctataaatgttgggttttttgccctaaataaaactctttacaatctgattagttatc

SEQ ID NO: 380142 - DNA, 968 bp, Cannabis indica
ttttttttttgtactttagttctttactggtttgtcggtctagctacataatatttgtttcaatatcaactatattatttcgcacttaattgattgattagttaaacaattgttgtaattatataatacagaacttcactttatgattgggaattaggggtcgggaggtttgattggggttagcttgattttaagtttttcttctattttattataattcattataggtggtattaagaatatttttttttgtaagggtaattttttcaggttagatcaaagaaatgctagcacacaagaggtggaagagtttcttccatccaataaaacaagaagtctatcatgaggagtatatttagtttatgttactccaaattttgcacaaaatggcttgacacttcacaaggtaacatgtggcaaatacgttaaaatgtggttggagcatatcccccgaataggccaaccagattcctcccaaagttagatttatccaagtaaagctatcttgcaaccattctttagacatggatagtatcacatgatatgctgtgcaactgagcatgttgtacagataaatacgctgggacaaatcttctccaaattctttctttaactactgcgacaaaaatagcaaccataatccatatttattcgagattaacttgctaaactgagattcatgagattgctagcctggagctgatcctcaatcaattccaccaaaatagaaatttgattaactgcttctattttttaagacttaaatatattacttcttgttgtgaattatggggttccatctcaaaaccaattggcaatgagtggagtagcccatgttcttatatatggctcaattatgtaccatttattccatgtgggacaatgtccacacaatgttccccctcaagatgatggcaattttttactcatcaatctggaaccgtattagagtggacatggtcactatc

SEQ ID NO: 380143 - DNA, 1730 bp, Cannabis indica
tgggtgggtatgtgtcagaagtagagggttataaagagacccacaaacttattcattacaaagatgcaaactttataaaatttccctatatattttctttatttttttttaaaaaaaattaaatctttatgtatatatatatatgtcatcacttaaaaaaaaaatgatctttatttagcaaaagaggttataattttgtctccttgacacaacacacgcttaatcataaccgttgagagatatgaagtcaacggcattattaataaaagtttttttatttttttttaacaaattaattaataaaaagtttttgcttgcatgcaaatactttttttttccataatattatttttctactaaaaagtagggaattaaatccaattgcaaagattatagctttgttgatcatatgttttttttcttttttgggtactttttctttaatttttaaattaatattataatagatcactttttggggttaatttgatgattttacatataaaaaatgaataatcaattaatactaatggaaacttttaactaataagcatatattatccaataataataatccaagtagtgttgaattaatgggttgcaataaatatagaattaattaatgaaaagaggggtcctacttatgatgattgaatggccaaattcaaatcatacttataaatgattaattattatgtcatttttcaaaattttcatataatacaaattagctatggatttttttttaatttatatatatatgacatattttttttctttataggaaaaaacatgctttgccttaaggatttaattaaaggacaataaagttagtttaggggggccaattttaggaatacaagacaaaatattagtgattagttatcatattatgttctctttaaacttaacaatgtcacatgtatatgtttgcctcaataaagaaaaaatgtcaagaaaaagtttaatctcatgtttcatatgtacacctcgggaattatatatacagttaacaataatttatacataattattataataattatacataaaaatattgactttttgattatagataaattagaactaataagttactactaactattaagggcaagttaatttcatatattaagtactaataatttcatttgagatagattgcataccacaaagcaacaattcaccaggttagcatgttcggtattataactgatgccaattgtttgttttgtgatgaagaattaaagacacactaacgcctctttttcggctgctgatgtaagatgcaaattcagaccattgcaattgggtaggtatggccacttagtttgacgacttagatattactactgtcctcgggatgttctttcaacaaatattcaacatctcgcaataaggatcttgtagctggtcgtaatataaagatcttgtagttgattgtaatacaaaaatcttgtagttggtcgtaatacaaagatcttgtacccggtcgtaatacaagaatcttgtagatggtcgtaatataagtatcttgtaattagtcgtaatacaaggatctttgtattttaaatataggatagttatttgttcttatctaaatattcaattgtacgtgaaacatgggtattaaccacccactacttgtaacttcacattaagatagcattgagtaaccaccatcatattcccataaataggtattcactcaaagggtgaggggaggcaac

SEQ ID NO: 380144 - DNA, 5371 bp, Cannabis indica
tttttttttgttattatatatttcatactctatgttttttattgtatacatattttttatctttgttaacggttgttttattgttgttcatacttattttttgagtcaatattttaaaaaagttaaatacatgttaccacaaactcattatttattgctcttctgatcttcatcgtattcaaaaactttcttcctcttgtaaagcttcttttttttttagtttttttccttcatttgtttgaaaaattaatccacatttttctaattgtggttaccaatgattgttaagttagtttttaccatttcgaatcagtttatattttttttaacaaaaaaagtgacaaaggtatttaactttttttttttacaaagatagagaaagtgacaggtatttgttgaatgaccataatgaccacaaacctagcaagttggtttgggttcattgaatcgaccaccacgacctcttccaccattgttcccgccacctcgagagtagtttccacgaccaccacctgtattgttctggtttgaatgattcctgtcttgattggaatgatagttgttgtccacggttacttgagttaggtcaattttcaagatttgcactcggagaaatagggggtggccagatttgttgttgttactattgaggcttagattttggagacgctccatgttgttataaaatgcaagcaagattcccttcaattcttgccatgtagtcaaagcacgagtctcaatttgcagcacaatgggtaaatactcaaaatccaaaccagatgttacattggatatgagctggttttctgggtaagctgctaaggctagtgaatctgaccagcttttattctgcttcaaacactcttacatcgatgttaagcctttacgagttgtctgaatcagtgttcgagtctcattcattttagactttgagtgagctctatacagattctcaagagctttccacaatgcagcagttgattcacatctaattacttcagttgttattccctcagtcattgaactatacaaccaacccatcaaaagctggtcagtcacaatcaaatgttcatattctagattgatggttactccaaaacctggttcaccttctgttgcagctggagcagggacaaactcatgaggacagagtcaagtaccattcacgaaaccatcaaggagatggcctctgattaaagccaacaccataattttccagagcacataatgttttgatcaagtttcaaaggaaatggttgattgagggtattgaacggttgtgtataattaggcggggatagaactgatgggcttgcagcacctgctgtagctgtggtggtgccttggggagtctgagattgagacgagatgcgtacaaaccttttcctgctctgatattaagtaaaggttttagacaaattacaatgatgaaaaattcagctcaaaggtggctgagagaaacattatctatttatactctgagagaagattataaaaaccaatggacaagagacaggtggccctaatgttggtaaaggggagaccaccaaaacagaaagagattgtacaaaaataaatgtaactaactcaattacaattagtgtaagcatcattaactaatactaaccaggatatcattcttaataagaagtgtaccgatcaattaacctacgaaacctactttcttttcatatattctcttttagttgcattattttaatttttattacataaataagtaatgtaatcacgactcacatatataattatattataattatctatttgactaatttaagctaacttaaatcgagcttattaacactaaatatacaattattagctctatatatattcatattctcaaaatttatcatttgactattatttatgcttatattctgtctgtagactcttatgttattttagcgttaatgataaatgcacatttgtaaattcattctaagttatttatcagatgaattattatttatttcttatgttatgtatatatttgatgtgttttctatagttgtgaaattttgagctttaaacacgaaaatactatgaatttggtgtataaaaaagataatcgattcataaaacaaatcttgatcgaaagaagccaattaacccaaaccaacctagtaggtttgtagtcgttatggtcattcaacagctatctgttacaataaatatgatacatcatctatgggatctaattctaaagttggtaatcaagccaactagaaacaaaatcaataagcagcaacatacactgcttcactagaagttgctggcaatgaagcttggtttgtggatagtggagctagcaatcatgtgactgcaaatgagaacaatataatgcaaaaacatgactatggtgttaaggaaaaattaattataagtgatggtaatcaactaaatatttctcatcttgatactggaaagttgaacactaacattatgtctagaacactactacttaatgatatattgctagttcctaaaattgctaataacttgcttagtgtatcaagtttaacttcagataatgatgtatttgtagagtttcaccttgattgttgttttgtgaaggacaaaatcacaaagaaagtgctgctagaaggagtgcttagagatggtctctactagttcaactcatcactcaacaaattaagttgtagtgaaaaataacctcaatatttctttggtgtttcaagtctgtcaaaatcaagagttgcttaggcagccaattttcaagtttctaagaaagatgtttggcataagcgtctaggccattgatcctgtagaatactcaagcttgtttgtaattctaacaatgtaaaaattctcaaaaatgaaatagaaattttttgtgaagcttgtcaatttggcaatactttttaaattgtctacctatagagcttccaaagtgcttgaattgatccatattgatctataaggacctgccccaattgcatctaatacaaacttcaagttttacatacattttattgatgattttagtagatacacatggctataccccttgaaacacaaatcagatgcactcaatgctttcattgattttaaagccttgttgaaaatcaatttgaaactaaaatcaaaagtattaaatgtgattagggtggtgaatatcaaatttttgaaaatcttgtcagaaccattgacattcattttcagcactcttgtccacacacttcagctcaaaatagaagaactgaaaggaagcacagacacagtggaaatgggactaacacttcttgctcaaacagtatgccactcaaatacggggttgatgcatttcaaacctcggtgtaccttttaaacagacttccaacacttattcttaatgaaaaatctccatttgaaacactatactacaaaaaaccagattacaaacaacttaaaaccttttgaagctgcctgttgtccttgcataagaccttatcaaaattataaatttcaatttcattcactaaggtgtgtcaatttgggatatattgattctcacagaggctataaatgtttgagcataacaggtaggatctacatatctcgaaatattatctttaatgaaactaaatttccttttcaaattggttttctgaaaactcttgcacctgaaaaacaacttgttattcaaaatgaatcatgggatctgaactcccaaacatacatttcaaacctttcattacagtaaaacaaaacattatcactcgagtaccatcacaagcatctcttgactcatctccagtagcaacatcttctcaacatcaggttagtaactctaattcaacttgctcagcatttgatgctcttgatcatggtgttattcttcctgaagcagccaccaatctgcgatacaataatgaggatcaagcttcataggaaccttcagttgaaaatgttgcagaatctaatagaagtgatactgatgcagcaacaataggatttataactgatgttgtacatgctagtaaaatgccttctcatcctatgattaccacaacaagagctggaatttttaaaccaaaaacttatctctataaagcaagatggacaccggtatgtgaagaaccaagcagtgttgcagaagctctaaagcacagtggctagaacagagcaatgggtgatgagattaaagctctaaaggccaacaaaacttacactcttgttcccatatgtgataattataatttatttggctgtaaatgggtacttagagtgaaaaagaaatgttaatggttccttccagatgttcaaggcatgattagtggtaaaaggttttcatcaaagagcaagcttaggttatggggaaacattcagtctagtggttaagatatctactgtgaggattatgatgagcgttacaatctctgaaaattgggacattagacaactggacataaataataccttcttaaatgaccatctagaggaggatatatacatgtgtcaacccgaaggaattgaggatccacaaaagccagaccgtgtgtgcaaattgtataagtcattgtatggaccaaagcaatctccaagagcttggtttgacaatttaaagaatccctattgaaatggaattttcaaaattttcaaagctgatacctttctgttcttttacatcagaaacaatattatcatccttgtgctatttatgtggatgatattattgtaacaggtaacaacaatcaaagattgagtgagattgttcagcaactaaaaaacacttcactctcaaagaccttggtgcccttcacttcttccttgccattgaagtgacaagagatgaaacaggcttgtaccccactcaaactaaatatattgaagatctttaaggaggaacaacttgcaacatctgaagccttgtctaactcttacggttgctcgataatctttgtctattactaatgaaaaggaaatggataatccaataatttatagagcctaattggagcacttcaatacatgtgtcacacatggcctgatatcatttactcgataaactttctcaatcaatttcttaaagatccaacaaccacacatatgttaaggtaccttacggatttctcaatcaatacatgtgtcacacaaggaatgcagccatgagaatcttaaggtaccttacgggaaccgggacataaggtattcacatatgttacaatgatagaatgaacattactggctattcagatgcagattgggttaacaacattaatgatagaaagtctgtaggggttattgtatttatcttggtgatacatttatgtcctggtcatccaagaaacaagttgtttctagatccaacactcaatcagaatacagagcacttgctcatgttagt

SEQ ID NO: 380145 - DNA, 2923 bp, Cannabis indica
agatgatatgatgagtgacatttacattttacatttatttttattgttactattctttcttttgttcattaatagagcaaagaaacattttaaaggaagaaaaatatatatatatatttattgattttaaaataaatgatagacagaggtaattgaagaagtgtgttgtgtagtactgtgatgtagggtataaaaattgattattgtaatcctactctcactttgatatagaaatttatttgataatgatttattatatatcaaatagattattcttattattattatattattttttgtcatattaatgtgttagtttataatattaagctaggctagctagctgttattgtcaaactcagtaattaaataattgaaaatttccaacacatgtgaatcactttattaggattttctagtgtttattttaatttgttgagctgaaaatgcttgctggcacatcgaattgattggtatgaatgttggaatggcttcattaaatgatgaatactataccaacccatgcgtacaactataaatttatggaatcatatgcattattaatggctttagagataaattgagaaaggccattgatgatcttaagcttccaacaattgacatctctatctatatttggaaataaatactgaatgtataaaaattataatgtatacatatgttaacacaatcggtttaattaattatggtccttattatataatttacaccctcaaaaaaaaattatataagttactatacttacatgtattccatacatgcatatacatttctccttttaaggttttctgatttctgacatataccctttgggaaaaagttagaataaccaagtcaaaagttctaatatataaactttaactaatcaaagatgatgattctcttttgctaccaagaaaaaaaaatgacttacacaagatatttaaggcacaaaattgacagtttaaataatttcattctaaacaaatattattgagatttctaagcaaagaaacagtggtcgttttcatatacgtacttagttgattataataacattgaagttaaattaaattaaataaataatttcatcaaataaataaataaaataatacatgaacatgatcagcaggctaggccaattttattcctagcacttgacctaacgcgtcatgtatatatatatataacatatatattttatatataatgaatagccaataataggtctctatatataatatacttaataatacatgggtcaatttaattaagcaaaaagtgagaaaacttccaattttgcactgatcataagttagctagtactgtttcttttcgtgaatcgtgacaaatgggtcagatatatattattagaaggaaccacgttaaagttctttcaatctcaaatccagccaaactgatgaaatggtcttatttatacgtaattaattatattgtctcttcgcctgtatccatatgtttattcttctatatataataattctttgtagttttatatatatgtgtgtgacagttggtggtctttcctataggaaaatcatcttgtaaaagaaagtcaaattttgttttttttttcttttctttccagctgcaggcttcgatcggcgaaagaaaatgtcacatattatctatatagtcagagaagaattgaatctataagtatatatgaagaagaaaaaaggaccagctaataaggctaattatatatataacaattttcgcaggaaattgcgtgtgggaattctgtttttataattataacacaattattacaagtcatatcaagttgtttttgcttgattatttttgctttatattataggatatatatactattggttttgtcttgtttccttaaatcaactcgatccctatcaaaccatatgtgcctatgtatatatataggaagatataagctatagatttgaaatggaaacacgccatattgcacgtcacacgttgcttagtaaatttgaatttaggctttacatttattgacatgacatgtacatatatacaaaatgaaatgaacaaaaagcaaatatatacatacatgtaccatagttcttccacgtacgagtcaattatatatacatttgtagcttgttcacatggaataatcggcaattattattgtggaaatccaatccttttcaattaagactaataactacaaaacaaattaaagtaaaatagaaacttttgaattctagtttattatttgagcacaaatattaaagtttccacgtggaattaatgcacatataaatggtgttacgaaaactatgacctatccaaacaccccacaagctagagttgatagaaccacgttcatttttatataattatgtgtatttatacgtggataaaatgatccatcgattattgccccctggaaatgcatagattaaaatgtgtaaaacttttagttcaattgatcattaacttaaatactacataagtattataaatgaataatatgatgagtcaggataaatattccaaattaaaatttatttacttttaattcccgtatgtgtatatatattatatgtacatgcattatgtagtcagtaaaatttatttatattttcttgaaaataaatatattctgatgcagatatacctatacaatctgttcatttatttttaggtttttattatcatcgatacaagtacccttaataaacaaggataagataaaatagatcattaatagctttaattatacctgccgatcgatctctagaacaaaaagaacagagatatttgtcacgatgttcatgttataagctatagatattatctaatattatatatataatgaatagtatagtgtctgcaatttgagatatattacttgatggtcacggggtctttaggggcttaaacagtaaagaat

SEQ ID NO: 380146 - DNA, 3866 bp, Cannabis indica
tttcttaatcttaagatattacaatgagaccagtatgaatggccatcagtttagcatggacaggtgagtattcatggttaagaacagttgatgaagcaaaaacaactttttcatgatggtcccgcatcacacaaccagctcccgaacatcctgcacccccttcacaccaacatcaacattaatgttatacataccaacagccgatgcctcccagttagcctcttgccttttttgtcctttctttcctttatcatgatgcccatgaaattcttcaagaaaatgaccgtaccagtccaaaacctcagcatgttttggcctaatacaacaatggttagacctattacggaggaaccataacttccacgacaatattaggaacaactcgaacatatcttgagccatgttttgtgacaaccacatcagcaatgctaacacgtcttcatgaccaattcattttatttgttggtgtaacccagcacttttccacaatgcccgtgtagtcttatagttccataaggcatggaaaatattttccttttcaccagtagaataatgtttacagtggggtcaatttacaagcctttgctagctaatgctgaatgaatttgaagccaagaatgggccaatttccacacaaaatgtttaactttgggtggaagctgtaatctccacaagtacttccaccacacttccatactactataatctgattggttcacaacttttcttagtgcatctgccatactacagccacttttgacagcgtattctccatctttagtagtgccaaagaattttgtcttctaaatctcattccatacttgggagctagaatatgatttctgcatcctcctcattaaaaatgtttctaataaattctcatcccataatccatcaccattcttcaaatctattacatgcaaccccctaagtatgctcgacttgtcatatattttaaaatggataggccttggcagccacagttcttctacaatgcgcaccccatttccataccaatacgccatccgtagcctcccaaaataaccttttcccaatgtaaacttctccaaacaaacgatgcatcagatccacactttgcgtgcaaaatacttccatttggaaagtagctggccttaagaactttactacataatgaagagggaaatcgaatacatctccatacttgcatagcgaggagtgcttgattgaatggctcgaggtcacataatcccaaacccccatgttcttttggcttgcaaagaatatgccattttacaccaatggatgcattgattttttttagaggagccccaccaaaatcccgcggccattctgtggatattattgatattactcttggtcaattagaaacagatcattgtgtaagttggactggcctgaacaattgctttattgagtacctccttcgcagccatagagaacatggaccctttccatccctgaaatttgttccagaccctgtttttgatcacatcaaacagttattttttatttctgccaacaaaggaaggcagccccaagtatttaccgtgattatctacaattttcatacccattaactcaatcaattcttcttttacaagcttcccgtgaagcattgaaagagcctaaattatgatctgtaaagaagagatgagagattgttaggccatttctatcaaactttatacccttaatgtggccattcctttctgcttgtggaagtgacctcgaaaaggctttagcacaaaaaagaaacaaaaaaggggaaagaggatccccttgatgtaatcctcgttgtggtattatggagccttgtagctccccattaataagaaaggagaattgaaccgatgacacacacctcataattttctcaacccaagcctctccatatctcagtcttagcatcactttctataggaaataccactccacccgatcataagtctttgccatgtctaatttaaagggcaattttttctcgttctgaaatcaattctttctcatacaatggagacttttgtaaccaatgatagcattgtcatgcataactctacctttgacaaacacactttgagacactgacataacctcccctagagttgttctcatcctattttccatacattttgagacaatcttatatattacattacataagctacaaaattcttcaatcttttttggtcgctcaacttttcaaatcaatgccacaatggtacaatttaagcaacttagatcagaattattattattcaaaatgcttaaacataccttcaccacattcttcttgagttggccccaaaatttttggtaaaaaagagctggcaatccatcatccccgggggctttggtggcattcatttccttgacagcatggtgaatgtcctcctccacaaaatcttgtgacaattgctcatttatataagccgtgagtcgtggttgaatagcatcaagaacctcatcaataatcaaagatgcttctcagaagctgtaaataaattcctgaaatattcttccacaattttttgaacatttattttatcatcttgccaaactccccttgattctacaaatcctttaatatcattctttttcctcctcgcagaagctttacggtgaaaatccttggggttttgatcaccccatttaagccacataactctactttgttgttttcaatacgtctcatctttatccaacaacacattgagctttttctctgccatttgtatctctgtccacacacctggctgctgcagactagataattcattaagtgttttttttgagtttatcaatctccccattaagattcttctttttgtttttattccaaatctgaagagccttccccacacgcaatgttttggctttaaactttcttactgaaccacaaacctcatgcccatcccaatgttgttccactagctctttacaaccttcttcttcacaccacgcttcctcaaagtgaaacctaccccttcttttaatctgcccacatctatccctttctatccacaccggtgcatccacaacaaaagctcaataatctgtttcccaccaatcaagcaattgaatatttgcgcccacaaattgttgtaactaagcctcattacgtagccctctatctatgctctccataacactatttgatttatgcctatcacacaaagttaacacaattttaatagagctaaaatgaataagttgacaatcatcaacaacctctcaaaactcttccatttccttcgaagctctggcacgccacctgtcttttttgccaagcttacaatttcattaaagtctcctatacatagtcatggctcttaactcttccctttcatctttcataaaaactcccatgagaactttcgttgactagcatctgggcgcccatagaaacaagtgatagtccatggtagaaaatcttttcaagcaacttccgcaacaatatgtcctggagaactagaatcggttcctaagtgcaactcttccttccacaacaatagtagacctccacttagacccacacgatcaacagtccatatcctatctccaaactgtaatatagtagcaagacattcaacttggtatctggtaagtttacttttagctaagaaaataatgctcaggtcgaattcccaaagatggcattgtaaagcatgtaatgtctaagggttcccaattccttcgacatcccaacttaagattttcattgcacggttctgaaatggagattcattgaatcgaatgacgactataacagatgtcggctcaatccggaggaaattatgcagaagctttacaaaattattatgaagctatgcgactagaaattgatccctatgatcgaagttata

SEQ ID NO: 380147 - DNA, 1680 bp, Cannabis indica
tatttatatatatgatatatgtaaaataacatatttttatattattaaatgtttggctggaacccctgaacactaagtttacccaactctctttccctcatattgttttctctctacagtttcacattaatttcttgagaaaaatcttaataccctttaattgttctactctctccttttttatatagctttttattttattgtttttatttctaacataaacttactaaatgtaaaagtgatgaaagtagataaaatatctacctttatttgaattggacaaactattaactatatattatatatgaatagtagtctttgggatatgttaattaataattacatgatctaattggaccaaaaatttatgtgaaaataaaaagtcataaaatataaataaatagaatcggggagtaaaggatatgacacagaataatggatatcccctaaagaggtcccaaatttctctgccacaaagcatataatttcttgacttttattttttcttctccattgcctttaatcatggacagaattataaagagatcaaaaagaaaatgctcaaacagaatctcaattttatttcctcttcgtataattaaggagaggtagctgaatatattagatagatagcttttcaagaagatatatgagaaaggtaatatggttgccactttcataaatatggagaagaatgtatgcttaattagaaagtagatcgcaccaaattatattggatatccataagcatatgctatatagattttatatatatttatatctctttatctctaatcaaacctttcctctttctgatgattatatatatcttttcaattaacatctatatatataaggccttccatgactctcttcctctctccacaagccaaatcatgaacatatttttatgaatacaatatcatacagtttggtgatagagcagctgagcgatctagttgtagggcttctctcttttggcaggcaattatataatggaattcattttgtaaatatatatttaatgtgtatatatattatatatataacttataatattatattaattaatgtaattaatgacccgccaaaggagagttgcccttcatctatttcggcttaaatcatatgaaaaccctatattcttcgtttgcaggttgagcctaaagtttattggtttagatcttcttcatttgatgggtgtcatgtaattcaaaaggtatgtatgtaattatcaaaagatgattatatatattagattaatatttattttttaaaatattaattaattaaataaattttattttcctaataaaatgatatttaacaaaaagtgataaaaaaaatatatatatatatatataaatttatagtaataattaaattaaaaaataatgcctaaggttttatgaaatgattcagagaatttattgtagtcacatgtcacaatgttattaagtgatcacttcataattttaagaaaaaaaattgtaaataattatttaaattcctgcaagagaaatcaaccttgaactattgaactttttttctttggttaatttgatcggaggaatggctgttgtggccattgaacaaataaatttttgttataagaaaattaatctgtgtttggagtttgctttcaaaaaaaaaatctgtgtttggagagaggaataatat

SEQ ID NO: 380148 - DNA, 3937 bp, Cannabis indica
ctaattaaagttttatgctgttttttgatgttttttttcaggtggaactattttattgagttatgagcgttgtttgaagatgttatagctttattgtctaaatttctgggggcagttttgtcccatggggctcgctctaagattttagcagcccatggttggcaaagcatgctctgcggttagacgatgagctatcctggttcgaggaggttccagcgccggtggcggacatgggcgtcgtaaattcatgagtgattttaatcactttagtaaaaaaaaaaaaaaaaaaaagggaatggacaacggtcttaagtttgatttgaagccaattttctgaatttctgaaaagctgatggtcatcattgtgccaagtgtataaccatgtcacacctgattaatattaaaaatatatatcaaattgttcgatagctcatgacccttttctttcttatccactattccaaaaagagtctacttctctggcaatggccaccaccggcgttcaccatttccaactaacccactctgtcagttccattcgcccatctactcgtaccaaactcagacctaactcggtcaggtgctgcaccaccactggaaccaccgaggcgcagaatgtcacagtgaagaacggcaatgattccttggagatatgccgagtactcaacggaatgtggcagacgagcggaggttggggaagaatcgaccgaaacgacgccgtcgaggctatgctccgttacgccgacgccggtctctccaccttcgacatggctgaccactgtaagtctagttgtttatttatttatgtatcgactttaattatttgattcttcaaaatttagtggaaggaggccattaggggtgaagatttggttaaaagtggagaaagttgcgtttgcttagaaatttttagggaggaactttgttgttggtgctctgctcaaatatatggattctgtactcattgcctttgatatggcttgtgttgtgtttgtatgtgaatcacttgtgtaatggaaacttagttaaaatagtcagttccaaatttggttaacaaggaaatagattgaatatgtattatgtacatgtgtgtgcagtgtatttgactatgctgcaatgtgtgaactttttatgttgtgaattgaacttggagtactttggtgttggatttgcagatggcccagctgaagatttgtatggtatttttatcaacagggttcgtagagagcgtccacctgagctgttggagaaggttaagggtaagttggtttcagtgagtaagtgttggaagaagatttatcaatttttcactgcaccatttttctcttatgcgttatttgagatagacgtggaaaggagatggaaaaaaaaaatatgcactaaattgaaatatctgaagtttttgtatgctaaggatttactgtttctctttagatcctttatttaacaccagatactatagtgaatcgagtaattatgttttttttttatgatatgcagtcttaccaaatgggtgccaccacctgttaagatgaccagtggttatgtaagggaaaacattgacctttctcggaggaggatggatgtggcttcactggacatgcttcagttccattggtattaagcctttcattttttccttctttatatctctcttttgtgtagttggtgaaatgttcctgttcttttatattatgcataaccgtgtagcatgccatgttttgctcatatgtactcatagttagaacttgatcgagcctttgaataatttaagaacaatcagattggtgattttctgtattttatttttattcatttttttaagtaaagatcaacatgaaatttgatgacatttatttccatatctaattgaagcgattatgctcaatttaaattgattaactgcctaatgaatattctaaagggtctttgtctttgttcactagaaattttttggatgctacaacctagaattccatgccaaagcatattttaaagttgatgcactgttatcggtatttgtttatcattttctgttctatctaatatggtaattataattgtacttgtctgatctgattattttgatattgcatttgggtttgattcattattttgattatgtcttcttcattccatgtgaaacaggtgggattattcaaattctggttatcttgatgctttaaaacaccttacagatttgaaaggagagggtaagatgatggtttgctttgtatttttttggtaaaatttataatccatatgtatcacttcacttcaaataactcatcccatgcaggtaaaattaagactgtggcattgacaaatttcgacacagagagacttcaaataattctagaaaatgatattcctgttgtaagcaatcaggtatagtcttgtcagttgtcacattacttaatttattcttttagaggcttaaacagtttctaatcttctgataaactatgcccaattcctaatgacttaggtgcaacactcaattgttgatatgcgtcctcaacagaaaatggcagagctctgccagctcacaggagtaaaacttataacgtatctttcttctttcctctctatttatgcatatgttaactagcttcttccatgaaatggctgccatctctacacccgtttctagctccagaattctttttgtattattatagctctccctaaaatgcaggtacggtaccgtaatgggtggtctattatctgagaagttcttagacaccaacttgtcaattccgtttgctggtccaccactgaatactccctcactccaaaagtataaaagggtatgttttctttaaaatagtatgctcaagtaatatatccagaagtttaaacatgaaagaaactagaagaattggaaggatgaactcagtatgcttctataccgtgactattttgtgctgctgatacattcaaaatatcatattgagattgattagataagaagaatgcttgacaagttctaattcttgaaattattttgtcaaaactatgagttatctttataaagtgtgagcagaaaaattcagcaatgaaacaattatggcagtgctatgctattatacaactaaaaatgacatattagaaactttgtaacatgtgtggcagatggtggacgcttggggaggatggagtttgttccagagtttgcttcagaccctcaaaagagtctctttaaaacatggggtttcaattccaactgttgctgttagatacatactagatcaagtaatgcaaattcaccatctttttttttgtttgttagaaaaagtcatgcttttgctgtttgttttaatatttgtagtgcgttattttgtttgggaaattgcagccgggtgtagcgggatcaatgataggagttagacttggtttggcagaacacatcaaggactcaaatgccatattctctctttctcttgatgaagaagatatgagcagcatacaagaagtttcgagaaaaggtaaagatctactgagagtgattggagattgtggagatgaatacaggcgcgcctgaaattcttgatcttactttaatgaaccacagaaaattttgtatattttgtctttctttgtctaatatttttgttcaaatcatattgtacctgtaaacaatgggatgtaactaagaaagaaaaaaacaacaccgacaaatactaaaaaatgtaatattagaggcttttctgctaaaccaaggactttgcttattaaggatatgggattattggttatttgcatgtaatacaaggacttgtttggtacacaggatgattggattaggcaagttaatttgtccagtcttgtgttgggtatgctgaaagtgtggataattaattcagttaatcacttgtttcacgataaaatttaataaaatgtgatagaaagattatgttactgtaaaagttatatt

SEQ ID NO: 380149 - DNA, 1149 bp, Cannabis indica
agttaagtatcgatttttatataattttaaaaaataattttaagagaatattgctaattaatcataaaataatacttatgaataatattgagcaccaatggtactcaataaaatattaagatttttgcatattattataagagtggaaatttaattagggaatcactttatatatcaattttttttaatttttttttcctatttttatgattctttttatacaacttgagttgctctgttggttgtgattaaatgttacttgagttgtgatgtggattattgtctgggttgcgatttaagttgttttattgattgctctataaattacattgtatattctgtaaaaataataataaaaaaacttttatatttataaataagaaaatcctttttaattattaagttgattgattagtttttttttattttgttttttttttaattttaaagtaatgtgtttcatgaagtgagagtgtgttttggtttattaggttaaatttaagagtcacaagaaagaagggtacggctgatatttcaaatgtattgtcatttctataatttaactttgatgagactaagaaggaagaacaagtgagacttacactcatacacaaacaaaccataggtgtactcaacaatatacaccaaaaattaatagggttttttcaacaattatatttatctaaattaaaaatcacttcttaaaaaaatattatactttgaatgcacgtatattgttaattaattttaaataactgaatgtgttctttatctgtttatttgtttggagatatgactccaaataccaccacatatattaacactaattagtgatgtttaaaatctattctccaataccaatacacataaaactatagaaatgttgtgtaatattgttattggtgtgattaaatataaaatagaaatacatacagggtgaagaattggcaaaaagtgttttcctgtccccatccttgccctaccccgcttattccccatttgagacgaggcagtaaatcttctaatggggcaaaaaataagaacggagaatcctctaatataaaaataaaatttattttaaaaatttaaatgtataaaaatattaaattacaaaaaaaatatatatatattacacattatttattattt

SEQ ID NO: 380150 - DNA, 3539 bp, Cannabis indica
aggcaacatcatgtcaatattgaagctctaaagaatttagaagaaaatcttcagcagttgaaaaatcgtagtagtgaacttgatactcaggaggaacaaatgaaaaaaaggctgaaaaaaattgatgattcgtcctcaaaacataagagtgatctcactgcacagaagaaggaactgcgttcgatgcatgataaacatcaggatgccaggttggtattttatttatttttttacttgagagaaaggtcgtcaacattaatttgtatctgtttaagtttcagtttttttgcatctagctatcagagttatacatgtgggctggtgtatttcagtttctttatggaccggacatttacatatttcccttttttcatatattatgctttgaaataaaaatgcatattataagagcgatatttaataatattatgaatcttttggcacagatataaatatgaaaatttaaagtcaaagatcagcgaagtagaaaaccaactacgtgaactaaaggctgatagacatgagactgaaagggatgccaagttgtctcaggcagttgaggctctaaaacgtctgtttcaaggtgtccatggtcgtatgactgatctttgtcggccaacacagaaaaagtttaatctcgctgttactgttgctatgggtagattcatggacgcagttgtagttgatgatgaacaaactggaaaggaatgcattaaggtatgtgttttacattcccgatctatttcttgacctagcctgttattcagaactgctgtaatatagcacattcagttattatagaatgggatgaagttataatgcttactagctggaatccctggttctttcttagatatctgagtagatacttcttttgagtaatattggtttttttttttggatttgtttgtatgcaatgcatgttttttttattgttattgttttttggtgtgtgtggggaaatacatgatagtattatgatcttacatctactaagtaataagtatgggagtggtttgtagtttgtaaagccatcctctaataggctagtattttgggagtgtattttacctagttggttgaaccaaatagttatgtgcggatacaggattatatcatatgttttgagggttagttagtcctggctgatctaataaatggccagattaaaatgttgattataatgacagtgtgaagcagcttgaaataagtttctgcttcgtggtggggcacttgttgccgatggtaacattttgtaatgaggaatcagtcttcgtgcagttgctgtttgattttattattttgacaaatcaatgtgttgtaagattagcttgtcggatttattcctttctttattataaatttttagttatatgctcataaacataattataaatatcatatttatttttgccgcagtacttgaaggagcaaaggcttcctccgcagacatttatcccacttcactctattcgtgtaaagccagtcattgagagactacggaccttgggtggaacagcacggctggtctttgatgtgatccaatatcctttgttgagtaactatagtgtttgatgggagtcttttgaaagcctgctgtaattccatgtgattattgtgctataactgtctggtcttttgatatattgttatggtgccttcggttccttgtatgtttacattaccatgttactttggaagttgatcaacatttatggctttaatcattatccagtcactttttttaaagttacaaacttctgtagaatcttttccttttaaaaaagaacttttgcataatctaagatcccaagttcaaaatcttgtcaagtaatgtttggctctttgaagacgagtggagtttttaaattttaagtttttcaaaatcttatgtgttcgtcctgactttaagaataggtgcgctgttgcattattgttaaccattattctagttgaactactgatatgccaaatgctagatttatggtttagctttgtccgagttattttattctttatgttaatgaagaattttttatgcttctgcatatgtatcctcatcgcagtttgatccttggtgaatgcttctatctctttccttctttttttttgtaagacttaactatcgcacatttgatcctgcgttggagaaggcaattgtttatgctgttgggaatacacttgtttgtgatggccttgaggaggctaaagttttaagctggacgggtgagaggtacaaaggtatgttattctctacttattattgtttatacgactgggttcaaaaacgtttgtactttaatcctatcttgtctctgttaaaatagttgtgactgttgatgggatacttctcactaaagctggcacgatgactggtggtaccagtggtggaatggaagcgaggtcaaaacaatgggatgacaaaaaaattgagggttggtattgtttgtgtatgcattgtttttttagctgtatgattgtatcattaactgttgttgttccataggactgaagaaaaagaaagaacagtttgagtcagagttggaggagcttgggtcaataagagagatgcaactaaaagagtctgaagcttcagggagaatcagtggacttgaaaagaagatccaatatgcagagattgagaaggtaacttcaatgattattccccaaaaccctcccccacactcctccactccttaaaagaaaaatactaattatataaatgtagtatattctatccatgagggttaggtgtagtgttaggccatggttggttgtttgcctgaggtctgggactcaactccgttttagaatgaactcagcttcttgtagctgattaagctgtaatagatgatttcaaatcatcttttcccaatatgaacttgtttcttttataaggaaaaaaattcttgatggagagtttcctagcaatgtgaacaatcatacgacctgtgatgtttaacagttcttttaatggtacccagcttttgttatcactactgatactttttgggtttgcttttcttggatctcgataaaaacgcagaagtgaattaattggctattgttaatttatttgcagagaagcattgaggataagcttgctaatttgaagaaggagaaacaaaatattaaagaagaaattgatcgtatcactcctgagcttcttaaggtgacaccatgtgcaagttgccctccagatcaagttttgttgtgttgttccctttaaacaattacattgtttttcattttcatgcagactaaagaagctattgataagcgtagtgcagaaattggtaaactggagaggaggatcaatgaaattgttgaccgaatatacagagattttagtaagtctgttggggtggcaaatatacgtgagtatgaagagaaccagcttaaggatgctcaaaataatgccgaggaaaggcttagcttgagtagtcagctctcaaagttgaaatatcagtatgtgcccgtcacttaatattttatttttattttaactgtaggcagattactttatttccttgttaagc

SEQ ID NO: 380151 - DNA, 1572 bp, Cannabis indica
atgagctatattttagcttttcatcatttatttacacctccattggagatgctttaaaaaccaacaattgaggctctaatcaaacctcttaatgatccaaatgatgctcctattgagaaggagaaggccaagaaaaagaggcatgcggctaaaaaagagaaaagtaagtatgacaatgagatgttactagttaagattgcttgagcagaaactaggaggaaccaagcctgactgaggcatcttgcatggggtagcacaaatgactatgccctagttttgattaggcctaagtaataggagtccgtgagacctgtcgggcctgtgtcaatagataaaggcaaatgtaaggctgttatgacttagaaaagctttggcgagtcttcttctgaggatgaagggcctttggatggttctccctgtgtagattatctcgaggaaattgatggtagtaattcacttacccttacttgctctttgtgtttataacttgtattctaactttgttgtttttcttttacagacatggcttctaagatgaggaacctactaaaatgcacgtcgagcagcccttctggtgggcagactcagtccaaagttgcccggacaggggctgcctcagatatgactcaggccactctgcctccacctccttcaggtccacctctggtcaactagcccgtgattgttgatccttctttgagatctacttctcctccaaaggcacccagtaaaggctactaaagatagggtcgggaaacttcttccagcactaaacacaaggctaaggaagttgttcagaactatcttggaagttgtcttcctgctatcggtgattagctttgtaagttggacaacgattccttggactacctaacatttgtgaaactatttctccgcagcctttagtgacttactttttttttctttatttcagatcttcctaaaacttggctatgcccatgctccagctaaaggcacaactctatctttcatgcagaaaattgtagagaaggattctatggttatggaaaaagactctcaactgaaggagaaagatacctagatcaaggagaaggagaagcagctaaatagggtcaacaaggagctttctcacacgaaatagaaaactgagggtctgaaagaaaagatccttgatatgccatccacatctgagctggagaagagtttggaggagactgaggagaaagtgagagagcttgcaaggcagaagaaagctttgggtcgatcgatgactactaggaagatgaaatcgaagagctcaaaaaggagctagatgagatagaaaattcttgcaaggagaaataaaaggtgttggacattgccttgtagggtcatgatgacatcatagccgagtatcatgatgtagctatggagatgttcttgttgggttttatgccctaaataaaactccttacaatctgattagtaatcaatataagaaatttgaagtgattaatgtttgcatgaattttacatgctaatggtttaatatgtttattacatttatacacaaaatcagttaaatccagatcatatgtttattcacaatta

SEQ ID NO: 380152 - DNA, 2803 bp, Cannabis indica
aaaaaagaaaatgaagtttttattgttagacctaaataagtaaatatagttctttttagtatattaatattataatcataataaattttttctttagaatagaatcagtgacacatcaatttgtgcgtcatttacaattttcaattgataagtcaaaaacagacttgtctcgtttaacagactagctagcaaagcgagattagaatattataaatagtcattttccaaaaacgtgtccaaaggtgtggccaacattttctacaaaccaaaataataataataataataataataataaatattattttggagtttttttacttttacacctcaaaagaggtttttttattattattatttttacataattttatatataaatccctattacaattagcagagcaatctaaatcccaactaaataaactaaccactttagaacctaaacagtaaatttgaaaaaaaaaattaaaaataatatatgaaataattctcctattatttataatttatgttttacaagaaactattagttattaaataataaattaaatttatatttttcaaaataatacaaaataataatgactttaattttcatcaattattcttttttaatataaatatcctaaaactaatttttaaaatcaatacatacaaaatttgtaattaatttaatcataactaatttttaattatttaaattattattaaattttactttaacaaaaatttaacattacaattaacattcataacttgttatgcctatataaatgacataaatcacaagacaaaaatctcacaaccttttggcttatagcaattgataaattatcatatcccaatcatggctcaagctctccaaaccaccattatcatatccgtaatagccttgtccctgttaaacctcaccgttaatggtagtaagtacaaaaacccttttctcaaacacctagggctacttaacaagaaggaacagctgacacatctccacttttacttccacgacatcgtcagcggtccaaaccctacagccctccaagtggcgtcggcaaaaacatcgaacacgtcatcgacaggcttcggcgtcgtggtggtcatcgacgatcccttgaccgagggcccagagcccaactccaaggcagtgggaagagcacagggaatctacgcctcggcctcccaatccgatgtgggattacttatggttttgaattatgttttcacggaaggtaagtttaacggcagcacactcagcatcttgggacgtaacgccgtgttctccgccgttagagagatgcccatcgttggtggaaccgggcttttccggtttgctagaggctatgctcaggccaagacacatacgtttaatcttacttctggtgatgctgttgttgagtataatgtatatgttttgcattactaggtaattaaggtatatatagctaggccccagttaatgtaatcggttcatcttttattttctttattttaattattgtaatattagaatataaatttataatatatgcgtttatatattaataataagattaataatgatttttcattggtttgtatatccttcttcgatttagttatgttgttataatcttttaatttgtgggtacggtacggcggcataatatgattttggagcttaatttgagatgatgatattgacacaataatagtatattagagaagaattttcatttgataggatttaaaaaacaaaaatgacaaatgacaggatttaattgtttaacttaattaatttcttttcatatatatgtatgtatattttgtttagaatttcaaggacatttgtctttttatattgtgcaaggccatcaacttattattataattattatttttcttctttctttttttttgttttttccttctatataaatttttgctctgagatattttgttgcgtatgtggttcaaatttgtcacttatcatgagcattattatcatattcagtaatttattatttcatcatcttctttcctttcttttgctacaaaataataataataatttactgaatattggaagacttcaattagaatcctggatattaatattggaaccgaccaatcaaaactgcatttgaattaaatttaaccattattttttttttggttgtttcgttatcatggggctaaaagaaaaatcaattagtcatcacctgaaatcagccgaaagaggtgctattgagatttgaggaaagatcctcaagagtacacatatcatcaactacattagcaaattaatttcttattttctttatgctttttcttttaggcacgcaattccaaaattgcaatttaaggtttgccccctcatgaacttttttttttttctttctaaactgattcggattgtagaatcattatattttgatttattttattttattttccttttattctgaacggattgtaattttatttactatcaaggattcattaccctttatttcttgctcttattgttgctttatatagtaggcaaccaaataaaataataatgatatatttacatgcataagaagatttattaatttagtgtaacgttagaggaaaatttcaaataagtacggattgttatatttttgaaatgaatactactggaattataattgcaagtttgtaaatttaagattgttgaccgagattttcggtaactattaaaatatgattatagtagtgagctgtaagaaagcgagatgaggatttttatgtggttggggcgttaatgagccttagtccacgagtctttgttattaat

SEQ ID NO: 380153 - DNA, 1710 bp, Cannabis indica
tcattattgccattgaacttgtcaactttgaatcgtgtggaagccattactgatcagatcttgattctttttgatgtcttgactcaattctttgacttttcctctcgactgagctctgataccatttgatgtgatcgatagcttgatcatgtaacttatgcacaatcaagacaaatagaatgatagaacaaatgatcaagatcaacaataaagacacacaaagaactaaaaacagaactaagaacaattagacaagaaacttaaaatcagatgcaacacaaagaagtaacgaggttcatacagagtgattgagtatcacctgaacacttattctttaattatttttttttagtgtttcttgtcttgagaaagtgttcgactggattcaatgtaattgcagatgtaaaactttggcacatgtgcataatttggtgagaagagcaaatataacatatttaaaagaagagtggtaattgctgccatcaatgtagtgttttaccattcttggagagctaaaaataaagtgtattgggaagagttttgtctaaccataaatagtactgggaatcatattaaaaggaacattgttattgggcattagcggtgcctagcacctctagacatattgtcttgtgattggctagtgatattctttaaaagttattatattaaattatataaaactcaataattagtttgactaattagttatgttgtcttgtgtaattcacagcctgaaacatttgcacatttattttttgaatgtccaacatctcaactgtgtttataaaacattaaagattggctgcagtggaaagcacaatgcaattccctggctagtctggttcgatggctcaggagagcaaagcttagcagctttaagaaactagtgctagctgctgctttagctagcttggtatacaacatctggaaagtgaggaatgtatgttacttggataaagaagtacaggatgtctcgagagtctgcaaatagttgaaggttggggttcttcaaagagtggaatttttttggccaaaaaaaagtctccaatgatgacaaagagtggttttcatcattgtaatgaagccaattattttacttgtacagattgtatagatacataacttaggtcttataatttcgggtgctattagattgtaaaaagttttgtgtgctaatacaagtttcttgattcatcgaaaaaaaaatattagcacatagaataatactaagtaccactggtccttatagcatttttatattaaaggagagctttactatagaatgttagaaataatagagatattacaatggaagaataaaataagatgaataaaagactaagacaattacaactctaaacaaaatattacaaggacaatatattaaataaagagttacaatcccaaacacaaaatacaaataaaagaaaagagttacaactcaaaactcaaagatacaagtatttggaaactatataaaagcatatatataatagtgtatatatatgatatagaatatatatatatataatagagtatatatatgatatagaatatatatatatataatagatgatatatagtagagatataaagagtgtatttatagcatgtatatataatactatatagttaaaatataaatatatgatagtatatatataggagtgtttagagggagaacaagagaacaatataaaacttgag

SEQ ID NO: 380154 - DNA, 1768 bp, Cannabis indica
gagagagagagagtaatataaatatgagaaggcctttcacaatcttctcaaatgcataccagacatgttgctaacctagtgagaacccttctaacaatgttaaaattaagactatatttgataaagttgactgcatcatgtgttagttcacggctctaagaaaagacaaagttaaaaggaaagacttgcattttgcgaatccaaattcatagtcaaaatcaagtaatgcaggaacagcctacttatctatctccctaataattctgattctctggatgaattaaaagcacatggatataccttctcaatattgtccatcataatacccttgacctcagtgatttgagccttcaatttggaaagcttactcatttcttctggatgttccatacaatattgcatgtgctccttgagctttggcctgtcaaaataaagtacattatatgtactgataaagcattgcaagaaaaaactattatttttgcagtagtaagaaaatacacacccaaactctctatcaagattgtaggcgatgctaaatcggtcttcgaacaagtcatcatcatcgtcatcatcagcaagaggatgtggcccttcatcattaatgctcataccatatcgctgtctaaaatcttccttaactcgttctagaaacacaaaaggggtgctcctcccagttgattcatctgcaacaacgagaaaaactgcagaaccagagaattattttcaaccattcatgctgctataaatgtgaacaatttcaaggtaacctgaagaaaaaaaaaaaatcattaccaaatgcattgtcaattaggaagttgaaggtatatccatcacacgaatatgtgtacttgctgctattggaaggaagcttctgcaagcactgaacggcaatggtactaaagttgccggagaaagatgtgtgttctgccaaaacaacatgtccttttgcaacaaagctatatattaaccctctttcactcatctttggaattcaccaaattcgttcacggctcctaaaaaaatgcaacattaatgcatcaaaaattaaaactgaagaaatttatgaaattagaccgaaagaacaacccaaaaacaaaaataaattcggtaatcaaattacagatttagagtaaatcgccactagatttaagcaaaagaagcataaattgcatgtttcaaagagctaatcatcgaacctaacatttaagtctttacagtaattaattagtccaacaattcactaaagctaataaactcagtaccgatttgagttgatatctacaatttttcaactcttaagataaacctcaacaggtcaaaacaaagaaaaagaaaatttagaaattgaattccccatcattattcttagcaaccaaacagaatctaaatgagaaagaagaaatataaaggccaatacaagcaaccccaccaaatagaaaacaatagctctttccgattcgtttgctaaacgacaaaggaggaaatttctcaaacatcgatcgaaataagagaagatcctagacttttttcactaaataatgaaggaaatgactaaccgagaaaagacaaagagatcgatgaagaaaattgcagagatagaaaggggaaagattgcttcgtcggcaagaaaagagattgtctgaaagtttactccgatggagacgtggtctagggactcaccacatccacttccaatgaagaaattgtcgtataatttctgtttaataaacgattcctcctttttataaatttatatttatttttt

SEQ ID NO: 380155 - DNA, 1458 bp, Cannabis indica
ttgcaaataagagagcttagctaaatactaatacaataggtaacttacgttgtttttccatatgcctttcctatctcacttgaaactgtgtcgcttaacttagtgcagaaactggcaacaaaccctaattgccaaagtcgagaatagcctactccccctaccccaaatattgagagaaaagcacatatacagccagcagtgctggaaccgacaacactgccaggtcctcgtcttcctttcctcttctcagctactccttgggcctccttttgtgccattttcacctttgttgctgctgtcccctgttggaataggtcacacaatcacaaaatgaaccaactatttgcttgagtattggagccactcagcaatgaatcctaatataactctgaaaacttctaggagtgaaccaaatttaatagcaatgaacaaattagtttggctgtgatcaagaacaaaaattacaaacttctacgtatatgggtgcagctatggcaagccaaagttcttaaaatcaaacgagtctttgatcaccactaaaccaatgaatatccacagcctaccttagatcttcaaattaaccataattctttaaaaattatgagatgcatcaattttacgaaggagcaattatattcggagcaatcaaatgaatcaagattataatttaatcactatatttgatatggaagggttaagtttttggagtctttgtgttagatctccacatggatcatgctataaaatggtttcatgacaaaccacccaggcaatcttcctaattcgatcattcactatgctggtggtcttcatccgaaaaaaaatttaaaaacaaatgaaaatgacaaatccataatcaaattatatatactatcaaaacccaccaaccaattgtctttaaatataatatattcgtataaaaacataattttcaggaaacaggagaggtcttgcttacaaggacaaagtatgtagcgacaagaagaaaaccagaggagccaaaagcgcgccaagtgagagtgccgagcaagaaagcagcagcaatgccggaaagtgagaggccagtgaccaaaatcggggaacccaaaacgaatgacgaagttgctgagaatggcggagtgccacgtgggaggggaggattgaataaggttgactgcatcggataggagggtgtgaaggttgagcgcctgtaccgtggtcgacatcttgagtaggctggcagtagttggcctgagattgggatttggatttggggttagggttagggtctttttgaaggagaaaagagaagaatgttggaatttgaaggaaggaattggagagggtttgatgggcatcagcagaagcattgacaaagccatttttaatgctgtgttcttagactagttaggctatggaaaaagggaagagaagcctagtcagacacacaaaacaataacacttttttttttttttttt

SEQ ID NO: 380156 - DNA, 2073 bp, Cannabis indica
aaaaactttaattcatgggggcaacaataaacacaaaagaatatgagttgagcgcaagactgaatgatgtttgtcctacgccattcacgaatattttaatcatattatttatctataagaagatttttcaaagcttctaagttctaagtagtaagtttaatctaagtacttctttggaaatggaacttgttaatccggaaactaattctggtaacgttaacagtaatatttgacacgtgacaagaaagaaaacatcctagagttgagtagtcccaagtcatagcagtcgacctaagagaggttcctagccttgagcccaggttgactccgggaactctggaatgggtgtttggatctcgccaagttatttccaactcaccatttttcagtactctaaaccaagaagaaaagaaaaatccaagtctgaggccggaaaactgaaaagagatgaaataacaactcgaaagtcaacccgggaacctagggttttcaccccaggttgacattccaactagggtttcagtctttgggttcgtcttagtgtaaattgctcaaactttatactttgacatgaataagacctgtcataaacacgttaatcaaaatcgggacactttctgttttgagcacctgaggcaccaggcgcctagggcacccagtgcactcagcgcccatgttgacatattgtcaacttggagcgcctccaaccacaatattgaaaaagtatcccgagaattttcttcgtctccatccaaaacgaggaaacaagtacttttgggaaagaaacagatcatcctaaagggtaaacaggagacccagcgtgcaagttgacactggcattgggcccaatgcctaggttgacattttgtcaacctaggccatttctaatcagtttttttagaagtcttctaagcatattatttattttcacaaataactgaggtaagagtgttttcggaaatcaaacaaaccatttgatggcaaaaagttggacccactgcctaagataagcgcaatttttttcgcagattacccgaaaatgatccaacgaacgagattcaaaattgacgattttcatcaagagtcaatttttacaattatattaatggccaagataagcccaaagtgaatttttcatataatttatattattttattaatattttaataggacctcattctctataaaaggagaacttctctagttcattttgcatattcttctaaatcttcataaagtcagagtatctttctctactttctctctctaaaaatcaaagctcttgcttagccaattaatttcttgtaattctcatgagtaataaaaattcgaagtaaacgtagttctattgtcgtcgcgatatatgaagtaaacaactataaatctcttgtgtctctctatttatttatttattttttataatttctctctatttatttacttaaacttattctcttctcgccaatctaacaagtgagtgttgattaaatttttggatcaacagaaatctctcactctcagacagtataattgagattgtgatggcttgtctaaaaaactttttgagattttggctaaaatattagagcatattatcaattattaaataggaatttcgaatttggtctaatatttaataaaataataatatgattaaaactgatattattagttgaggaaataataaatgacaatattaaagtagggcaattgtcccctgcagtgggaacctaatgttggaaatgatgtggacctcttttaggtatgccacggcaaattatcacttttctagcttttcaaaaataaataaataataaaaatagttgttggggttttgtaattttcttcgtcattaacatgcaatgtcgttgaacttgaaactgtatatatgtgaaagtccttactgtgtgtgtaaatatgaatgaaatacatttataggcaaccgattgtgccactttaataaatattgtgtatattttaatgagcaattctacgagttataattagttaatgattttttatttattaaaataaaataaatgagactttatattaaattttactaataataa

SEQ ID NO: 380157 - DNA, 5477 bp, Cannabis indica
aaaaaaaaaaaaaagagtactctttaacttttctcataaaaggtaggttggcaatgataccaactagtccacacaataacaacaatgggtaaatattagccccttcaaaatttatccatagattagaaaagataatgttccaaatgaattcaaaaaaagctccacttgggtgtttttcacacccccataaggaattctcaataaatattttatcaatgtgaaaacattttgcttaaatttgaaattatttttattaaattcaaaatgtatagatcatttttaaccatttaacaaatcataaagctcaaaatatggtattttaggatagaaaatcacttaagctcattgttattaagcactaataatacttaataccaccacaaggtaatacctatcaaataatttataataattattaaattaaaatataattaatatttctcttcacttataacaaaatgaaccaaaatagtataatctcattaatttatattttcattataagaataataacaaaatgtcccatgtccttattaaccaacttacacaaaaaaaaaaaataacaacatatactttttctataaaaataaataaatatcaagtggaacatctaataaaaaatataaactctttatttttacctacaaaattaagttgttattgttgttcctttgagttcaagctagggttgacaaagaagatctaaagaggttgaaatagacatgtatgaataaagccaccaatgtatgaatgaatttggtgccacaaacctaatttgagcttgtagaatgatttgagcagacatccaagttcactgcaataaatttaatggacaactaacttcaagaaatcttaaatcatatcgaactaatcgtcgtggcctcatcactgatacttgatctcaaatccactgtagtctgctactgtttgttgtcatagcaagaaaatgtttgaaatttataccataacggattattagacttcagcaccgctatccttctgtgtgttgtttgcacccctttggtccataatgctgagaactgcgccttacaaccttattgcacaagtaacaatagttggtttgacaagcccagcaaaagagatgattattgttgccaacctaataaaaaataagaaacaggacaaaacataaatctgtcgtatcgacacagcatctcagtaagcaaacggcgatgaaaatgacaatgatgatatcgtcatggaatttaaaacgaaaacaacatataactttcctcagcccacagaatggaactgaaagattttttttttcgaagtttacttctcgagtggcaaattcgttttatgtttttcccaattcccctaacctgaaaatacaccctcccctcattcttttgtcaacaaagatactctaatttatgtctcaaacattttggctatctagggagaattttaaacaaggaacaacaacacattatcagtgctttagtgggaagatatcgatttaagcaacgcaagactaaagaagatttccttattccctcgatttcattttaaatattttatgatcttatgcagcacagtaatcgttttgatcctaaggattctcatgattcgcattctttactcaccttgaaattaaattgacgacaattaggacaaaattgaccgtgatcgccaccaccatagagttgaacttgcgcctgggcctcaatctgccgttgatttatgcgctcctcccagttctgaatcattgctagagggaacaactcacatgtccctcccctttaatcgataagaggtttattagtcccaaatagagtaggcgaaaaaaggaaaaaagcaaacataaatcctaacaattgagaaaaagacctgaaatgatcgtaaccatcgattgccttgttacaccgatagcagaagtattttccacagttctcacacaccatcttgttgcagccttcagttcgggagattgccatcttgcaactagggcattgctttgcatcacgaaatatttccttgaggctaagaatttcattaatcatttcgcgttctttatgcttttgggattctcttaattgggatgaattctgacgatcctgcaagcacaaagttaacattcagaaatgggaaagtttttaataaacaagacgaagaagattacaaataattattggctgtgacaaaatgattataatgtcttacaacaaaaataatacctgcaggatctgaagcttcaattccggggtcatacaatcagcacctacatgtcgtcgttccctgcaaagagtgcaaaaactaaaaaaacactgtgagcattgcgcgtgttggtcttcatcctctatgcatggtgtttcacagcgtgggcaatcggtaatatcaggcatagactcgagtgttttctgtaacgttagagactcccaccgttcatactcttcatcactgagcaatccttttaacaaattaggtgggatcatacaatcacactttgcatcagggcattttagcttggttacagtaccctcactgacgtgtatatcagaataagtcttcatgcatttacagcaaaataaatgctggcatggaagcttgatgaactcggtgcctaataatataaatataaacagtattttcaaatgtatgttcatgcatctgaagcagagtatgcttacaattagtaatgcgaaataactaaatcgctaacaaggattatttgcccaagtatggattctcaaatcaataacaaagacaataagcagaaataaagacaaattgaaggtagaagcaaattatgaataggcaaatctgagaatcatgaggtattcgagagacttaaactctccctagaacaaagctcatacaaatagtagaatagagaacaagaagggttagctaaatgattggaatcatgtccataaagaagaaaaaaatataccattacaagtgtaagcttcataatcgaacgagtgttaagagaatatcacaattgtttacgaaatattttaaccaagaaatgttgaagagtacctggatattcactaaaacaaatgtaacattcatgaatgttccgctggaagctttcgtggagtctctgatcattgtaacttctaatgaaaggaacatctatatcaggtgaaacacttcccgaaactacacgcctatctttagtgtgtttaaggccataaggaccaagcatgatctcattgtcaaaccccataaaggaaagagaataatactttagccattccacccattggtataatacctcttgtccaggttgctccttccatatggagtcaagcttcgagcaaagattggcaatctttatagaatctaaccactgaacggatattgtaaaataaggaggtagatggcttggatatgatttaggtaataaacatgtcaacacaactgggggaagatattgaactttgaatgagtatgagaactcgtctacgtctttgccagaggtcttgagatcacctgaagaatttagctttgtagtaacagtgattccatttggcacttctatatctatatgaacctgtaaaaacacaaaagtgaaagactatacatttacatatttaatcttatatgatatgaattaaagattctgaagttattacctgaaaagatttaaggcccctctgtttgtcaaaaatgagaacattttcgccgtaaatggactgcaggacaagtatctagacgaaaagaaagaatttaaagaagagattagcaaaagaaactcactatagatatagcaagaaaacaatcaatatagttagttgctatgaaagacatcactcatcaaattagaaaccgatcaagccgggtcattttattttagagctaatttgtgcttgttcaacttcaaatctggcatgttaagtattaattacattttgctatcacgagcttaatgaactaggagaaagtaaaagcctcacatttgcaaactagtttactcaaatacatttttgaatcaatgtcacagcatctttaactatgtaacttaagattctttgtctccctttacccttgactaaaattgttccaaaagtgaacatcactattgcttcacaggagtaatgacaagacaattaaactaacagagaaacatgtttctcaaatttccctaatgaaaacaatttcataatcaacttcaatctatacttaaagaacacatgtaacagtctaacacccaattaattaatgtaaaacatagtgtaatctcaattaatgatggctttatccacattaacaaccttcctattcgatcaaaataagaacacttacttcataagtttgactcacagtttcgataaaaacagatttagttataccactcaccactggaatgagcctactagaatttgatctattaacatctatcttgcgaaatttagccatgattaaatgcttaatgaacactaccacgaggctccattaagacaccaactttgttaaattaactatggcgattgaaactaaaactcattatttattttggagtaaatatctgtataagtacctaaagtttaaagttcgtaagcgatataaactcaatattttgctctggtacaaacttcgttatttagaaatatctgatactaaatattttagtcttagaatctgatgtttatcatatttaacatttaaggcaataaattatagaaaaattacaattttacacttaacctttattttaactaaccatctaaagtccccatgtaaaaatcataactttatctgaaaattaaatcaaaattaataattaaacacaaaattaagagcttgtaaaaccaaaccaattacctcatcatcctgatactgacaattactcatcaactgctcttctgacaactccacctcttcacaactcaacgccaattcttccaataaatccctaacatcattagactcttcttccaccacctcattcttcgaccctgaactactacacacacctccttctctctcctctttctcaactctttcatcgatactcaacgaacccatttcactatccaaagagacagagctgaacacctcatgactcgaagaacccacctcggatttgtcaacgaattggggtttaaccccacgattcctcggaacccacttgggattattgggctcgagattccgtgggtgagaagttgaaaccgatggatcagaggtgagtgtttgattgaatttggaagatgatgattcgctgcctctgttagagcgatgaagaacaccctttcttgctcctgccatggccgaagactcgaattcgattgtatagttttatttggccttaaatttctggctttatatatatacgtttttatcacgaaataatgtttatttttaagtctaaaaaaagatttatttttattaattttaattaactaaaattaataaaaagataaataagggtgattactataatagatatttatttattggggagttatatttgcaccccataaaattataaatacacctca

SEQ ID NO: 380158 - DNA, 1754 bp, Cannabis indica
caaatgaccaaattccctcttgaaaggagatttttttgtagcatcttagtgggctgtcaaggcccaactcgcaacttgtcttgctgtcaatagataaaggttcacatcattgtcctgtcaaggagaagttggctgaccatacacctacaggatgaggtttgtttgtccatgcaagctctggaggtttaggtttggcctgtcatgctcttgctagggtctggccttccatgtgcctgctagggtcttgccagccatgtgcaaaccaagatcctgcaggtcatgttcctgctagcttttccaagaggaggcgagcctttggcaagtggaggtaagctttgtacactttttccttgaagaggtcaagttcccttaatcaaacggaagctcccttggtgtaaaagtgacctttagccagccagcttgtgctcagatatttgtcggccatacaagctcaccctagctgggctatagacttctcttggcccaccaaacatgttggtgtagctccttcacggctcgattagctccttttgcttggtgcttgacgattttgtcataccttgtaatgagaccctgtcttactattggcaaggttgtgttctacctgtactctatcttggcttatgtgggcatgccacgtcaggtgaattttttttttggataatatatacaaattagttttggaggtaatcaaaatgtatctcaaattatgtgatgcaaagatgaagtttttttatgtaaatttaactaattagtttcttttcaccactattagtaaccaaaaaattactttaaaaagtaacaaaataaattaaaaaaaagatgaaaattgaaattttatgtcacgtcaatcacatcaaatatgtcagatttagttgatgtggcacatcagtttaatagtaatatcattactgttaattaagtacaaaaaaaattaattaccttgtataagcttgtttgcttatcctatttataaatagtaaaaaaaactatactataagggctagtttgaaactcaggattgtaaaggaaatgattagatttgattagactggattagatttgattatggtgaaagtaatcttctgtttagttatacaatagattagactattttaatttttattaaaagaaaagtcaattaaaataaaaatatataataataaataaaataaataatttaaattgtaaagtaaaataaaacattattttttaaaaaaaaatatattcttaaaaagaaacatatcatatttatttaaatatatatgccaaacataactatatttgtgataagataatttattatattatgatttaataaataattaaaatactaaaataaaaattcttaaataatataaaattatttatgttaaataataatttaaattaatcactaacatgatacgtatgctacttttttaatattttgatgtaaattttttatcccaaattttacacaatgtgacgtggcacttaacaaggtgacacatgttgtatatgtttggacatggacagagtataactatctttagtgttgtccagaccgagttagagctaaattgattgagtttggactatctacaaccatcattcaaattgatcataaactgtgacagtcagtcgtcccatgatcggtaagggaaaataccgggtaagctgtgcaatctcacactgcctggggaaggtcaagtgggatgattgtgagactgtgtaggtatggactacacagtttaagagagcttaaatggatt

SEQ ID NO: 380159 - DNA, 7828 bp, Cannabis indica
ttctaactgaaacagtttgaatcttaactaacttgcctaaccattctctaactgaatttgtacccttaacattcccaaataatttttccttgtatagtcttgcctgaccattttccattgttctgatatcctgtcaagccacattaccattccttatgattttgttgacaaaaagctcacaagtgcattttggtaatttcaattagaagtgaatttctacaacgtttaaaaattgagaggacaaagatcgaagaaaattgtgaaattatttcttaaaccccaaccaaaattcaattagttaacgaactcaactgtcaaaaagcaagcttaattggtccaatggtttatataaagagatcaattctactcatttcaacaagataaaattaagagacataacagagaagatagacacagtagagagagaagttacattgagaaaattaaagagataactaagagtgaactaggttttaaaattgtattaaacaacattgacgattatgttggcttggcttagtgagttaatgaacattgagggattacaccataaaagacttctatgattatttccttttagctcttaagattgatatctcattctcaatcaaaaaagaagggtggtggtagtgctttcaaaatggagtaggaccaagttcacatttaattgtttgagtgggatcttaaaggtaaaattatagaggttaattgcaacatatgaaagctaaaagtcctacaaaatttatatatttccaacaatgtattctctctagactattttccaactttcaaagttcaatacgtgcacaatttgtcaaatgttagaaaacaagtgatttgtgaaatgtacttatgtagtgaggagtggccaacattgtaatattgcaaaaattgaaatgcattcattctcacataaaaggataaaaaactagtttctctccctctctgactattcaaagatcctttgtctcatggatttattatgtggccaaagtttggtgtccaaataaagacaacagagccaaacaagacaggcagaactcataattaaaaaagatccttttcatatgccgaaacattgaatctaaattctaatgacgcccaaatagactgctcctacagaaaattacattatgaaattcactgctcaaccaattattattacttctatggtcataaattaattatagtactacctcaacaatgatctatatcttctcttttcttagctcatgaaaatcatgtattaaagcatcataccaaactatttgagtttgtccaaaaaaaaataataaataacaaaactttgaacagcagaaatatccacaagggtccaaaatattatattagtcaaaacaagggataagacaacaaccacacaaagcaattcagttttgatatttggcccaagagaagagcagaagttttacttgcaaatgtttttaaacttactaattctttgaaagagacttgggttctcattagaactactaacaatagactggacctcagagtgaccagtgcatgtgctgactggaggaaccataatccctcgagtgttcagattccatatatggcctcctaccctgttgagacagctcaagctcaccagagaactgacctgtgagggaatgcgagaactgaccaaggccaagatcaggaaggatctggtgtgaactgctaccatccatatcatccttcatgcaccaagaagtgttttgaaagtgattgacagtttcactgtgagtagctgatgttggttcagccacaggtgccccttgggtgttcatcaaggattgcaacccaataccagatgatgaccggtttctagagccccacggttcatttgacagaagagagagagcacagcttgagtctgcgactgctgagatgcattctcccggaggcggaggaattccatgattagctgggatactcgttccgcagcctgaagtctgcaggtataggttggatgaagaattatctgagttgctctgccacggatacggaatgtacttcccagttggaatggcactttgatttccaggcacccgctccgatattcttccatttggccaggcgtctcttccgctaagcctagggtatgctgagaagtccattagaaagctaccaactctgccgctgttatctacattaacaaacagaacatatttgaggtcagtgtcatgtcaatactagttggggtgaatgggaaaaaccaaaatctatgtagtgtgatggtaaaaggccacaatcagggtctttcaagatcacattagcttggagttgtaatatactaacatctaaacatatataaggtacaaaatccaaccatagcgtgtagacagtaatgaaccatgtggtggcttcctccgacgctcattatgaccagctaagcgccttcgacaacttctctttccttggtcaaattctggaagctgatgaaatctggagaaagacgaaagaactcaattttatgaattaagtgccattccttttatcaagttattccctttaactcatgaattgagggactctctcaaggaaagcatttgactctctagtctctaacataaccacctagagggtcactagccataaataaatggctccaaccagatattttcaatgttaatcattagcatacattttcgaggaatttattttcgatgatatataaagaaatttgttaagtgcagtcagcaataaacacagttaagcatgaaacaaaggatgtaacataacgagctaaagctgcaactgcttgttacatgccaaaaaaaagagagagagaacgctattaaaggtacgcaagacgaaggacataaacattgcatactgcaggtccagatgcttttctgggggatttattttctacattatttgatatgaaaagctgccaaatggaatcgacaataaacaataaaaatccacacaatcattcagagaaagccatacataagatcctcaaatattaaagacaaaactatcacagcctaattattggtttgacctaagaagctgctctgatcactgggaaacatgtgggaatagcagaacattcagaacatattagaagctattcttcatgccaccaccagaatcattgacgccctatctattataattcctttgattagatcgctcacgggctaaaagcaacctttaccatcacccgagactgctaacaaggattactactggatcttttatttctttctactagttcttacaaaaaacaatttgcaggaattactttctatttttataaggaacaacatgtttgcaagaatcaaaatgtaaaagcaatcacatcatatgtgagaagaaaatgactgacttgaacttaacaaaacaaattatgtatgaatgttatcaattttattccaacaataacatatccaacattgagctcgataacatatccattaggctcaaaccatcaaatgcaacacacaagatctctaaacagtgtcaacagccatgttgtgttgctcaagtaaacaagctttgaaggtaaacattaataaaggtgtttacttttattatttacttaacagacagtttaagtatcttcctaagacaaacaagtttactacatcagcggaaaaaagggagaaaagaaaaagggcactagaatttatgttgcacattgtgagacaggaaattaaagataagataataagtataattaaacaacaaactcagataccccacagccaatcccataagagcactttcacaatattaaaattcactagtctaaagactataaataggggaccatcattaaattacatttatatatatgacaccaaaaactcaagctaacaaacatactaataaataaaattatttagaaacccaaccagaatcaactattatcccatccagtaaaagttcagtcaggaaaaaataaaacatccatatcctagaacaagattaagacaaagccaaatcaagtacaaaaccagccaataatcccaagcaacacttgattttattttattttttactttacccagaatgaaacaacataaaccaaccaataatctttgaaaagtgttcaagcaaagcaagtaaaacagcagtaacaagttatcaccagtaatcttcaaaaacctagcttcatcatcctaaaaacaaaacacaacttcaagtatctcatatatgtaagaaagaagaacaaagaaaagaaaagaaaaaaagagtaaaggttaggtttacctgctacactgttgacaaaacctttgttcaagaccattaacgacgaccttaggtgacttagaatgcatgccacagaccttgtgcctagagtaataagctttggcgtcacttagatctactttacacccttcaacctggcaccggggtggttggcccgaatggaccgggctccccctgaccttcttcggcggggtggctccggaacacgaggacgacccagcaccggatttgggtgtagctccgatacccacatcttcaaagtaaattttctggccgaattttaagccgttgagtgactcagtagacgagttgggcggcgaggaagacgaagagccccctgactcagtcattgagctggaacccatttccatgagcgacctctaaagcccattcatgaaacttcccgaggtcatgaatacagtctttacttttttttttcttctcttttggctctgctatgttacagaagatagagagagagaagaagaagagatgaatggtgaatgtggggagcaagagggagggtttactattgaaaagtagacacctgacagtggcccatgccagctttgagggtctgtgtgatgtgagtaataagaggtgtatatttttgtgtgcgtatatatgtgtatatatgtttatgtgagcgtatgtgtatatatttgtgtatggtacggtgtccaagacgaaagagagaagaagagtggttgtatgaaagaagaaaaaggaagagaagagagagaaaagagaagtacttatagagaggtacagaggcagctttaagaagctcttttctctctctctctcactatcaccaaacccaactcaaccgtcgttttacaaaacaatttcggtttaattgttctctctgtgaagtctctctaaaaggtaattctcctttttttttttgccagatatgtgtgggtgcccatatgcctgatgcatggggcgcattattttgtactcacttctcttctcttctcattaccctcattatgtctaaaatacccttttcttttttctctcttgctatgtaaaaaaactaggaaagatttggctactatttttttttaatatcatattaacattgaatcaaaataaaattagggtaattttatagtgtgcaattttaaaagaattcattcaatatattttagtattttttttaatttattttttatgatcacgaatgttgtaattttttaggactatttataaaatttttaaataattttgaatagtttatattgttaaaaataaaatttaaatattgtattgcatgtgtgtattttttttatacaagtggtaaacagcttgttatagctgaaattcggctagcactttagaggatgacacgtgtcaaactgggagaacacgaaccaacaaatataatgatatttatatttgaaaatggaacaactcattaaatgtaaaactgatagagtatgtttaaaacttgctaactgtaaggtcttacgcaagataaaaatatacaaattgttgcctcgtacattaatgagaaaccatacgacactattgtgcaaggtgaggcatcaacctcgctacgcatgaagagacatagacgagacatgatgactgttaagacacttaacgtataatacacattatacaaacaaagtataacagtcgagtaaatccaaacaactaatagggaggcatccatctcgctacaagaaggcgcgcttatggtaccttcactaatcagctccagacatctttcaatgagatccacagctccgatgagtcagctctctaaaatagaagctgacattcaaatgatgttgactgctgaagttcaccttgtcaccaagaactgcgattgtcaaatggagtgttatgtcttcaaatgcaaaaacgacgaggtttacattatctacctcggaaagacatggagaaagttatagctcgctaccagggttattgttgctatgttcccagcgagacgtctccgaacaatatgtgttacaacgtatttaatacacatttacattgacctggtaaaagtggaccaatcacagctgtgtgattttcaaatattaaccgcatttattttacgtgagatgtaattcaatcccacgattttaggggattattgttgtaaaatatcagtcaaatctgtaattaactgccctcttatgtaattataaataggagcaggttatactgaaaaatggactaaaaattcattagagaaaaggcccttgaattgtatcaaaaatctaagaagattaactcgtggactatgtagagttttaactgcaaaaccacgtaaaaaaacctctgtgttcttacttttttttttctttacttcttctattttctgtgcaaatccatcacgatttaggcttaaatataattaacaaaaatatgcgctaacagtttggtgttttcattgagagccttcgtgaaaaaagctcagaaaaaaccctccttatatacgtaaaaaaaacaactttctccatggctggcaacggaaaaaacgtcgacactcctcatgaagaaaccactcaccgtccttaaaaaaagagccaatgggctcccgaggcctcccgattcacgatctaaacagaccaattgttccaggagaactcaacctgatgttggcccaagcatgcggaccactcgttccaagaggacccaacctgagggtggcccaagtacacggaccacatgttcaaggagaacccagaatccaggaataaggtatgaagaacctaaaaggaacattggtagaacccatcccagtccagttggcgaggatggcgcctacgatccaacaagatacacgctgatcgtcgagttggaaaactgccaactcagacgccgcctggagaaggcgaaccggtggaacgctgagttggaatgtgaggcagctgctgccagggtggcacaggcgaataatacccaaaatcaacctgattatggaatgagaagaccacgaggaaaaccttgcgactcatgaaccaggaggcaggagacaactcaagagaaccctcagaacgctcaggaagaacaacctggggaaactgagggtcccctaaaaacgagcaatctggggaaactgaggttccctctatgaacaaccaaatgatcagccagaaccatctcatagaaatgagaatagaaggtaaccaaaaaccagggaataagaaattccttgtggaaacgagggaaatcctgggacacaacctggaacacgtaggtcaccagcagggaaccgcaaacgttcttcccaaacccatatggaaggggcatgtacaaaccccagtgggaggcacatgacgaaccacacccaaggggagaagaacggggcatgaagaggcgagtgttacctcggggcgcacaagaacccacaatcgatcaacgcgaggaggagaaagtactcgtcgcaacaatgatcgagaaagcataggcacgagtaagactacaagtcactcaaggatgaggtccgtaagtaggacacagtccgtgagtagaacgatgtccgctagcaattataaccaactggatctgggagaacacttgaaccaaaaaaaaacctgattttcaccaacaactcggtccaaagcaaggggatcca

SEQ ID NO: 380160 - DNA, 3692 bp, Cannabis indica
ttttttcttcttcttcttttatttgggtgaaagtggattatgtctgtgtagactctggtcattttgcatgactaaaaaaataaggaaaagaaaagaaaaattattgtctactcacagactttttctcatgttttgttcatggtcaattattctaatctgattgactggggcagattaagatgatggttgtgcttggggagcttggtggacgagatgagtattctctggtagaagctttaaaacaggggaaggtgaacaaacctgtggttgcttgggttagtggaacctgtgcacgccttttcaaatccgaagtacaatttggtcatgctgtaagttaaatattttttttttcttaattgatatttatagacctagtaaaatgttcaatttgttttaatcttttacgctatgtaaatcagggagctaaaagtggtggagagttggagtctgcacaagcaaagaatcaagcacttagggaagcaggagctgttgttcctacttcctttgaagcttttgaagctgtaatcaaggagacatttgaaaaattggttagttcttcctctttccacccgaaaatgacaaaagaaggcttaataaattattcactaaagttcatgcttcctacttaacatatttgattaatttctcaggctgaagagggaaagatttcacctgtcaaggaaatcaagcctcctcaaattccagaagacctaaacactgctatcaagagtggaaaagttcgtgctccaactcatattatttctaccatctctgatgacagaggtactacctgaactagatactgctcactctgctcaattttctaagaatgtttgtcagattaatgctgatgaaattcttcttttaattatgcaggcgaagaaccatgttatgctggcgttcctatgtcttccattgttgaacaaggctatggtgttggtgacgttatttctcttttatggttcaaacgcagcctcccccgttactgtactcactttattgaggtagattgttcatctgtataaattttgcattgtcttgatttttgattcttaatgcaaaattttatactgcgggctatgtaactaatgcatttattgttgattagatatgcattatgctatgtgccgaccatggtccttgtgtctctggtgctcataacactatcgtaacagctagggctggaaaggaccttgtttccagccttgtctcaggtaaattgttgttgttgattgttttgtttctcgaaatcgcaagccagcatattattgcaatctacagagaaataaaagatgatctgatgaaacaggtttgcttacgattggtccacgttttggtggtgccattgatgatgctgctcgttacttcaaggatgcttatgacagggtaaatcctatatcaaactacaatgactgattgggataactcagtgccttaccgctaaaatggttttgtacacttacccagcttatatattcatgtttttgcagggtcttacaccttatgaatttgttgaaagtatgaagaagaagggtatccgtgtgccaggaatcggtcacaggtatggagacttctttattgtctgtctattcataatgccatgcactcgtttagtttttttaacgccttgaacactgttctttttgtttgccaaaaaggattaagagaggtgacaacagagacaagagagtagaactacttcagaagtttgcacgcacacatttcccttctgtcaagtacatggaatatgcagtgcaagttgaaacatacaccctctcaaaggcaaacaacctggtcctcaacgtagatggtgcaattgggtccctcttcttggatctccttgctggaagtggaatgttcaccaagcaagagatcgatgagattgttgaaatcggttatctgaacggtctctttgtgctggcccgatccattggtctaattgggtaagtaaattcaatcaatttcttacaagttttttgtgcggttcatcgtgtatgttgctaacccttgacgcatcaacagtcaagattatgacctaacttgtctttttatcccctaggggtaattttcttaaaactttacgtgcttaactaaatacataataattggtgacaaaagaaatcagttttgttagagaagcctacataagacattgcccaattggtaccataagatgcctggctatggcatttatttcatttttgttttcaaattagaattttgaagttccatactaactaattgttatgttatcgaatgttatcaatcaggcacacctttgaccagaagagattgaagcagccactctaccgtcacccatgggaggacgttctttacaccaagtgagagaagttgagccccattttcatgccacacccacctgctttacccgagcaatgtttgttttgtttaattttttttagtctccgatttgctgagacagttatttctgctgttagtttagtgtctgtaatgctaatggctgagctaagctaagtataattctctatctgtaagttgtaacaaaaaaaaggttcacaaagataaacattatcttcctattttattaaaacaaacgcaatttttcacgacttaaatatggaaataagaaattgtaaaaatgagtaccaaactttctcaaataacatatcacataggaacgatgtgtatattgcgtgtgattcttaacatttttgttttttagttgctataagtactttcaaaaagaaaaaagcagaatagactgttcaaactatcttttaaacaccagtcataaatccccagcaaaaaaatacgagtcataaataattgcacaattttttcaagttcatgttcaataaataatattaaattatttatcaaaaatatatatattatgagcattgctattaggcactagtggtgtctaatactttctcgacatgtagcgttgcgattggctagcgatactttctaaaaattattatattaaattatatgggacccgatacttaggtggaccaatagcgatattgacacataggagggtgttaggcaccactggtgccctttagcatttctcatatattattgcattagattaaaaatgataagaaaataatataaataaataaacgaaattgagactgagatatgtatagagatgaaacgtttggatataataaggttatctcatttattatttattgagataattacggtttcaaaaaatttactttcatatattatcaatttaaaaaaagtaacgaaaataatctaaagttccaattcttgtatgtccattcatacccaattcaacaaaagtagtcactggctgtgtagacttgagaataaagtttgaaaatgagtcatttacaaaagaagtagccactggctgagtagactttgaatatgctgggtgtctagacacaaggaggtctcttattgattttgtgttcacaatacttggtggctgtgtcagttggaaagcaacactgcaaaaggtcgttgctctgtcttcaatagaagatgcaactgaagccattaaagaaacactatggctaaagggtttcaccactgaactggggttaaagtctggagagcaatttggtacactgtgcactctatctcatgaagaatcctatgcatcatgagagatcaaaaacatatagatataaaaactgcatttcatcagagatatcatctccagcaac

SEQ ID NO: 380161 - DNA, 3008 bp, Cannabis indica
gggtgtgatcacatacgtgtacaaaataataaataactcacaaaaaaatgagacccacttaatggtataagttaaaaagccaacatcatataattatcctaaaatgacactttaagaaatattggcaaaattaatgtcgagacctaattcaaacaaatcaacaagcaggattaggagaatgattgttcgagataattttcctaagagagagttcattctcacctcgaacattacctcatgaacttacatcatcacccctttgttgaaggttcaaaatatttactgcctagatgaactattctaagaataacactataaaactctgctcgactacaacgtgttatgacttaatcaacaaccgttgcttacaccacaaaaaacggccgctaaagctagtaccagcaggagtccgtcgctattgagccgcaggtaatattggggttactaaaacttccaaaacttctaatttttttaacttttaactaaaatagattttcctatcttctttattctaaattcaaagaataatctaaaaaaattacaaaaactatcaaaacaatttaatatttaatgtctacctaaacattatcaaccaattatatttatctttaacataataaaaaaaatattttaaattttcaacgacataaacatttaacctaaacattactcaaacaaatttaatttatctttaacaaaataaattacattttaaaatttcaaaaacaatatctaaacaattaatacaaaaaaaaaaaaaattatcaacctattacacttttatttattaatagaaataacatttccaaacgcatagctcaatatcaaaacacatcttccacaaataaaaatatgtgaatacttcttactccaagttgcaatatatcccaaatttttttaccaagagatctaataaatagaaaaaaaaaataaaaaaaatattgatataaactcataaccacattaaattttatacaaaaaaaaaaaatgaaaaaactcataattatatatcacataaatatatataatatttaacaaaatatactaaaacaattaatacagatcacagtttttacacaaatatataatattgtataagatttatatttaaaagattatataaatttaatatatatctgtagtgatttggtttaaatgttaaagacgatcaacggttgattgaacttcaaacattgatagtgtcgtagactgaaaatagagaggagaatgagaaagaaataatgcattacaaaatttttgtaactaaagttactttttgtcattgtcttttttaaattctaatcattaatataattcatatacatacatatattttaaatcaaattaatggaaagaaaaaaaaaatctaccctctacccacccctcttggtggcttaaaatagtcgataattttctccaccctcaaaacttatttattttatttgttttccaaaatattggtgtaggctatactatccaatttcacccacttattccatatgatctaatattgtgttttaaatttaacccaatttttaatagatgtcaaattagatacaaagaaattaatatttttttacaacaacatcaaaatatagtattataccatttattttgtagtccattaatttaaagatgctcttatattctttttgggtatataaatatgtaagacactttggataaggtcatcaatagaataattaaaagattaataagacgttttccttttctgctttatttatttatttttttaaaaaatatatataatataagcaaaacacagtgaaactatggttttcttttatgagatagtcaaaaactatggtttatttattattaataagataaaaggagattttggtaatttactagctatagactaaaaaattcgtagataccatatctattagatttagaaaataattattttagtttccacacaattttttcatccttttttaagtaaaagaaatgaagaacatggcatataaaagatgttggcacgtgaaaagagtatcataccaatattaaactcttgagatgcccatgccccccaagaaaaagacataaagaaaacatatatttatagagttgcatcaaatcaagacaaagcaaagaattagtgtaattgaatatcaatatcatacctatgaaacttgtttgcaaaactggcacaaattattaataaaaataattggggagatactgtttgaattttaaagtttagtacgattaacttctgttatactcgaaattaagctggcactttgaaagaggacacgtgttaactttgagaatacgaatcaacgaatataatggtaattatattaaaggatattaaaatagaataactcattaaatgcggagctgatagagtatatttataattcgctgactgtaaaattttaagcgagataaggatgtacaaattgttgactcatgcattggcgataaaccattatgcgtcagaagacacaatcataaggacgacattattaatacaaagcgaggcaccaacctcgctacgtataaaaggtggtgacgagacatattgactgttagaacacttagcgtataatatacattatataaactaagcataatagttgaacgaatttgaacaacgaatagcgtggcatccatctcgctataggaatgcatactcatggtactttcactaatcagctcagacatctttcaatgagatccactgctccgtcgactcagctatctcagatagaagctgacattcaaatgatgttgactgctgaagttcacctcatcaccaagaactgcgattatcagatggagttatgtcttcgataacagaaacaataggattcaaattatcaacctcataaagtcatggaaaaagctctggcttgctgtcaggattattgttgctattccagcgagatgacccagcgagatacactttgcagcgtatctaaatctacgtcagcattgacccagtaaaaacgaataaatcacagctgtatgatttt

SEQ ID NO: 380162 - DNA, 849 bp, Cannabis indica
caaaaatgtagcccatgaaatggttttagacgtggagcaacccaaggaggttgccgtggaggaaatatacaattattcccagtgggagatggaccaaatccccattaagttccaaaactatgaggcactgaagaattactctgaggaatgaggggttcgccacatcccccggtctctcttttgaataggctctccctccacggggagtcacctatcaaatgcgttgatgggtttggagcttgaagctgggcgcacactgcatgcagagcacactttccactgtgatgttattttccaagcttctgtgcaggtgtggagattgccccttagtagtgttaaacacgtccctgacttttgacactactagctttttacttccaacttccccttgaaaagggttccgacattgtcccttgacttctccatttctaccaagccttgctatttttcttctctttcgaccttttctgtctttagcgagcaattcgctaacgataaaggttccaatattgtagccagcactttgtctcagaatccttctattttaccagtatagatttccactcttgggccaagagaatagagtaggtggtgaaacgaggttcatccactcgtatgggtctgcccacagttttagctttctttccaccagaggagtaaccttatttctcactgttgttagctcttttccctccgtttgagccttctttcttcccattacccccacactccagtgtcaggggttggcgagtctggcaacttcttctagttgccttttgagcccttggcttgggcgacaacttttctagcataataaagcttgttgggaatattttaccaggatctaaa

SEQ ID NO: 380163 - DNA, 4299 bp, Cannabis indica
attccaatattgcactaattatttatttttaggaaaacatacactaatatatatttgtagctatagaaataatatagtaattttatatattgcatatatcttaatttgacataaaatttgacgttataatacattagctgaattttttgagtataaagtattcagtttgatttatttaaaaaaaaaaatattcaggttgtttaaaagatttttaatttttaggagaaaaagaaactttgatatagtgcacatgtatatattattattttgtaaataaagagagagtgaaataattaataatatggttttttcaagaaaaaacaaaaaaaagagagagaaataatgaatgatgtgagggtattaaaaagaaacggaactaaatataacagagtgaaatggatcaaaaaattagtaaatgaggtggaaaagataaaatacatggcaactatttattggagggacaggaatggcacagtaaatttagggacaggtgatttttatcccaaaaaaaagactttatttctccacaaatactaaggtcatatttgtttttttgaaacaatactaaggtcatatttggattgttataatagtaacggtaataatgtttagtttgcttttacaaataatttaataaaattataatttaataataattacattatataaagaattcccattacattagaaaaacaaattacatgtcaaaagctaaataaagtaaaaataaaatgactcctactaataccctctctttatataaaacttaaaaaataaaatggctacaattttatcaatttatcacttagtccaatattcattccaataacaaatcaaacatattataatcatttcttattttattattattactattaccattacattaaatatacatcttttccatcctatctaaaaaatgaatgaggatatatgttctaattattattatgacttattatataaaatgtgaggcacttgataaagtaaaagaagaaaaagaaaagagtaatatagttaaaatagcaaataataattattattattttctttaaaacaaaaataagaagaaaaacttacttctcctgtgaattgtggctccacagggttgataagtttgacagcttcagggtaagccaaaacttgacctctttctggctccctatcatcaggaagaggcataaatctttgcctgttgtctgccatagccatgtactcaaacctatacatacatatatccaaaaacaaccttcatttttattaaacaagaaatacaaattaataataaaaacaaagtggatataatttatttactacttgtcttttctcagcttaaaggccattcttgtattggtgagattgaaagcaggccatccttctaagtgttcgtatatcccatacgaatagaacccacacgaaccccgaagcattatatatctaccaaaaattaaaataaataatcacttttcttttttagaaaagaaaagaaattcttagtacttaataataatattgacttagttaaaccttttgtctatgtttaaaggaacgaccttgccttggagtgagaaattccaagttcttgtgaatgaaatctctatttgttcttcattttctaatattacactaaaatctgtcgcttcaagcctgtatatatatacttgtatcattttataaatcaacttttcactccaaaatattaaatatatataaatgcaacattaaatatactatatacctgtcaagtgaacccttttttcctttacttccattcccaatccacacaagatcccagtacctacatgtttgtttatatatatatttatatatatatgtatgtatatttgttacaactaatatgtagcaaaggaaagaatataggcgacgctaaataataacattcaacaaaaattaaatacagaggaaataatttatatagatataaaaaaaaataccctctgttaaattcaccgttaagagcttcaagcaagttatcgacgccgttatattttattccggtgactgatcccgccggttttaacagcgttacttggagtatgccgttgtccatctccacctgcaccaaaaaaaaacactataattactctgtttcttttaaaataaataaacaaataaggaaagggaaataagtgtgaaagagaaaaaaaagaattcttacatatttatcgtaaatgtgtaacttggggaagggaaacgacacggtcggcggtaggatattggtgtcgtttgccgggactttgtagttgttgagctgagcctgagttgttgtaacattggtcatagaatgaataagaattataataataataagagatgattttgtgaaaagttgaaaattagacaaatttattatgattgttgttggttggtccattttttttttttggtttgttaaatagtaatcatgtgactatatatatatatatataatgtgagtgtgtgtgtgttgtgttgtgttgttttttttttttttctatgtttagggttgtggttctggttccacagagctattatttataggtaatgtgtgttcggctttttggaattgggccaaacttttgctttgactttacgacaagacaaagtattttcgtctcttttcactttctttcttgtgatatatttctctttttcatgtgtccccactccccacctgtctcacttttatttgtatttaggcttaagaatgacataagatgaatgagaatcatgatccatattattacattcttgttgttttttttatatttttaaatatcatgttttatttaaacgtttcccagtataaaaaagaaaagaaaagttattagtgacaatttcttaaggtacgtactatataaaattttcaagattagatgccgaactcaaattatcgatcccattaattccctttgagcgagaataattggtgttggcattccacggaacatataattattcggaaaaaagtggttataatctggcaatgatccgagatgagagattgccttcttcttctagtgaggtgttcttaatatggtagaagaaattatggattttaaaatttctgctgaaaattcttcattttgcatggcgaggtttccatgagattttacccttgaggggtggcttgtttcgacgtaaagttgttcctcataataattgttttatttgtggttatgggggtgattcaaattcacatgcagttttttggtgtttttagactcaaagaaatttagattttattggattaccctttccttcaggaggcgaagaaagatttaagcaagtaatattatatgcatctgagattgtgggaaaaaattcctttgaaagactgattattatttcaaggacaatatggacggagagaaataagatgactcacggtgaacatcaaaaacatcttaagcaaataattggttagatctcaaatttctatgactctgttgatttagcgaaggaactagtgaagaaaagtttagctatgagtaaggacggggtttctaactactctccttgtctaatggatcctttcacaatcattggatccaccttgttggtagatgcaatgtcttataggaatctaagataattggtgtggaggccgttattatgttagcaaatcatacagtaacagttgcgttaagcaaaccaatacgaggttggtattgtagattaatttcaagtttatagtttccaaatagtggtctatagtgttctctaagtattttaaggaattttaaacatttaaatacttcacacaaagggctattacttaccaaaggaagctaagtagagtagtatgagttgtgtttctctccttgttgagtttgtacataaattataataatttttttttgttgctaaccaaagttggtggactttggttagtatgggtcatttttattttgtttttttcttttcttattttaatagttgttgaccgaggttttcggcaaccaataaaatattataagattcgagaactgtaagaaaattagagaaggatttttacgtggttggggtgttaatgagccttagtccacgagtctgtgttatttatggatgtatttaatacagcgaatattttttatgagtattcactcttataaatacagtgtgagtatttactcttcttgctcttatgcaacccaaaattctcgaccccatttaatgagctttgagggggtatttatagtgtttttggtggggtgatccccaggattattgtacatgtgtatctgtaaaatccataaagatgggtattcccaatgaatataccatgagtaatgcatg

SEQ ID NO: 380164 - DNA, 2958 bp, Cannabis indica
tttgtgtggctctccacatggtgacttagaaaccagcccatccggcaggttgtgatgctgctttgttctccatcatctttgcctcaccactgcgctgagaattatttccatctccaaatggccttgacatttgcgagctcccagtaggtgcggcagtaaaattatctgttccaaagccccatgattcaaaaccagaatttacttgcgtgggtggcatgttctgctgcccatttctcgtcctgacagatttgctcgctgaaagaggttgctgtgacttcgtttcctctgcaaaaggctgccacatctttgcctcggggctcacagtgctcctgttatccttctcttgctggagttccctaattgctccatctcgtagctgttgatcaaaggataatatatcaaactaaagaaaaaaagctaataccattacagtagcaagcatgtagattttccaaaaagaaaacataccagtggagctccagaaggccgtatcccaggggaaatttgatttcttgaaacatctttgtttggtgatggcgttttagctgcaagtgcttgtttaagttcctgtaactcctgcctctgcgatcgacaaatggcagatagtttttcgaatttggaggtcatttcagccttctcagagtttacttgaacaagttgttccttcagcttctctaattcagcctccaaggcttcttctttacttgattttttattgataccggcttctgggctgagttttctggtatcaaattcagcaacaaaagtgttaaaagagttatcacggaaactttctaagctgccagtatttgatgccttggacctctcaacgtgatgatccctgtctttttgaaagaaacttaattcaaagtcttttgatgatccgtcctcaggcttggatcttccatacgagtttcttcctacattttggctttgtgttgttgtatcttcttttccatggacaatgttctttgataaaagttgattatctgcacgaaacttatcatgctttgccatactatggctggttggctcctcatcgaatttcggctcactcttgtctaccaatgactcctttgcatgttgtgaggaccagaaagcaccaagctgcccagcacctcctcctgccttagatgtaggttgatgtgatgaatctctagaaggttccaaagttgaaggtgggggaggtgggcttctacgaggcatagacggtgacttgtttgacggcaaccttgaattacctgctgaaatgcaattagaaaacacaatattcaagtcaaaacctgaaacatcttatctttttgcttaaataagaaaaatcttttttccctcatcaatgaaaaagaaacacgcagagcaatgacaacaatttcacttgcaaaggaacatgaatcataagaataaacaaagaaaataaaatagcaggaacctggctcgcattatttctacaactcaaaagttaaatgtcaaatacatattagtaaacaccaagtgtactccaacaaaagtcataatattcaagataaatttctattccagttaattcttgaatcaaaaacggaatttccagaatttcttcttactttagattaaaaagaaaggaaaaaaaattatatagagaaatttacaagacttgagggtcaaataaattttgttgtgccaaagaagtataagacaacacttactaaaattttacaacatattaataatttcatcaccttcatgtgtttcagtagacttcatttcaggtggcctatcaggtaaagacttctgtaatgccacaggtaactgctcattgacacgaaaccacacctgcagcataaaacaaaaagcatcagaaaacagaatctaaggtccttctccccatctttgctgatgcacagatgatctaaaactaacctaaattgatggagatgaatggccaatcaagcaaagcgcttgcctgcgtgatatctggtctgtcgtctggtgaagattgaagcaagtctttgatcaggtccgtaattgttgagctgtacttaggtaattccggaatgcgatagttcccgtttagtatttgcagctttgattctccatcaaatgcacttttgaaatagcaaatgcgaaaaagaagacacccaagagcctgtaaagtaagaatgcaaccttaattctcaacaaattttagggaaatgcatatttttaactgttcaaaatctaattttgcaaaaattaagttgccagtcgacttacccaaatatccaccttctcatttataagttctcttcggaatagatcccacatcttcaaagaaaaacacaaaaaaattatttacaaaaatactcaaaccaataaagtaatgcaaaatcaaaatcaaaaacttgctacaaccaaagaacactaatgagaattttgaaaatcagatgttttagacctcgggagctctataggcaggtgttgtgtgctttctgatattgtcctcttctatgcccatctcttcaggcttctcaaagcgtttgtgaatcgtagaggtgctaccaaaatcacacagcttccacaatccatcaggacctaaaagaagattctcagctttcaagtccctgaagaaaaaggagaaagaaattgaacaaaataaaatcaccaaagaaggaatgcaactatataaagaaataaaactcctcttagcaagaaagaaaagaaaatcatatcattcatcaaatgttttagttgtagatgaaattccatctaacctagaaaaacaaatttgaaattgagagattgtgcttcaatgataagataagatcgagaaacctatgactcatttacaaagcaggttaacactttacatgtagcatccattattctagttcctaagcaaaacagaagcccagctaccaatggaaataataagtaaaccaaatcaaataactgcaaaagcaatcactacaaggcacagtttatgtgacactgagctagtcc

SEQ ID NO: 380165 - DNA, 2554 bp, Cannabis indica
ttaaccagatagaggtgccggctgctgttgcaacaatagaagctactgctcaaggtattgcatcgatgctttgtgctcatggccccgatgttgaatggagaatatgtacgatatgggaagctgcttatggcttgattcctttgagttcctctgcggttgatcttcccgaaatcattgttgccactccattgcaacctcctgttttgtcgtggaatctatacatacctctccttaaagtactagaatatcttcctcgtggaagtccatctgaagcatgtcttatgaaaatttttgttgccaccgtggaagcgattcttcagagaacctttccatctgaatcttcatcagaacaaaacagaaaaaccagatacttttccagcttaggatctgcctcgaaaaatcttgctgttgctgagctacgcacaatggttcattcactattcttagaatcgtgtgcctcagtagagcttgcctctcgccttttatttgttgtgttaaccgtgtgtgtcagtcatgaagttcagttcattgggaacaagaaacccaggcgagaggagaattaccaatatgatgaaattaccgaggaatcacaagatgcatctgataagctgagagacaatcgctctaaaaggacaaacaaacaaggacctgttgcggcatttgattcgtatgttcttgctgctgtttgtgctctttcatgtgagttgcaattattcccttttgttttgaagggaattaatcattcacattctaaggatgggaagaatgatgccaagcctatcaaaataaatggaactagtaatgaatttcgtaaaagtattgactcagccattggacacacacgtagaatcttagtaattctggaggcactattttcactaaccgtcttcacttggaacatcatggagttacagctcaaatgagatagtggctgcagctatggttgcggcacatgtttctgaattgtttaggcggtcgaaggcttgtatgcatgctttgtcagtcctgatgcggtgcaagttggacaatgaaatatacaacagagcatcgtcattgtataacctcattgatattcacagcaaagctgttgcatccattgttaacaaggctgagcctttagaagcacatctaatacatgtaccagttcggaaggaatcccgtacatatttgaatgggaaaaagcaaacccaacatgaaaatggtaggtgctcagtttcagggaagcttactttctcgcaaagcaagacttcaacaaatgcagattctaaacttaaatctgagggagtatcacattcaaatgaaatatcgggaagtgcttcggggaaaggtattgcaagcttttctctagatgcttcggatttagccaacttcctcaccaaggacaggcacctaggattcaattgcagtgcacaagtgtttctgggatcagttctagcagagaagcaagagttatgtttctcagttgtttcactgttatggcacaagttgattgcagctccagaaactaagcctactgccgaaagcacttctgcccaacaagggtggagacaggtaacatatttatctcgtttccttgtgtattagccgttttcatgtctcacttgtaatgaatgaaataattttgtattcatttctggagtggatagaaataattttttgacatctgttcattagatcaatacatttctttctttcatcatttggattattgttatatcataaaattgctatatttgaccatcctttatcctggatgtttataggtagtcgatgcattatgcaatgttgtaatcgcttcaccaacaaaggcctcgactgcagttgttcttcaggtccaatttctgttcaccttgtaattatcaattgaaattgtaattatagtataattcttggtaaactgacttcaacactatctgttctttgctaaaaaaaggcttttgaggaagtgttggcagtcagttgcctgatagttagtagcttagcttaatttctggttttattggtgtttcaatgacttcaattgtttagtcactttcatggcctgtatgtgcttgttaggctgaaagagaattacagccgtggattgcgaaagatgatggccagaagatatggagaatcaaccaacggattgtaaagctgatcgttgagctgatgagaaaccatgacagcttagaatcgttggtaattttggcaagttcatccgatctacttcttcgtgccacagacgggatgcttgttgatggagaagctttgcactttacctcagttggaggtaacaaattatgattacttttatttgcaatgacttaacaaaggcaatagtactatatggcaatcaactacctggactaagcaacatgaatttgcttttcaatcttttccttttttggcttgttcttcccactaaaaatacaaacttgtacctacccacttgaggtttcaattgattggacatatccaattatcatttttaattcatccatgtctatcttttatgtaaactatcattcttgacatccttagttagcactcaattgcctacatagcctaaatt

SEQ ID NO: 380166 - DNA, 1773 bp, Cannabis indica
agaagaattaatagtaaaaaaaaaaaaaaactattattaatgattataaataaattaaataattaatagtaatagtataattaaaaaatgattattaaaatttattattgataataaatgagaaaactgtaaattgaaaaaacagaaatttgacacatgaaatttttaatgtgttaaatttaaataatatataattgaaagttaatttatatacaattacatatttaatatttgacgtttggttattattgaatcaattagttataattaaattagattgatttatgcacggatctctttatttagtgtaatttataaaaataaataaataaataacatgcatattttatttttacgggcttttaaaattatttggatcgtgattttagcattataaattacttttttttttttaactacgtacaaaagttaaaactataagacatatccacatcaaattcaaaattagttgagtactacccaaccttaaaaattgtccaaaaaaaatcttataaatatatgtttgatttattcaaaaaaaaatattaaagtcaccactcctctcattacccacaacatcaggtaaattttttaataactcaataataatgtgttacgtattttaatttaataattattttttaaaaaaattaataatttactacacttataacttgttacttgtaagacatgttggcaacaataatacctagctaataacaaagctcatgcaagattaatacgcttggttcaaaccaaacaaaaaaaaagaagtgacaaagtgcatcgagcaataatgatcaaattaatatatcctccttcctcgaagcattccaaaaaaattatgaacatttttatataaatatatatatatatatatattacaatcgatcatcgagttataaataattttaccagctagttatgaaaaactagatcaaatttattatatagtaaatctccaaaaagaaatcatgcttaaaaaatttgtccttatgtcgatcattgatcatcatcaagtaattaaacttcttcgcttaaaaaacaaaagacaagagtggtagtggatcgaaataataaaagcccgaactattatataattattgtctttattttttaggggaataataatatttatttctatgtatatatgccatgtgatcattaatttttctgatcatgtatatgaatggaatgcataattaatcaagcatacaagtacattttgtctagaaatttattgaatatatgtcggtcgtatcgtatatatatatcgtcttgatgcctaacaaaacactgtatacgtacatgatgaataatagtgtgaaataatgcataacactaatctacccgtgaataaaactgtggaataataaatataacagtacgaagatttcacgaatgagacttttatcactttcattattttctaattttgaacacttctatgtctcccaaacctttttggtctttagaattaatgggaaaaaaaatattaccctcaacctcttattataatttgttagtcaatttttgtactcgaaaacaaatgtcggaattttttttttcaaaattttcttattgcagtgttcgttatggttagaatatcatgccggtaaatttttaaaatttcgaatagtttatagtatcgaaaatatgtttgaaattttttgaacacgcatggtagactgaaatattaagaactatattttcgatactgtaaacactactacaaaaatgggttttctcgacgtttttaaatagtcgtttaaa

SEQ ID NO: 380167 - DNA, 1067 bp, Cannabis indica
ttttcttatatagagtttaactgcagcaataaatccagttgcttgtatatttgtactgagttgatttacttagaaaaaactcctgcctgcttggtgtggatgacatttacacagatgatttttggtcatagaatccttgtgttccactacattatttttattattaatgatccaaaatgatattctgagaagtaaaagttgtgacattgtaatatagctggctactactactactaccatttatacatcactgaatggaaaaagcatacacagacgggagaatatggagaccattagctagagtaacaaaaggaccccagaggagattggaaattctatgtgcttagtgtcccaattgaattaaaaaaattggcccataacgttaaattgttaccaaacatgcactgtgcagatgagatccgtgatgtgattggttagtctatttttttttattttcaaattttattaaggcaaaaaccaaataaaactaaggccaaatacaaatagggagatcagaccattacacttatcagtctcaatagacagctaatttggtaagagaaggagctgtggagttggctactctgttacaatgaacaaaagataagctatgtcatgtaggtgtctaggattaccccttttacagagtattccaccacttgttaatcacctcttagatttgaaaacgatctgtttctatgataattgattggtatccagctgcttacacaggagatcctgtggcacgacaggcttcatccacatgaaatttggaggtttgccaaagaggaatagcttaagaacccaaaactccacttagtagcacaagaccactcctaacctgaatttgctttgaagagagtagagctattcaggggggtagcattgggcctcatacataaaatccgccactgaaaagaagccttaccatttttacccaatgcctggtggttgtctaaaatttgatgggtgcgaaaatgaagagaaatttatatagtataattttgttattttcttacaaaaataatgtcacgcagttaattttttatttttactgtttttttttt

SEQ ID NO: 380168 - DNA, 2484 bp, Cannabis indica
taagcaaatctgtctttgctgagagattttgtgagaatatctgcagcttggtcaagagatggaacatatctcacttcaagttctttggcaatgagttgatcccgaacaaaatgaagatcaatctctatatgtttcgacctcgcgtgaaagacagggttggctgcaagggaggcagccccttgattatcgacccagataatgggaggtgctggtagtgagacatgaacttcagataggacagaacgcagccatcgtatctctgctgctgtgttggctaaggacctgaactcactctcggtactgctccgagcaacaacactttgcttctttgcagaccaagagataagatttccgccaaagaaaacaacatagccacctgtggacttccgatcatcgagacagctagcccagtcagcatcagagtatgcttgaagagtcatatgcaagcttggtcgaatatgcaaaccttcatacattgtaccttttaagtatctaagtaatcttttgcaagcgtcccaatggatattggtaggggcatgaataaattgactgagtttattgacgatgaaagcaacatcgggtctcgtcaaggttagatactgaagagcccccaaggtacttctgtagagtgtttgatcaatgaatggctctcctatgctgagagcaagtgtatgagccgaacttgtgggactcgggctaggtttggcaccctccattttgagctttgtgagcaaatctgaaatatattttgactgagaaagatacagtccagtagtgtttctgatcacttctaccccaaggaagtaatgaatggagccaagatctttgacagaaaaatcattattgagggcagatatgagggcagagatgttgttgtgatccggacctgttattaatatatcatctacgtagacaagtagtatgatgagagttggaccagccccataaatgaacaaggaaggatcggatcttgatggttgaaagccttttttggtgagagtggacttaagtttatcattccaagctcggggagcttgcttcaacccatagatggccttatgtagcttgcatacatgatgaggttgtgtgggatcaacaaacccgggaggttgttgcatatagacagtctcctcaagggtgccatttaggaaggcattagagacatcgagttgtttcacatcccagttgtaagagacagctagagttaagactatacgaacagtagctggtcgaactacagggctgaaagtttcttgaaagtcaatcccaggtgtttgatgataacccttggccaccaacctcgatttacacctgtccaaactgccatcagcgtttaattttaccctatgaacccatttatttcccactaatgtcatgtgaggttgatatggcacaagtgtccaagtgccattctttttaagggcatagaactcggttgtcatggaagcattccattttgggtcagctaaggcttgttttagtgttttgggttcactgggaaggagagattcaggtagaggatattttgtggcaaggtaggcttttggtttgtaaattccatctttagatcttgtttgcataggatgagtgttttgggaggaggtgatagggttactggtggaaggctgggtggttactggtggtatagtggtgtggacagcagtgatttcagccgagttatgtactggaacagcagggaaactgggtgctggtgcagcaggcaaattagttgctggtgcagcaggcaaattagttgctggtgctgagacaacatcagcagaggcagcagataaaatagttgctggtgcagaagcagtatttgctggtgcagaagcaatatcaacagtgggcaaaatatttgctgaggcagtattgagaactgcagctgcagtgtggacaggtggagagtgagagctgctggcaccaactcctgaagtgcgaggaggaattacctcaggggcaccaaatgacagtgtattagtatggccaaatagaggagttgtccgaaaaatagtgcaaggaaaggtagtaggtgcaagtgatgatacctggtttgtcttaggtgatgaaagagcaggaaactcagtctcattgaacaccacattgcgtgtgatatacactcggccagaggaattctcacaaagatatcctttgtgttgtagagagtacccaatgaaaatgcacttctcagatttgacagtcatcttgtgtgtatgataaggcctcaagtaagggaagcatgtgcatccaaaagtccttagaaaggcatagtcaggctttttgtaaaacaaacattgatagggactgacatcatccaaaactggtgttggtagccgattgatgacataggtagcatgttgaaaggcatgccaccaataagataaatcaagacctgattgagctaatagggtcattcccgtttcatttatgtgtctatgtttgcgttccgcacgaccattttgctcatgatcatggggacaggaa

SEQ ID NO: 380169 - DNA, 1638 bp, Cannabis indica
gcataaaacccaacaccaacatctttgctacttaccctcctcttaccattcccaatcacacaatgtctccttccccttctacctatgtcagcaagccacatttgacccaatacacttacactttatctattgttaatgctgacaaggaaaaccaatccccacatacacatacaaaaaggcctaatgaatcagtttcaatgagaaaattcttaaaaaggtgccgagctacaaccccttcgactttgtcaggagaagacggttctgaggtgttagtttctgatgtccaagattctaccatctccaatgactcaagtgtggtggttggtatgcaaccccgcaattcatcatgaaaatccttagctggaatgcacggggcttggggagtccgagtgcgtttcgacacttatggttgcttattcaatagtaattgccccatgttttgtttctcatggaaacaaaactgtgttaattcattaacacgtgttcgttaatctttaaactactgtaatggaattgaagctccttgtgttggtctaagtggtggactaatgcaactttggaaaaatgatgtggatgttaccttgctcaattatggctccagtttctttgattgctacttaaagaatgaagatgaaccaagctttcattttatagggttctatggtgctccgaatatttataatcgatcaagttcttggactttgcttaagcgcttagcggatgttgctcctctttctccatggcttgctattggagaattcaatgaaatcctctctaactccaacaagtcgggcggtaatctccgaaataaaacacaaatgactgctttttgaagtattgttgatcaatgttgtttccatgttgtccctaatgaaggagaccctttcacttggattaagaacgattcaactttaaatacaattaaggagcgcttagacaggtgttttgttaacaaccactgggagaataatttcactactccaactgtgcatcatttggactattaccatcggatcatcgtgctattatggctatcttcaacacataatcaacaacagtcactgaggcaaaacaaagaagcaggttccctttcgaaaagctgtggctatccgatcctaaaagccaagatattattcgatccaactagaatatttcgacttctgctgatcctattagtgctatcttttgtagcattaactcatgtgttgaatctctacaatcatggcatattcgaaaatatggaaaaatgaaaaagaagatcaatgattgccaagacaaagtgactaatcttaacaatattactgcccgcaccagcagtgatttaaatgaattgctgaaagttgaagcaattcttgaagacttgcttgaataaatccaacaacagaattaaatttctttttgacagcagagggcaaaaagttcattcaaaggttgatattgctgaagttgtgcacaactattttgctgtaatgtttatggccaagacattgatgaagcaaccctttccacaacacttcaatgcattcccactcttgttactgatgaagataatgacagcctttcaagaatttttaatacaaccgaggttgaagctgcatggaagaatatggcagcagataagtgttggaaatattttac

SEQ ID NO: 380170 - DNA, 1082 bp, Cannabis indica
gcaatcgaagttaagaaagatgcattctctcgggcaaagatcattgaatctatggatgaagttggtgtggctatctcacaagagatagaagatggtgatcaacagggagaagaagaaaagtgtgaaaggaagaaacaaagagaactaagaaaattaaccgtcaatgtgaactatgagaaaagttacaaaaagtcaggggcctccatagattcattatgaagatttttacatggaacataaagggtagtggggataagggtaaaagacatgctatcaaagcaacgatttgtaaggctaatccagacttggttattttacaagaagtgaagagggcattagtggatagaagattcattggcagtatttggtgacccaggttcaaagcttggatacttattccagccagcggtagatcggggggaactttattaatatgggatactaggaccatctcggttcttgattcacttgtggtgacttctccatttcagttttgattaaagctgaaggtaaggatccttggtggttttctggggtgtatggcccgtgttcttataaacttcgacctgtattctgggatgaataagcaggtttaagcgcgatctgtggagattcgtggtgtgtcgggagattttaatgtgactaggagacctggggagaaatttaatagtagctcctgcacaaggagtatgaaactattcgatggcttgatacgcgaattacgtttgattgaccccaagctagagaatgggagtttcacttggtcgaactttagagcatctccagtttgcagtagactggatagatttctattcaccaataactggaacatcatttatccgtttctcagataagaaatgctggtgaggctagtgtcagaccacagtccggtcgtgattgactcaaatcctccgagatggggtccgaaccctttccgtttgataatcaatggctagaaaaaaatctttctccaagttatttggaagatggtggaaggaggccattgttaggttatatttagcctatgtttcaggtatttaaagttagcattttctcgtctattggtgtcttttggagcagtt

SEQ ID NO: 380171 - DNA, 3335 bp, Cannabis indica
cattgaccgtagtattcaaggcgacaatgcaagacacgtcaacagcaagtacctcaccaacctcaagattttttctgtacaactaacaaaaacaaaaccactttccttatgatctaagttttttaagtagttttgagaaataattataatcacaaacataattgtaacctatagctatatcttcaacaatgtacagcctctggaaaggaatagaaggggaataaaaagaggagttaagaagtcttctccataaattaattaaagctggttaatcaatatattggagccagtaaaactttacaaagtaaattgctagtttaggcctgttatttgagacccaaaagaacagaggaaaaaaactacaaacaatatatagtgcacaaattcataaaagaccttaactacaattcactcaacatgtaggataaaaagtgcataccagatccacccgcaagtataaacgcaagcccttgaccagatatcttttgtcttaaaaatacctaaataatatcaacatacatgcgagttagataaactaacactacggcaacccagggaacaaaatataataataataattaagtgaagggaaaaaaaattattgttaatactttttaaccaaaaaataaaataaaaaatcaacactcctatacaggactcacctctgcactagcaatgttacgtgctctttgatcaagtgtattgcttactttcacatcattgacagagcatagaaatacatctgcctacaaattttcaaacaaaactattataaaattttaggttatgatgaatcagagaatgagcgataaaaaatgtatgttaaaacggtgtatttaagcactaaagtaccatggaaaactaaaagtagaacaaaattaacaatctaaatgaacaatttggcactacctggcacaaaatctctccaccaaatactgccaaatcaatctgacaaaaaaaaagagaggataatttagaaagataaaaatactagagagagttgagtcaattgacttgtttaatgtttagaatttataatttttctaagaacacaaaccggtagaattcgggcaagagagggagcagcaattccaacaaaaccatcactttgaccattattacggaaaactacactagtgacgctcttgccaaaaagccaatgccacatgcccacttcattttcggggagtaagacattttccatttcaattgatccagacatgtaacacattgaacctacaaacaattcatcgattagttgtgtgtgtaatcagataataaacatgtaatagttgaaagacaaacatattataagattacaataaaaacctgggaagtaaaatatacatttacggtgatgggactctagaagagtgacaaaacactccaaagacagctggtggcaagtactttagggtcttaaattaaaattaaaaaatttctttgtctaatctctgtacataaacattgtcataaattaagttagtgtttcactacatttattgacaattttgtgagaggtattgtaggcatacaaccatggaaaccacaggcatggcatctaagtaatattttcaaggtttcgaatgaataacattaaaagagaagctagcattgtccaaaaaaagagatataagccaatacataaaaagatgagcacatataaagtgtagcaaaacttgcttaccaggctttgcaacaaccttttcttcaggcttcagcattatctgagtaaaggcaagccaacaaccgtgagaaaataatatagaagggggaaaaggtaaatttccaaagaaatgaaggtatgattcaacaaaattcaggatgattaagcatatacctgaaccacctgagcttcaccacctaaaatttggaaaggtatcacagcatcttgtggactctacaaaaaattagcccattattaatgcatataacaaactcataatagactgtacaaccaattacaaattcaacttagaacaaaaggggcttcacaaacaaaaccggactccacaatgtgccagtaacaagtagaaattaccaaaaccaaatacaataaatcaagagggcaagatcgatttaaactctacgggaaaataacggaattgtgaaagctacaactatgcatcacagtgacactcgacacagaacaacaactaaagcttaattaattaaaaaagttgtcccttatcgcaaaatctaaagcccaaacacgaaccaacatgcgccaaaaccctaaattgacatgagaattacaccctacggggaaatctacagctccaatattctttcgaggcaaattaaaaatgagtaaagacaaaaaaaaaaacatacatgtagaaatcaacatgatttcggtgtcgaagcccgaaagccagacgaatagcataaaaatcaaagaaaaacaaaaggtgtacctggtagacgtaaggctggaaaggcgttgagaaaaagggagcggccatggcgaaaacgcagagaaaagcaggtagagattacagaagatcggagagaacggaacccttgaaaattgaagttgaaacaatttttgtcaggccatttttgttgatcactgatcagatcgaaatttcatttctatatagtcagagcattctttcctcagcatctttttttctttcctcttaatatttgacaccgtttctgtttgtatattggataagtagattaccaaaatagccttttcggtagtttgagtttctttgtagaaaatggctcagtcgatgtagatcgttcagtggcattttggtcaatatgaacttaatctcatctacccggtcgtgatcattttaattctcttgctgtaaaaactccgggacgaagtacacgtcggtgcaaacaatgacgtggcgttttttaattggttggattctgtaatctctacgtgtttatcacattcttccccaattggttattgggcatggctgagtaaaagaatttgaggtctttaaactacacattaaaattttttagaaaattccacaatgcaccccttaaaatagatatattatagatatattgatgcactcctatttattttagcatctgaaataattttttagttaaattttttctcatagtcatgtacattatagttatttaagacatcctgcaaaattttaagaaatttggaaaaatttaacagaccgaaaactatgttcaaacagtgtgttgcacacgtgactattttattttatacgcatgtaaaatggactgtttgaacattgttttctatattgtaaattattccgaattttttaaaaatttgtaagatatcttaaatagttataatgtacataaatataaaaaaaaaatta

SEQ ID NO: 380172 - DNA, 1163 bp, Cannabis indica
ctctctctctctctctctagggtaagaaggaaccaaaaacccaaccctaggtcaactaaattctaatccattctcatcctttctctcaagattttagctaaggtaggtggtattgcatgaaggaagaacaaggtaactctaatctttagtctctctttgaattgtaagagtttgagtttgcgtttgtgtgtgttttaagtgttttttttctgtatagcttcctataggttagattatacttttatcttatatttgagttgtaaggagttgctttaggtgttttgttgaaggtttgggttgagagcttcaagcttgagctctaatggtagattttgtttagtgatattattgggttgtttgagctgtgctttttgatatatggatgttattagactgttatagagattttggttgatcctttttgagtttgaaagagtttgtgaagtttaaaactcaaagtgttggtttcctacaaaaaatggcagaccgttttcttagaaacggtctacctttttttagggactttatcccgaaatcctatttttggtgttttctcagtatttaggatattttcacactatttatcaataggaaaactttgagttttgagtttaagacctagaacgggttagactatgttgttaatcgatttaccgttgttgtgacatagggctcgggattgtcgtctattctctgctcaagttggtcggcacacctgaataggaatttgaggtaagaaaagacattcataccacaacatgttaagatataatacgattattactgtttgtgattcgataattatcgattataagatacggtaattaccatttttgcaagaaagagtcattactctaaattgagattgttgttaggtttattacttattggttacatcattaggtaatggtagtgacattagatgcttagttaggcttattagggttgcatcattaagcaacaaaggatagggttactatatgaagtaaccattatagcttgtcttattagatagataattttgtagttttggattgttatatatatgtgattatttgtactgcttatccgtgtttgactataattgttttgtatgttggcatgtgattattgcttttacttttcttattgagtcttttgttgaaatttattttaccaggatc

SEQ ID NO: 380173 - DNA, 2852 bp, Cannabis indica
ttattttatttttttcgaaaaaacaaagaacattgaaatgaaatagaattttaaacttgtgacatctttttattgaaggaaatatttactacaacatacaatcttatttattattagtatagacgaaaaaactatttatataagggtttaattttttttttcaacttactcccaataataacttggatctgtcttaatttcaagtgggacaattacccaacctagtctctatgcactctttgattttgaaagtttaaaatcatttgcatatatagagggggagggctccattcttgttggttttgttagaatttattttttaagaaaaaagaatagcaatcaaatttcttaaaaaagaaataaaagatactactaaagaatactcatggcattcaatttttataaagtgtcatgagttcaatttttttactttgacaataattaatgattatagaaaattattaatataataaattatatagcacatgatatttgattttactaacaccggtataacctaaaagagtattaagtacacttatgtgttttagtatttctcttacaaatataatagagcattaactaatatggggcaaaagatgtttagcactagtgagtgtcactttataattggttaataattttttataatatttattaattaaataaaacatgtgagcctcaatattgaattgtactactagtaaacaaaaaaaattattcaaaatcgaaatatttttttttctaaacaaataataaaagaagtctccaaaattatccctttgaggcatttaatatgttgtttgtggtgctttgtttgaggcattctattctagtaaaagaaagaaatgaaacaacaaactcaaaacgaaaaaaaaaaaaaaagaattattcaaaatgaaagcattctatttgtaaaaaaaaaaaagggtaaatactatattggaccctatattttacagaagtaattgattggaccctttgtttggttaaatgacaaaatgaaccatgtattttctaaaatagtaaaaataggaacttgagcttaatttttgataacttttttttaatataaccaacttgaagacaattcgtaacatgaacaaatacagaaaatgtaaacaattttgtcataacacttttagatcgaattattatcaaattttattttgacaaaaaatcagtttaaggtcttatttatgttattttaaaaaatacagggttcattttgttatttaacaaaatagaaagtacaactggtgacttttgtaaaatataaagtctaaaatggtatttactaaaaaaaaataaaaaaataaaacaacactcaaaaatatctctttgagacattcaacgttgttgttagtggtgtatatattagatttggaacttctattggacacttgctacaattcatcttgtaaccaaacaaattaagctttaccaagtcattttcgctttttggatgcctaacaaatcttgtagatgtagttttgtttgtttgttttatttattatttgttttgaataatttacggtataaatatttaatttaatttttgattagagaaatacttatgtttaatttttaacggtaataatactaaagttatatttttggaacttctgtaggtatctagttgttatctgtcaagtcaatagccacatgacaatccttaattagtccaaattattaaacttttattttttattgaaaaaatcatttaaatatcacaataaaaaaatacgtggatattaactaagcagttaacggtcacgtacctaccgaagttctaaaaataaaacataagtattattactgtcaaaaattaaacttaagtacatttatatgcaaccaagaataaaatttaaatatttatgccgcaaattatctttttttttgtattgttcaattttcaaaaaaaaaatatatatataaatttgtaatttgtaatattttatttactaataattaaattaatgtcctctctttatttttacttttgcagtttggccccgaatcatttattttatgcttatcaaaagttaattaccacataaatgtgtattatatttgtgtgtaatttatgtgtgcaagtatcattactttttttacatagatagatattagataattttgattttttttatatgacaatgtacattataaatatctaagattatatttcctataaatttttgagaaattcagaataatttataacacgtcaaaataaagtttaaacattttattgtacagatactttttatattttatacgcttgtaaaatatattatttgaaccttattttctacagtgtatttcaaatttttctaaactttattattatatatcttttttttttaagaaaaaactttattatatattttaaatgactacaacaatatatatttataaaaattaaaattataactattcaaatgttaaaaataccaaaaaagtacaccaacttttaaagtgcatcatattacccataatgcaacagtctaagtttaactttattttgatatatggaataatgtaaaattttatgaaacttagtgagtaagttgtaaaatgtgtatcaacgtgtcgtattcgtatcatattttatttgatatatttttatatttcatattaggtatcgatttatttttttacttgcatttaaatttgtcaaccctaacccgaacaataaaactaattatacgacacatgtattgcacgtaacatcaatttaatttatatatacatatatatttttttttttatgaaatgagaacttcataaaatttagcaatctgaatacataatatccagcagacatgttggagcattagacacacagaagc

SEQ ID NO: 380174 - DNA, 4853 bp, Cannabis indica
ttgcctatgtggacatgccacataacatggataaaaattaggataacagattcaaagactgaaagtagtgtgtgataccaatttatggatttaccattggagagagccccaggcactccacggtgatggccacatttttagtggtgaattgcctggcagcattcaatgcggtgataggaagaccattgttcaatcgtttgaaagccataacctccatatatcatttggtcatgaagtttcctacccccagaggagtagccacgctaaaggaggagcagaaagaggcgagagaatgctacaatacctcgctgcgcctcgccaccaaaaccaaggaacccatggcaatgatgatatctgaagggccatgttgagttgaagaaagtatagcggagacaagccataaagaaaagcatggggaatccttgaaaaaaagagagagaatggagatatcctttagttatgttagttgataagaatcaaggagaagcccttgggcaactccattggtatgacttctttcctttttccttttcttagtgcttcaatgtatacacttgggggtggtaaaaaaattataagccgacaaggactagctacctttgattgacaaagagatcttgaaagacactcatggcctgaaatgagatggacacctctcaagtgtaagaaaacactcataaatcaagaggggacgcaatcaagtataataaaccccctcacatccaagtaaaaggatgaataaatgataagaggaggagaccgctcaaagaataatactccctcaaatgaaaacctgcttaccacagtaggaaaggtcgttaggccatagagtaaccctcaaagtcactcggccaacatcagttacaaatgtcactctgcctcacggcgaccaaagtcactcagccaaagagtagatgccactcggccctgcggtgaccaaagtcactcggtcaaaaattgaacaaaggttgtttggccaaagagtaaccctcaaagtcactcggccaatattagttataaatgtcactcggcctcatgatgaccaaagtcactcagccagagagtgaacagatgccactcagccccgtgatgaccaaagtcactcagccaaaaagtgaacgaaaggtcattttgccaaagagtaaccctcagagtcactcggctaacagtggttacaaatgtcactcagtgaccaaagttactcgtccagagagtgaacagatgccactcggccccgcggggaccaaagtcactcgaccaaaaaatgaaccaaagtcacttgttcaaagagtaaccctcagagtcactcgaccaacatcagttacaaaagtcactctgctaaatagtgaccctaagagtcactcggctagcttcagtttcaaacaccaaagaaacaaaagaagtaaagcaaaaaaaatctacttaccatagtaggaagaatcatcgaaacagggagtaacttaaagaattactcggccaagatcagcttctaagtgtcaaaggtacagaaagtaaaaataaagtcttacaatcatccaagagtttaaaaccataaattaaagaaaattttgaagcctttctacgctgctaggtgccactacccgaaagatcagcatcccgacgatgcttaccctagcgtactgcactccattcaccacattcagccttaaaatcctcaaccatgtgaaccgcgaagggggccagagtgctataactgaccccataatttttcacccaagcaacgtataacaagcactcgatcttgtcttcttcttcctccttgctctttgttttcaagatgaggagacaatgatgtagtttgctaatcttagcctggagtttttcctaccaggtctgtgactttgcaaaatacttatcgcaaatgcagagagagtattcaagttgttgggtaagacttgacacagaggattgcctctcattcaactcagtctgaagatgatccacatgcacttggagtgcattatgttgcctgttatactcggccaagtcatttagagctttttgaaggcgataaatatcccctctttaagtgaactagagcttgggttatactgatgcaagacagaagcctacaaggcaaaaactaaagtcaataaatcgttagcaaaatgttaaaatacaaagatagcataaactaacccatatgctgcatttgagagccgcctcctatcgatcatctactgaagatttatgcaaccaaatccatttaaagggagggtactcactaagatgcttgttgtactcactagagaattggctcatttgagattgagactaggaaaactcatcaagatcaaaagactgttgaggaaaatctttggttgggtcgaatgaatcttggaaaagatgttgagcattgaaagcatcaaaggaaacaatggaggcataaccaaaacctcccaaattcatctcatcacataattgacctttgagactagcacctgtagatggggcatacccatctgactcctacatctcgacatccccaatcagacctataggatcgataggttcaggaaccgtaacatgactttttccctcgtcatgagtcacggaagaagtatgttaagataggcggtgaacaaacacattagtggggatctcaaaggaagatgaacctaacatccccagtcaagattcgacttccttacgttagtagctatagttcccaagaagttgcctcaaagaaaggcctttcttacatttagaaaacattgatcggcccgtttcaagtgttagaatgttggaagtaagaggagtacatttctttgactcgacaggacgtctcgaattcgtaccaaccacaggaacaattcatttgcattgaacaactgcaaccgatgttggggtcacaatttcttcaggttcatcttcctcatggtgaggaccgcgagtggaaatcatgaagtgggttggggacgtaagaggaatccctatgaggttgtagctctgtaatcggcgcaaggacaccctcaagaagcaagacatttgtcaggcaagacactttcaaacaatttggcataagaagattcttaggggcccttgcatcctcataaagattgaaatatctttgtaacgcgttcaaagagttagtgctaagttagtgctaggagatttggtagtgtgatagatgttgaaaattgagtggaactctgtggctaaagagaaacagccattcacccccttgaaggaaatggcgaaacatgtcagcataacataagccatcgaggggagttgtagaggcgcaatgccaaaggaagcaagtatgtcaacaaaaaatggatggagaggtaaagtggcatcaaccacaataatgtgtttgctgaaggctactcccttggcaaggtacgacggcgaattcatcttaccccagcttacacaatgccaaatcattagtggcacatatgtttaaagtatccattaccctacaaatcccatatgttgacatggtgttcttgacatctatatagacaacggatactttgctaggcaatggagggacctaccgcctaggcaagtaaggtgaagagggcctacggggtgcaacaggatacatcgattgtttgggaagagtcatgcctgcagacacataaaagcaatgataagcacgagccacgtattttctatttctcttgggaattttatgagcctgagccctaaccttaggtacctctaagactaaggagagaacagatgtgatcccacactccttgcccaaagaagatccgacaacctcaaaataggatggagtatcaggctcaggaggaagggaactctcaagaaatcttatatgattttgagactcaacaagataatccctaagcctagaaagatacatgttagagtcggcaaccaaatcatcttgttctctactcaaaactgaatgaatttcagcttgaaacctctcaacacgctctcgttaataatgtgttcaaaatattgctcctctcagacattaatctatcatatctagcatgtgggttctcttgagtaccctccaaatcagaggacaaaatatcaatgatatcggccgtagaaaacatctctttttagggtcgcttccaaatgagacctaggacataatagttcaaagagatgcactgccttgacacccccacctaagagttaaaatcaaggtattgagctcactagacattacatggggtatatgtcccgataagggtgcaggtgatgtaaccggcaccataaaggcaacaaacgaaccacaaccacaagcattctagacaggaagtgtagagacaataaatatagaaatgagagataaacatggtacctcttagaacaaggaaggtcgcagaataaagtgtaactttctttgaagtgagcaggaagcctgttgcataaatcaaagtgcaagcgttataatgctaccctgggatcaagggtgacacatgccatgtacgatggagaaaagtgtggaaaatatccaagtatatttaaatatgtggttaaaaataaatatatacatctaaataatataaataagttttgaaatagtgaccttgtgaatgatcaaactcaggacctcttagacaagatgagaaggatttgccactacaccaaggtgtttttatgaagtgtagttcaagcaagggacgctctctatatatagtgagcacattctagagaaacgcaaagaagataagattcacacttcagcaaggaaaattccccaacttactcagttgacaagaacacttaaaaagaattcttgaaggctgtgaaaccccaaaattagcactgctaactctcgagattagtcacctaataaccaaaggactaacatgagggcattctgttggaattatttt

SEQ ID NO: 380175 - DNA, 1606 bp, Cannabis indica
tctctctctctctctcttcattgttcaactctatgaaaacagagctttcagatagtatcagagtcatatcagatcaaagaattgatccaccggagcaagaacaagtgcagcagcaactaaacaatcaagcacgatttggtgcacctgatcaaaaacaagcacaatatcatcagaatgatcaagcaagaataattctccccaacaataatcttcttccactcaatcttcaacttgatcgaaccaattacacgatcttgagatctctggtgcttgctgtgcacgtgcttatgatcttgatggatacatccttgaactttgtcctgctccaccgatcttacttgcaggtaacattcctaatccaaaatatcaacaatggatgagatttgatcagttcttgatgcattggcttataaattctatctttgacaatatgcttggacatgtcatccattttcgaacatctgttgagatctgaagtacttttgcatcgttattcgtcactagagactcctgcaactgagaggattgctccaatccaccaagaaaggttccatgtcaatcgaagaatacatattgaagatgaagcagtatgatgacagtcttaatgcagctggacaaaccatgtctgatgatgatttggtactttacatactcggaggattaggatctgagtatgaagctgttgttgtcaacctcacctctcgatctgagcctctctctctctgcaagaagtttaatttatgttacaaagtcaagaaatgagactacaacaactcaccacagattatctgacaaatgttctagcaaacttagccaatgcaaatttcaacaatggaggaagaggctttcaaccaaattgaggctatcgattaacaacaagaggaggaagaggtggaaagagcggaggccgtgggaataggcccctttgccaactatgtgggagaagtggccacactgtgacaaaatgctttcacaggtttgatatcaactatactggttctcagcccaactaaaatctctcctaatctcaaaccagtgatccctctccttaagccaatctcactgaaaccagtctcatgcccgatctgtccaatgcatggtatcttgacagtggagccacacatcatatgacaaatgattcacaaaatctcaccacctctgctgactacaatggaaaaaccaaagtggttgtaggtaatggtttctctttacctattcatcacataggcaatagttctgttcccactaaatttcctgcccattctctagtataacaagatatattgcacgtgcctagtctaaccaagaatctattaagcatatctcaatttactaaagacaatatattattcttgagtttggtgattcttcttgtgttataaaagataagaaaaccaagcaatctcttcttcacggtaatctcagtgatggcctgtacaaacttcaagtttcacatccaggccattccaagaaatctgtgcccaagtccctaccttgtgctctcaatcataccattacaagcaaccctgttcttaacaagtccaaagctgctacagtgtggcatcatcgacttagccacctgttgggaattattttaccaggatct

SEQ ID NO: 380176 - DNA, 4884 bp, Cannabis indica
gtaaagtaactaaaaaaaaaaaaaaaaaaaaaagtgtaaaaatagcaacatccaacccaaattatatcaatgtaaaataaactaaaaatatattgcacttaatctaaaaagtatacataagactatttgatgttttgcctatgatagtgaatcagatgcaaggggccttcattcaaaataagtccattgcccataatatcatggtctttcaagatttaatcaagcactatggtcgtaagaatgcttttctaagatgtgacatcaagatcgatctaagcaaagcttacgacactgttgattggtatatttaaaagatttattaaatgctctttgttttcctgccagatttgtcaattgggttatgttgtgccttaaaaacacctcatacactctttcattgaatggaagactatagggctccttcaaagggatgaaagggcttaggcaaggagatcctatctcccctctgctatttgtgatagtgatgaaattctttactagacaccttaagaatgcagccaggaatcctaagttcaaattccacccttttgtaaaaagcttcaaatcatccgtctgtgctttgctgatgacttgtattcttttttgtaaagggttggttgaagctacttcggctctaaagaaagctctagatgagttcagttctatgtctgccttcgtgctaataaggtaagactcaatctacttggtggtgttgctaaagacgtcaaggattgcattctgagatattcatttgagagggtagattccctttgaagtaccttggagtgccaatgagacctaccaagtggagaaaaacttattgtgagattataatttcgaaaatcaagctcaaattgcacacttgggctaccagacacttttcttttgcaggtagagtgcagctgatccatttggtgttacttggtctgagaaattactgaatgagtatttttattcttcctcaaagcgtaacaaagaaagttgggaacctctgtcgagtctttctttggggttccacaggaaatagatctaatctccatctagctagttgggataaggtgtgccttctcaaagcttttggaggtattgagttcaggaatggttctgattggaataaggctaatcttgctagatacttatgggctacctctagtaagcaggatgtgttgtggtaagttccatttcaatagactttataacagcttactagctggtattggaggaaactttgcaacttgggaagagtttttaaaaaaaaaagggacattatgactggaggtgcccatgataagctccattccaatagactttataatagcttactagcttgtgataaagtcttgaactatccaaatatatggcacaagctcagccttccttaagcatagaattattctatggcagtctgtgaactcaaatttattcactcaagacctattagctcggatcattttgaatatctcttcattattgtaatacctaaataggttggatttgggtttgacatttacttgtaatacctaagtcttgacatgacatgaacacgaatttccacccctaggtctcagatctagggtcgggaccgagtttaggtccaatgttcaggtctgaagccagttcaggggctcgatccagggtttgggtctagagtcggcaccgaatctgggttcgagttcaggtccaagcccgaggttgaggtcgggaccaagtttagggctaaggtctaggttcggtgccgtgtccaggtttagggcatggtccaaggcctggtcgaggtcagcgttcgaggtcagtgtcggggtccatgtccaagtttgggtcgaatctaggtcgagatttaggtctaggtccaacaacgagtctgagtccaaggttcacgtcaatttccaggtccgagttaaggtttgaaggttaggtccccaaattagttaataaaaattagttgttatgtattaaataatatggttctcattgtataaaaatttatggtcataataattaatacaatacaaaattttatccaaacatagtgtttattgttatttaatgcaatacctaccaaattaccctataaacacgcataaaatcatgattttgacatcctaattttgaagccaatatttgaacaaaaacaaaaggaaaaaatcgatcttactcgattgaataatcatcccaattcaagaggtgttaataacaagtgatgagtttattttattattaaaaataatggtaaatttggttcattattatttttgtttagcgaaagggtaaatttagttttttagctcataaagcattcatgccaaattccaccattgtaaattgggttgagcaacatagtaacttgaaagcaaaacgcaaatttagtttagagaaaacacaaaaaaaaaaaaataatataagtcaattgggcagctaaagaggctaactcttttatacaagttaaacattcagatccaagtatgagcaaagcaaagctggaagtaaatacattatgtttttcaagaaacaagtatgcagtcaaaagaaacatcattcttgcacaagagaataagacaacagcagaccaaactggaaaatttaggtctggatacctaagcgctccgtgattgatgcttaaaggcctagtccaacagtacgcccatctctcctgcgcaacccagcagtgtattgcctctctaaatccatctgcagttccttttgcttctcggattgaaggtcgccaccttcttgattttctggtttgtgatccactttcggttcgcccttcacaccctacaattggccataggcaccaaggcaaactcagactctaaaattgtgtcagtaggtgaacaaactctaaagggagtgagtcattcaggcagagacaagggaaatgtagaattttataaccgactaaatattattgtaaatggtaagcgtgatagagatttaccatgagtttattaaatttctcttgccgttctctgtcagtaaaaagagcagtatcccagcggtgaccagactacaaatattgaaaagggcatttatcagaaagagcagcatttttcaaaaatggaaagagaagcagttacacgaaagaaaatgatgacctaaatgcttttaacaataatcaagaaacctaatttaatattgatagatactattgaagaatgactgctacatatctaaacctaaagaatttgatttgcataaatgaaaagaagtcatacacatacttcttctgcctttgtggccttcttgtttccccagagcagctttttcttttggtcagtagtcatgaatcccgttcctacccctccaacaaggttcttattcactgggtgtgcaaattagcaacaacacaaagattaagatattaagaagattcaagtagttgatcgataatgtatgatctattggtaaacccacaacaatctaggtcaataaataattaaccataaaataggttgttgtacacaatactaaccataaaattagtgattctgcaatacaaagaaatacagtaactcaaagtatcagatcattaagaatgtatgacatattgacaattataggccatgttaatttaccgaataatcataaagaataacagttaataaataactacatataagagatgccaattctactatcctatgagagaaatttagtgagaactagagtgtgtacccaattcagcagctttcatggcagctactttagcagcatttatatcactagttatgtcggaattagcctgtgcagtcaatttggcattctcaggttgcttcgaagtagactcctttacatcgggtatagttgtggactttgaaactaatggagtaaatgtaaatcagccaaaaagaaaggagatgatattttaacaagatataaggcataaatttttctaacataataataataataccatttttcacactagcattgtcctccttcaagctaaacttgtgtctttttgaaaaagattcttgattttcactattgataacagatttttctacaaactgttctgccgattctccaatacacctatccttgctccttttagcttccacatcatcacttcttcttccttctttggtgagtatcccaccatcactctctttcagctcactcttgtaactttctttactatgatgtttaccatcatctcttctgaaagatgaatcacttcgatgccccttaaactcttcatttgtttgcatccgatcacctctgtaatctccagaactcctaacaaaatcttttttatcatcttgaccatccttttccattttacgtttctcccttctagtatcttcaggatatgcttgccttctgccagattctgccttatccatgctcttataagaagaatcatatttatctcggaaacttttctcactatttcgaaaattatctttagatctataattgtcaaaatgagtagaacctcttgattcccgaccagaacgagaagattgcctatgatgctttctttcttcctcatccgcatgtttgtcatgtctgctgtaatcatcatgcctagaatatccacgagaactcctggagaactgtctatcagaatgtctatcggtatcactacccctaccatagttactcctctctgaatctctgcctacttccctcccatcatccttccttcttgatcgaatttcatgaactcttccaggatcttcccctgaatattttgggctagtgccatagtcatgttcaggactccctacagaaatagaaaagctatataaccaccaaaatgtacgattagcaatgaatcaatacagcctacctataaatttatctacaacatataaatgcactcttaatggatattacccatgaatgggtagtattataaaattttaagtttttatgctt

SEQ ID NO: 380177 - DNA, 2168 bp, Cannabis indica
ccttatgtgtgcgcatgtaatgctataaatcttatttttacaggcaagctgcactcttgaagctggggttaagatttattcgctaagggtggactcggtacactctgaggcctacaaggtccttggggggatgaatagagcaggccaagaaaatgaaggtcagacttttgtttgattactaatagagagctctgccttttttgatatttcattaggttttatgtatgcttgaaagaaaaatttcttttgagcttagtaatcagtcataagtacaaggtggagaaatatagaacttacaacatattaaacactaccatggctgtatgactatctgtcaaattctagttgcttatttcaatggcatcgttacactttaattttatccgtgctccatcatggttgttgtctttttgatgctgaaacagctgattctgcaaacgttgatagtggacaagatggtgttccatcaaagaaagagacagagagaaaggttgctagtcacctttgatcatggtaaattaatttaagtgactgaactatacattctaagccagatacatttgtgcagatctcacctttgtcaacgctggaatcatcttttgaggctcttaatgtgaaaaaattcgatggtgaccacacattctttgtttgtttcatcttaagtttggtgatttcaaatgattggttaatcttaagatgaaatatattttttttttcagttgcatttgcagtggatccactttatcatcaaacatcagcacaatttgatgaaggtggagctaagggtcttttaatgaataatctcagcgtttatggtggatgcaaggtgctttttgattccctggaggtaccagggaagtgcataacatgtgataatcagcaagataaagcaaacacaattgatctttcttttgctaaaggtgtgttgcaattggttcatatttttgttctcggcaagtcctgtcatatggtgttttcagttacagattataaaacagttcaaataaatctgtttttgtgatctatgtacagaacatgttgaacagatggtgctgaatatgcgaatgaaagaagaaatctcacctacccttggaactattgtcaatcgttttgacaaagataacaagaggccatcagattttcattactctgaccagaattcagcagaggatgtttacaatgaggctgagtttgatggtgatccaattgaggactgtgggacctggagttatgatcacgatgacgagacaaccatggtagatgagggccctaattgtgcagattcaacttttccagattaccacgaggtttctgttacacttttaccctgaatagaatgcaattcacctgctatatacatatttcttcatgcttttgatttgtctttgaaataaagaaataaattgacattcatcgtaatttttgcagggaagtgaaccatatacttcccaggagtacgatgctgatgacagatttgaggaagttgatgggtatttgttcttaaatatggggttagcttcaaaacaaaatgcttgggcaggtcctgagcattggaaatatcgaaaaactaagggtatgtatcagtaagttgcagcctgtaggtcctttgctttttttattcttaatttggtaattaatgttgaaggtgttatgctagatttagaggctgatcgttctcaagaaaatgcttctgcactaaactctaaaagaaagaagagcgaaaaacaggtacaagttgatattgatttcacaaaatccttggacaacgagatgccagatatttttgctcctcctaaaaatcccaagtcattactgctacctgcaagtcgagcaccaagtaatacaaaacttcctgaggattgccactatcatccggagaatttggtgaagttatttctgctacctaaagtgaaggtatatttgtcacaaatgtactttgtccgtctctcttccttatcttgtacttaatgtgtgctgtttttattaaatttttacaagtattttcttctttttgcagtgccttgggagaagaaagttctcaggtaacttttacattatataggaactaacaaattgattctcttggatgttttccttttcatttttctctgtcacatttttttataatgagattttgcatatggcggagttaaccgctacaatgtgat

SEQ ID NO: 380178 - DNA, 1851 bp, Cannabis indica
cttctaaaatttggaataaaatagctttatattttgaaaaatataatatataaaataactatcatatatgttctcacatataaaatataaaaaataaaataatataaaataggttataaaatatatcacagatatatgaaataactattatatatattctttaacattggcccaagtgttttttattcatcaaatttcataataattttattttttttaatgtattaataataaatttaaattttttgttataattgaaattttacgtttgattatttttttttatacaaaatatgattatgaatttcttaacgaaattaacgacttaactaacttttaacggtcagtgaatctactaattaatttaactttgatcaaaattaagttatatgcatttatcgaaataaagtaacttatttacaatagtattaaattttgttacaacttaacttataaccagaagcaattattatcatcatctgtatttttaaattatacaagatccgattctaacgtacataattataattatagtgttaactaatttcttacaactcataaatttattaagtaactttgacatccataataaaactaccaacttaactaatttttttaacgatcataaatctattaatttaatattagttcaaattagcttttattgggtagtattaaattttgctgcaacttaacttataccaaagcaactatttttatcgtttatacttctaaattattataacatacaattctaacgtctgtaattaaagttataatgttaactaatatctacaactcataaaatctgctaagtttgacatccttaataaaactaacaacttaactaactttttaaggatcactaaatctactaatttaattttagttgaaatcagcttatagtattaaattttgttgcaaattaacttatataacaaaaataacaatttgatcatctatatttttaaattattgcaagacacgatatgattctaacgtccataattaaaattataatgttaactaatttttcacaactcatacaatatactaagtaaccttgacattcataatgaaaccaacaacttaaccaactttttaacgatcactgaatctattaatttaattttaattggaattaacttatatacaattgtattaatgttgttgcaacttaacttatatgccaaaagcaactgcgttcactgtctatatttctaaatcattacaacatacaattctaacatcgataattaaaattataatgttaactaatttcttacagcttataaaatctaccaagtaactttgacttccttaattgtaccaacaacttaactaatttttttaacgatcacttaatctactaattcaattttagtcaaaattagtttatatataaattttgttgcaatttaacttatataccaaaaagaacttattttgatcgtcaatatatatttctaaattattgcaagatacgattttaacgttcataattaaaattataatattaactaatttcttacaattcataaaatttacttagtaactttaacatccttaataaaactaacaagctaactaactttttaacgatcactaagtctttgaattttatttttgtcaaaattaacttacatatagatgaattaaaatgttgttacaactaaacatatataccaaaaataactattttcattgtctatatttctaaaggaaaatttcatttaatatacttaaaaaaaaacctattttaaaaaataacctcttaattattttatacaatatcatccaaataacactttacccaaaatacccttactttttttttcaaaacctaaaaaa

SEQ ID NO: 380179 - DNA, 5250 bp, Cannabis indica
tagacctggagtattcagatcttttggacgacatgggctcatacttattatgtacttatttataaaatgtagaaacatgatcccgaattttgtaaacatattgtacaatttatgcttattataaaagtttaaatttaaatcttgtttttcatcaaacattttaattagcaaagattgcacaataatttagatagcgctgtagcatgcctaagccattagagtgttacaaactcaaccagaaggtgattggtagaggtagaaccaagaatgattgtacatgctagatctttcaccacctgctcatgttttggcaatctttgtagacctatggtattcaagactaggactcttatctcaaaagtttttagccttacttagtaaattctttatataaacaaacacactgttatatctttcctatagctaaacaaagaaaatggttttttccaaataacaataactttgcaaaaaataaatttgatttaatctattgtgatgtttgagagcactatcatattccttctcattcgaactacaagtattttatcactttacttgatgatcattcatattttacttggatatacttattgaaacaaaaatttgatgtgataaacatttgttgaaggtatttatggaaatgagtagatgatcatggaggtatttatggtttgggatttagaaaattgctctaacggaaccaagcgactttgggtaaatatgttttggctgtagtaacaaaacaagatattttgtaggttaaatggattaacaatgttacttaaaaagtgatagttggtgcaactatgaggcaaaatatgaagaacaaaatgaagagttatatatgacagaatgtcatgagttacgataatataaatatataattagctttggttatgaagttctgagtataaaggaggagaaaaagagctaatatgggcatgtttgggagcgttttaatattcctcgaacatcgaattattctatggttggcgatattggaaagattgcaaacaaataaagacagacttttttatttcaaaatctacaatgactaagtatgcttaatatgtggaagtaattaataatgaatcaatcgatcatttattctttgaatgtcattatagtaaagtttgttttcaggccggtaattgaagaatggttgggtttggattgcaccggtactgatttgaaaatgttgatgatctggtttgagagttctccatttccacctttcaggaagtaataattttttgctttagcttgccatatgtttatcatttttggaggtgtcgaaatattgtgttgtgggaatcaaaattattcatgattttgcttaaaaaaaataaaaaagaaggatataatgtggtgaaaatctttgtaaaaggtatattcatgtatagaaaaaaatttcaggccatttttcttgggacagtttcattaaatacaacttactattgatttaattagcaaaaaaaataaaatatcgtaaaaataaaaacaaaaaactcatattaacatctaattttatttttttatttttagtgtatatatatttttttaaaaaaatttgcgtcttattcatttagattttccattattatttaatgaaaatacaatattaattcttacaagagttagtaagattaggagagagctatatgttaactcaaagcaattaatattccacaatgcttaccacaaatcaagaaagtactgtaactgtaaaacagtattaatttggagactaatatagttagttggaaacatatatatacaagccttgatatatatatatagctcatatatatatctagtaattagttggctttagcaattgcttcagttgtaaaagctggttgttggctttttatataactggggccacttcacatcatttctctaacagattcaccttctcatattgtttcttacttattcatttttcttcttcgtaaattaaaatatgttaatttttcttaaaaaaaataaaaataaaaataaaataaaaatgttaataacgtggatataactaataatatatatataaaaaaaaaaaaaaactatattagtcttatataattatttactaataaatccagatcatgatgatctcatttcagaataaatcatctcattattattattctatatatgattattagcacataaacatgcctctcctgaaattataatttaattaattaattatgctcataacacaattagtgagtatatattaatttcattagaaatgagtatatatatattgtaaagtcagctcttaaagttaattaattttcaatattataaatattcgaccgtcgttaatatagctatttcattcaacaaccaacctaattttttaaattatcatttgtcccaaaaattctatatatgaccctcaaatttatattatttgtttaaaaattaaatatttttaaccaatgaaacatttaatttcttcaacataataatattatgtatatatgataaattaattctgagtagctgtaacatttataattccatcacaatatatttatgcacaccaaatcattagctcatatcaaagataattttaatgacaacacctattgctttccttcttattcctatataaatacacaaccaaaattcatttacatatatatgtataatatatatatcatataaccaatatggcagcctccggtaccataccaacaagatcaatagggaggctgtacaagtggcaggtgtccgaatcagacggtggcgaatcggcgaggctgctagtggggcggcccgaaggcggtggaataagggcattgaagcagcctaaggtggtggatagtgtgtcatgtaggcaaatgtttttgaggagttacacattttccaggaaagaaagtttttctgagaaaaccaaaaagtgtctaggaagagtattagtgctctttcggcttaaagggagaggttttcaggacattaggaggccgaggaaaaggacgaataggaaggcgacacctaagcaccgccacgaaatgacgcctaatgtaggagtgaaagaggcattgtctaagtttcgtaggttggtgttatgttattctccttcaagatcatgtattattgattaatagtactttttgtgttgattattgatgatgatcaagcctaataatttgtactcataactctgccttttgtgtttttcatcatttcaattttgtgtgatcggttgttattattaaagggcaatttctacaagtacatttaggctcatatttggatatcaatcaacaaaaatagtgtaatattgtttgttaagtgcaatttttaatgttggaacaagagagatatgtaaactgttcttttttattctccctttgccttataacataagctaattaagagtactaatacacttgtaatgtcaaaaaacaaaataaaaaattatgtgtttacatatgtgagttaagtatactcatatggttactcaagtaaatgaagcttaatttgtttggtacaatttgaattccattcacttcagtatctatgccaaggagtgttaattagaactaatacttttagttcataccaaacaaaattgaaaagtagttagtgaaatttttccaagtttttaaacactagttaccaatttcttggccggttaattagcattaattaacaaaacactgattaaagtttgagtgtaaaagttactttttattttaattttattaaatttggtaatggtatcacaataatgtgttattaactttctcagtatatggtaatttatagttggccacttggttgaagtttttacatgaaattgttgattttttaatatgaaaaagaagtatttagctgcagcttttctcaggttcaaagtatatggtaatcaattattaacattttgaaagaaaaagttatagcaacgagttaccaatttttccaattttagagtgtattgtatgataaccaaatattaatattcgtagtaataaaacaacaattagttactaaaactccaaaaacaagaaacgacaggtaacctgttactaaatttctttggtggcaaattctaaaggaagccctcaccaaaactaaactccatttctccacattaattggtgtttgtgctaactatacaactctgaaattgaagattacttccatctactttggaagtgtgaatatagtaaagccatctggtttggctgcttatgaagccttaaattggtatacttgtagtactgaaatactactattggtgttgtgttgaggaatcataagggagaatttacaagggtgcacagtgcaatacacatcagtaagattgttcttacatgaatgttattatgtaaagtgattcaaagaaggcgatcatggctctttcaggactattttggagcttcatttgtgggtcctcagaacatgcaattaggtggctcataacattgcctcttaggagtgttgttcagtgaagttagttgtattctgtttagattgcttttggttagtcggttagattttttggttagttcagttatgtcttagctgtcataactaactacagatgtaatctttctttgctctcctttgtatatctgaagactaaaactcaagtgttaagaccaaaataactaagaccagatataactaacatatcagtacaaagatttattctgttaagatctttgtctagtcagcattatctttcttttctcatattctaggcctaatcaactcaaagatgtattattagtaaggggtgttcatataattctcaatctgtggttttaaaccccaactaatccggactaaactatttgagaccggaccaaatgaatttggcgtgaatcatttgatcaattcggaccgttttaaattctctgattcggtcacggttttagaaaactcggtagcaatttaaaccaaaccaatatgtataattattatatatatatttacttaatatatttttttagacaaaatgttgatatttgagaacaatcttaattagaatattgatattgagtttacattgttacgataataatttattattattatttatgtattataaacttattaaaagtaaaaaaaatactgaaaaagtgaacaattattgtaaaaaaaaattagagcaactacgaaatacaaatcatggttcgaactaaaccaatttattttttagtggtttcatttgatcatttcggtttggttttgactttttaaaataccataatagtggtttagtttgaa

SEQ ID NO: 380180 - DNA, 1837 bp, Cannabis indica
ggtgaatttttagttgtttcatagtaaatgaaatttttatagttattatttgaatgactttgtacgatggtttttcttttattccttttgaggtcttttttttcaaaaatattttcatgggtactgaatggatattctctcccaccgagtaatccttgctctgtctcctaattttatttaaacggtatagggtgaatttaggattcgggtatgggggtgggtgagcgatccccggccacaccatgcatgtcccgtgtatgtttctatgggtacccgataggaatccttctcctactggataatttctattccgtcctcgctttaatttaaataggtattggaacaggtgtaggatgaatttaaacagtgggtataataggggtggggagcaatccccgccccaaccccgcccagtttacatcgctaaataaagtcattttcttcttaaaaaaaaatctaaaataaaatcactggctcctctcgctctctcttctttctctctaaataaacatactttttccatgtaattagcacgagcatgaagtgcacgctagtgttatcaaattcaataatcaaacttttgcttctgtaaaaggtctggattaactactaaatgaaagagaagacagacagacaaagaaggttaatttatatctatattaaaaagtttttggagaaaaaagaaattaattagttataaggaacctgaaattccgatgtcatagccaaaaatgaggccactagaggcagcaacgatgcacgtaatcaccaccgacgttgttatcctgctgtgaaagccactgacgggtccgtcaacggctagaactccacctccagccatttttctgtgctttaattcaattgctttgatctatatctactacgtactaatatatatatatatatatatatactaagtaaacggagttggactactctgttttcttttcttggttctaactttctcagtcagaatacagagtagagtgagtggttactaccattcttaaatgattcaactttaatgtacagacttgactttgggtggtgatggtgatggtgtaactgttaagctaaaagtaaattgttttatgaatttaaataatactttactactaattacctacttgatccacttaatcaaatacaaaatcacatgcttagcttagctacctactctatctattttaaccattatttattattagtaagcaaataaatttgtcattttaagaaatttgaagaaattaaattaattaagatacctaattactaatttcaacataatcaattaaagtgtaaaccatcaagcaacccagcaatactgaaagaaaactgtaaaaaataacacgagtacaaaacctactgaaaataggtggacaagtagtaggatttggacaatgataatatcataggtgttaattaacacaaatattgactcagtctttaatgatttcagccatatattatgagaagaacaaaaaaaaaaccctaaaaagtaatgtatggatcaaattaaactttgggtttctaaattgttttaattaaatattcttttaataatatacgaatttaggtccacccagtttagggttaagtaactaatagtcaaaatgttaaagactggtggttggacatgagctagaatagtaagtaagcctcatcagtcaatcccaaattcaaagggaaatttcaatttctatgagcttaaataaaagataggtgggttttatatatatatggaatacttcttaatgggtattacccataaatgattactaagcaaatttaactataaatattaattttaaaaatatcaaaccatcgaattttgatc

SEQ ID NO: 380181 - DNA, 6281 bp, Cannabis indica
tatatatatatatatatggtggaaaacttaatgatgatggtaactagtaactatatcgtaattaattaattaaaagtaatagtgtatttctgataacaaagtttatttacggcataaatacttaaattcaattacaggtacatatttaagtttaatggcacatgacaatacttaatttatttatatcgatcaagaattaaacttaaatatataccaaaaaaattacttttatttatgatatatgtgtgttttaactttcaactaagtttttaggaggggtcgtatatatgacattttgtcttatattgtctaatttaattattattacctaattcaatattctgttattgatatgatgttaacatgattttgttggatcatgcatgcatgttgaaccttacttgtttcatattcatatatagtgtatatgtagtcagtagtagtgggatatatattcacgtgtatcttctttttgttttttttcttattcttttttcttttagaacctaatttaatttcaattggattatattagtgcttaactccaaaatcatagaaatttgaatcttttaattgctatattgagctactatatagctcatctcaaacaaagtggttatacaatattacttgtatattatgttgaggatgactctttacaaactaggaggttaatttagatggttaaatactttgaatttttaaaaatattacttattaagttaatttaaatggttagtaataaatgttacttcgagaaaagtacttgaagtaattttcttttttttagttggacttaacctcgaactaggaagtagttagttttatttttgttaaaattcgagagtgaaaatgattaaagaaaactacaactaaagtataattttataatccatctgcgtattgcctcatttcgaaatgcattaagtgcataaaaatggctttgagccttcaactaacttcttaaaaagctttattcatattagtgtgattggatttttgagtcatattttgcttagacaaactcatggagaattttagtttaataacaagatatcataatataaaacaaactccaaattcaagtttgaggaagaaaaagaaagaatcaaaatgcagcttttttagcttgattttgaaacatatctaaccttacaatatctttagagaagtaaaaagtttgtaaaatcaaagagggattcgaatttcggacctcatctatcaacaaactctcttaagttcaacttttagcataataaacaagagaatacttttagttacatcaaaaagatgtctttcattttctatttcatattggtaaagttcaacttgatcaataattatttcaagtgagcaaagttcaaggttacatactcttctacacaaaagacctaacattcaagcatttaacttagacaataagcataaaaacacacactgataatataacaagatgaagtagttgcaaccttgccatctatgtacaaaaatcccacctcaagttgactcataaaaactcaatcttcggagaatgcagcgttgtattatttcttaagttctcagtttcgaacatttcccaagtcttcaacgaggctgttggatgcgaaaatgggcaatttttgggctcgtcttctgaactggcttctcacggtagcttacaggcattttttcccacttaacctcactttctttcattgattttaacaagattgctttgacatccttttgacctattacaccaacaaattgttcatacaaatttggagatgaaagaatactaaatttaattttcacaacaataaactcacttccttttaaagcaaaaaagcataagacataacaaataacagctttatcatttcataacattcaaaaccagaattcaagagctcaccatcattaggcttactaccctttttgttatcagaaggaggctttagttgagtttctcctccagcttcatatgaatggtcagtaaagccttcttcaacgaaaccaagatcgaatgcatcgttcgccatatcatctgtgtcgaaagcatcatcatcattatcataggcattggcaccaccatcaaaatcctcctcctggttctggcttagccaatagtctctaaaccagggtgaagttttgactaactcccaccattcaggggagaaatcttccacttgtttcagtgcagctggaacaaacagaggtgcatttggattcaatgatgatgatgatgacctttctcctgacactaatgccatttctctacaacaatctcaaaagtacaaaaaggttaattattaacagaacaaattgattcgaccataaaaaccttcaatttcattatgaaactaatcattgctctaaatcacttcaagagtgtcaaaaacatgcatcatagattgttgaactgagtaggaaatagcaaaataacctcaatgattttagactgaggttcattattaacagaagtaatttccaccatcaaaatgtctctactaatcattgctctaaattatcagtacaaatatgtcaaaaaatgcatcataaattgttaaactgagatggaaattcaaaataacctcattgattttaaactgagcaccaccatggtgcacattttgcaaatagatacatataattatatgtattattgggttaataactattttgaactttgtattttagtaaaagttacaaattgtaatttttttattttaataaataataaactggactataaatttgttaataaaatagtatagatagtaccctaagctcaattttcatctaattttttttttcttaatataatcaacttgaagataaattgttgtcctaacacttcgatcgaattcagctcaaaatattattttgtactattttaaaaaatacaaaatttaatttattatttaacaaaattaattttgcaaaacataaaatctaaaacgatatttacccttgtattatatatccttcccattaagttatttttaaaaacacttagagttcatttatatatatagattgagaatcatcattaatattgcaaaggttcattattgacaaaataaattccaccaaaaaccttcaatttcactatgaaaatgtctccactaattattgatctaaatcaacactaatcattgttcattttgtaaatatataaacatacatacatatatagatatattattcctttccttttaagttatttttacaaacagttagtatccattcatataaagtataagaataaacacaggacttagatcactaaccaaactaaccgatcgctaagatctatacatgtttaatgaaaaaaagaatcaaacttttgatttgttcagattcatttttgaatacccagaatcatgaatcacaagatcttcaacaactatcaactttaacaacttttgaaataatcataatatcaaacatgaacagaactgtaacaaaaaaaaaacaaccaccttaaaataatgttgtaccttaaatcaattgttccttagatcttggacataaaaaagtagtagtactggactggctctgattgatctggtgtttgtttaagtacaaaactccaataatatacaaaaatatggataaggattcagagtctgacacagacagtgaagttgtaaactgaagaagaagagcccatgtgcttttacaaaagcagtttatatattagggtcagggttgatttggctttttgatcaacggttgtgattgagacaagtgttgttgtgtttggtttggtgtcaccagttactgtgttgtcactgttatacagatatttttgtaaccagtgtatgaaaacgacatgtcgttttgtatatatagacatgtcgtttttgttatgttttgtaacttatgtatgaaaactacatgtcgttttctgttaatatacaattatttgtatctctatctgattgttttgttatgtttgtaattagtggtgtaaatattggtcaaatttttttacatgtctcgaaattaacacgagttcgaaagacatgagtaagtctacgtacaaaagaatatggacttgggcacgatacagcacaatgctataaattggcacgacatgatacgaaaaatatgctcttaagcacgacacaagaaacacaaaagatacgatacgtaagcacaaataaattagtccaaaaagtacgacatacgacacgcacgaatatactttttctttaaatataaatgttatcaaaattttgcatgtataaaaatatcgaatttaactgagaacagaagttatagatgttatgattaatttttttgtttattattattatttttattttccttttacttattttatttatgtatatcgagtttgtttagtaggccgtataagggtcattttgtattaaataataataatattatgtttaaataaaataatgtattgtattaatttaattattaagattaaaatttttaatataatgtaaattgtattatttaatatataacaaatgatccgtattaattagctcgatttataatatttacaaatgatctgaggtcaaccccaattttcgatccgaatctagtgattgggttcgggttaaggcccgggtcctaaaatcggacttgaacctggtcccagaccccgaaccccgaacctggactataactaaaccgtggatcccgaactccaaactagaatcggagtcagtattaggatcgagtttattgaaaatatattataactttacacaacttaacaagtcaataccaaatataatattgtatcaaataatactatataatacaatataatccaacacaatacaataaaatacaacttaacaaaccagccataactatttaaattaaaaacataatgcagctattaatagaaaacaaaagctgagtttattgctttttaataatcattttccaatattagctatcaacaatattacataaatagataaacaacacatataaagagctctttgtttttcttttttctgaaatcataaagagcttttatttttctattatttattattaatatatataatttcttcaccaaacttcatggaactgttgaacctgcacataatcaacgcaaattcatcaaaatcaactaatcttttatctcaatgacaataaccaacaaaaatataattttatcgagaatacataattttagtaactagttacttagtacttacttccacacttggttccatgaggaagaggtctaccacaagaagaagcaagattaaagaccttgttcatgtccactaatccttcgatttcctttgttatgtgttgacaagcacaaggaatgtccaccgtcctcactgcatcgcaacatggcgctgatggttttatcatcggcgtccctttctgcacgtaaattgcacaatgtgttattagtccttgaaggtctccttgacacccttcggtcgctttgctcataaacaacattgttgtcaccgcccaaatcgccaaaatcatcaaatttgaactcaatctagccatttttaaaaataaatataaattatgatatttgattttttttttatggaatagtgtttgtttgagggtgtttatataggaaatggaaattggcgtttttggggtttttttattacgttataaaattgttattgtatggcatgatgtttcatgtgtgaggacttaattttcatcatcattttaccaaaaacgagttttttcactctctttgaatcaaaaaccgggaagaaagacacatgttatggtaagagtaaggaaatattattattattattttttttttcaaaaaggaaagaaaattaataaattttggttttataacatatttgtaaccgccacttaaatgacgagtccaaaggacgaaaagcgtgtcttcatagtcgtgtttgtaacgccatacaattttaagagtgttcttgtaaatataccgtttgtcacaaatattattgcgtttcaagaaaagagtcgttaattagagaggagtcatttttaggaaatttgttgttgtacacaccttttacactggcgtttggttggaggtaatgaaatggaatggaatggaaaggaaacaattttcattccattcctttgtttggttgcattttaaaatattggaatgacattccaatagaatactctttccaccattttggtggaatggctattccattttaaaaagaaaggaatgaccattccaatgtaacaagaaaaaaatttaattattttttatcaattttttttatgcattttaaattttattccattccattcccatt

SEQ ID NO: 380182 - DNA, 5976 bp, Cannabis indica
cttatatttttatttcattgtagtccacaggcttacatcaagaaatagatttacaaagaattacatataactttagagggaaatgtcgagatgtcggataccccctagcctattggtggtaacattgcaaatggctgctttgcaggcatgagggatctctgatacctccattctctttgagttggtatgttccacttcccactttcgtgttgtatctctaaggtccttccaagttaggcctaagacccccactcaagataagatctccaacgccaaatgtacgactcttgaatttaacattgaattgttaggcaatcttgcattgctacatctttagttgaacttgtgactattcctagaactcttcaatcaaatataacagttcttggagcaaagactgattctgtgttggattgtaagtgtctcatctgtgagaggaaattatggtttctagtgggattactacttcacacccataagcaattgagtacggtgtgtgccccactgatgttctctctctctctatacctagaggacttgtggaagctcctccagccaatgggctttacaagcttggattttttttcttcaatgttatctttaagatcttattcatagctttgagttgtccatttccctatggtctggccaccgttgagaagctcttcaagattccaagttaaacataaaagtcagtgaagtgatcactgtcaaactgtgtcccattgttagagacaatcttgtgtggaagtccgaaacgacacatgttgttcttagaggtgactgtattcatgggctttgcctcaattagagaagtagtcaacaacaaccatggcataattgacaactttgttctcgatggggagggatcctactaagtcgattccttaaacaataaaaggccacggattattcatgaccatgatctctgttggtggcactcgtggaccttggcatatttttgaaactgttcacatttccagacattatgcaatccttcttcatcatgggccagaaatagccctaatagaggatcttcttggacaggcttggtccagaagtatagtctccttaaaaacctccatgaacctcgtggatgatagcacttatggcccagaagtatgatcatatattggtgagcctgatactagacctttcgggaaatatctttgtccatcaaaagcttacccaaacttaggaattggtggatggtccaatccaagaataagaattattagcgatggcatttacccctttgcattaatacttggagcttctaagtgtcctataggaaccactccgtactgtatgatctctaggtctgtggcaagttttgttagcatattcgtgaatgatttttggtctttagggacttagtggatgttgtagcttttgaaactttgcagcagatcctgggacatcatcacataggtataaattttttttgccttaattttatattctcaggatatttagtttaccaccaatagggaatcactgtgtacttcgatacattaggctcctacttccttagccaatcataatcctgctagcattgcttcattttttgctttattgttggaggtacgaaatttgaaacggagggcactctggagctgatgtccttacaaagaaagtagcataactcctagcccagctccctttttattcaacactccgtcaatgtagaatttccacaatggtaactccgggactggctcatccaggaggtcacttaatctaaaaaattccagtataaagttagctagggctttccctttgattaacacccacggctggtattggatgttaattggctaagttccatatcccattttcaatagcctactggatgactctaacttttgaagcacttggcggagatgatggttggtcagtaccttaatggggtgggcttagaagtagagattatctgcctagaggcaatcaataagcaaacattcaacttctcgatcatgggatacctagattctacaccaagtagtctttcgcttataaagtacactggtagaaagactcttccttcctctcgcactaatgcaacattaatgtcattattaaacacttccaaataaaggtacaactcctcaccttccaccggctttgataaaactggagccttagtcaagtgctccttgagtttctagaaggcttcttcacactccttagtccatttgaattttattatttcctcacaacacattgaagaatgggatgcatttgtccgtggactttgaaatgaatttgttgagggatgtgattcttttagtaacactttgcacgtccttgtgctttttgcaggatggcatgttgatgaagaccttgatcttctctaagtttgcctcaattccccaagagctggtgataacgcctaagaacttcctggaacagactctaaatctacacttttcgggattaagcttcatcccatatttttggagtactaaaaaggcctcctcgagatccgtactatgctctccgaatgtcttagactttaccagcatatcatcaacatatacttccaaatttctccccaattggtttttgaactttattcaccggtcgctgatacgtagctctggcattctttaatgcaaacagaatcactttgtaacagtacagcccttctctgtctagaagctggtgtgtttttaatctataacattcattttaatttagttgtcactagagtacgtgtccatgaagctcaataactcgtatccagaagtggcatccaccatctggtctattcgcagaagggggaagcaatccttggggtaagcgttgttaaggtctgtgaagtcaatgcacatcctccaattccattggccttagggacaaaaactagattggctaaccacactagatagaattattccttgatgaagtcattcgcggtcaacttatccacctctgcctttattgcctctgcccttactagatctaagggtctccgcttttggtaaactagttttgcatcttcattaatgtttaaggcatggtaaattgtgttgggtttgatccctgtcatgttagaatggctcgatgccagcacaccctgatttctcgtgactatgtccacaatcaattcttcaccattggtagtaaatttctccccaccttgatggtcttaccagggtataaatcgtagatttgaacttcttcaacatcctttcgtggctcaataaccctttcgatccccacttgagggtccaatcatcttcaaaatcctccttagcttctccttgagtctccaatctaggagaaataattgcttcctcttagaccataaacatagttcggacgaaaacattgtagcaactccttgcacttttctaatcacctttgactactccaatgcacccattatcaaagagaaacttcatgcacaagtgtcttattgaatttactactccaaaatctacaatgattggttgtcctcgtatggcattgtaagctgtgggacaatccacctctacaaaggtgaaatgcttgaaagcgcaaacattattttctcctttgagtgtgaccgagagctggagttttcccattggcatcagagcatctccattaaatccttgtagttgaatgagacaaggtgataggtttgcctccgtgagctcgatcacctggaatgcaattttgaacagaatgttcactaagctccaattgtccaccaagaccctaaaaactctcttttttgtgatttgggcttcaatgactaaggggtcattatggaggaagtgtacatgtttggcatcattcttcgtgaacgtgatagaaagttcatagttcaaggacgttgggctagtgattgtacaactatgcatgtttccccttctccatctaattccctcaagtaccttttttgggaatttcagtgcttcccacaaagtgtggtcctctagagatcgtggccacatgttcgtctaatggtggtagagctagacctgaagggtatggatttcccagtcctgaagctaatatagctaccgcatctggagctgtcagatcagggagtgctagaagttgtgatacgagagttgattatgacccactccttgtggatgatttatggtaccctgttgtcttagaacggtcaactgtttgtgagtgacccctatttggtatagataattggaattcgaacccattgccctaagtgtcttcctcttgccaggattttgatctcatccttcaagtagccacatttaattgttgagtgtcctacttctccatggtactcacaccttttacttagatctctttgaaacttccccccttgaggcatccgtgggggttttctgttgtggatcatgttgcaggttgctttgtacacattctcttgagtatccactaggatggagtactctatgtactttggtacatactctttccttgatttctttgaattttcactttgggtttgaccttttcctcctctcttgttctgagaatggctcatgttctgttctggaacttccgcttttgattgtttgagagtgatactacatcaagtttgcgtcgctccataccctaaaaaattggtttacgtaggtgtctacacagatgtgtaatgtccatagactgccagagtgtactgtgttcagggaacaggaacttgtgaggtaaatccagaagctggggcagtaggggttggtgtcagagggactctgaatgctcgcatataagtatcttccaaattaattaagccttgggccctcgccatgaactcgaacaatgtctcaacccttcttctttgcatttttccccataggagggagccaactgcaagtccaaacttcagggccacaagtttcatatcatcggtcacctttgtctgagaagccccctccatcatccgttgaatgaagtttttcaggctccacttgttggttactatcaaaagcgtaactatcaaaagaatggttactccacttgttgaaaacattgcagtgcattagcttcaccaaagcattgagcgttgtttttttctaacccgggtacagttcactttccatatccttaaacaaattgtcgtacttaccactaccattcaacagggggtcgttgaaggaataagtagcagtacttgtatcgtcaaaaccagaatcttctcttaaaatatcatccatcacatctaccatttcttcttcatcgttgtctactatttctacagtcggttctgtgaacgagtccccatgaaaataccaagttgtgtacgatcgttggatgccatgcataaacagatgtaccctaatattatcaagtctcaaacttcatattcagacatctaatacaagggcatcgagtaacttcagcagaatttatttgcattcgagaaactccaataaactcatctacacccctacgaaactatacacattgtctgtttaaagtcatctacgctctgccgctcaccatatttctacataatataaaaagaggaaattcaaaacaatgttgaaaatatgcaagtgtcctaatccactttctcactccattactaaaagggaaagaacctgttaacgcagatttttgttaaccaaatttgagcctcaccatattgatttaacatagaaaaaataaaagctatcaaaataaagaatatgaacactaggtttttacgtggttttgcagttaacattctgcatagtccacgagtcaatcttattcagatttctgagtatttttcagggcctctttcatttgagtttttttttcatcccctttcttgatcttgtctgccactatttataggtacatagtgggaagtaatttaaaaaagttgacactaatcgctacagcaattatttcctcaaatcatgggattttacattgttacattgtgtggatgtgttacttagttttcttgtatcattgtcatctcattttgttttggtagttttttaggatttaaactatttctaggttcatattagggttcaggcaata

SEQ ID NO: 380183 - DNA, 2459 bp, Cannabis indica
aggaaaaaaataataaagaaaggaaaagttttaagattgtgcaacacataatttgcagatctgcagagaaagaacttctccataatcagaaacccctaaaggctaaaggggtcttgcattttagtttgaagggggtgatcaaaaccatattgaatcaataaaatgaaatcacttatttttattaatttaatgaatgatcaaacacagaaatcatattcaggcaaaaaggaaaaattaccttgaaaaaaatatgaagagatagagcaacccagaaaccgaaaatgccccaggtagcaagcaaaatgaggcttataaataaaagggttatacaagagaggttaggctttaacaggtgtaatgtatatgtacgtatgtatgtatgtataggcttatggcgatgaaaccgaggggcagagaagtagagtgaaatggggttggggttgaaatgagagagtttattacgagagaggttgacggagatgaagatggaaagtgtatagacttacatatatatatagaaaaaatcgttggagttgttggttttatttatttattttcgcaaatatatttattttgtctttaaaatgtgctctgttgttaacaacacagcaaatagcaatgacaagtttcgtactttttcttttattttctccacttggcaacataaaatagaaagaaaaaacaaataatagaatggtttgaggacttccaccttcaatttttctttttctaatagtttgtaagggaatatgtctaattttgtgatttgcttggtttttttattttgtaaaatcaatgtgactagttattttataagaccaatgtgattagttttttttactaccaatatggctagtttagtttgtaagactactattttggttttgttcgagtctagggttggagtctggaatttgggtcagggttcgagtccgagatttaaggctggggccgagttcaaggtcatagtctaagtttgggtatggggtttgatctaaggtggaatgggttcatattgtggtatgttatagaatattgatttttttaaaaaaaaaaattaaaaatagttttaaaaaatttgagtcaaacactattaaatttttaaaatgacaaaaaacggttttctatttttaaaaatataattctgaaaattgtaactgaaaatacaatcaaacatcctctaatttttaagattgttttaattattataacataacaaagagtaaaatatatagggtggtttttttgttgattataattttagattttttaatatataattaattaaaattatcatatataatattaatatgatttttttaaagttttttcgatggtcaaaatttggagaaaaattggctaattattgtacatttagcatattgtcacattaaagtgccacatcaggcaaagcttgaaggctgctatctcaaaaggtcttgtttgtgacattagattacagtttaggaaaatttttaatatcatggatcatttagtaacactatctgatttgacaatcaatttaaaataagagaatatagataaccattatggtcaaatttgagtgaatttgaaagattaaattgtttttaaaaaaattaaaaatgaaaaacactataacatatggaattcctcatttactagaagaaatacaaacatatttaacttaatttaaatgtgggattatattataaataaataaacaaacaaagttgtcctttaagaagttaaaaaggtcaaaatgtactcaaaccaaccccccaaaaaaaatataaataaatgaaagaaagaaggaagcaacccttcaaagacatgaatttccaccacctaacctaaacacacccaccttcgttgttgcaacacgtgataatgttaagcaaacaaattatgtttagactttagactaaaccaactcacatatcattcatataacatactatcattacttattacttctttctttccaaattctcaattataaattctaatacatacatacccctaagtctcaccaacccatgaatgactactctcttttttaaatttcaataataaaattaatggatgtccaaaatgaatattcctcctttgttcctctcctcttttgagaaacgttaagtttcaatctttttatggctgccatgtttgaatggtcttctcctttattggacataataatatatttatttatttttattaattaagctacaaatattgaaccaactcaaaataacatcccacaccaactaattcttacccgtgaggaagtttttggagcccatgatgatgcatcaaatggttaaacaaaaaggtagtgtgtttattaattagtatgaatgatgaggttggtaaataattataaattattttaatattagctatcaaaaaacttatatattattttaacattatttattaaatagtttttttaggtctaatctcatcactctctctctctc

SEQ ID NO: 380184 - DNA, 2128 bp, Cannabis indica
ttatatatataggacatgtttattataagtacacttttttgtacgtatggtagggacatttttcggatccttcatttcattaataatcaagggtaagaaaaactttagaaataccatagaaatagtgttgttcaacatgtataaacatgggagcccgcatattacatttactatttctcgaaaaaaaatttactgttcttaaattggtgcgctctttctattcttactaattgtttcaggacacatcatatatacctgttttacatataatttagtttttatcaacgaatttattatatgttaaataagtatagataatgcgtactaaaatagttagtaggacagagaaagcaccttaatttaagaacatcatattttgctatttctccctctcttgtacgcttagttttttatttatttttttaatatttatcttaattttgatatgcccaacaagtttgaatcaaaagtattattctttttccttttttttttttgcttgctactccaacttattatgctatacgaggcagagaatttgcgaagcgtgctcctttatctctattttcattaaggattttaattatattcccgtttattcttcattgggaacgggacagaaaatttcctaatgtaaaatgaagtttattttaaaaatttaaatatataaatttttaaattatatcaaaattaaaatattacacattatttattattcaatatactaactattataaaaaaaaaacacaacttcaaaattatagaaaatatactaaaaaaatacaaacacatattataaaatataaaatattaataaaaaataattaataaattaaacgggaataatattcccgttgcactctattcttcatttaaacagagaatccctgcttcattaagaacgggtccccacggggtctatccctataagaagaatatgcatccctaactccaacttgttacgctttgattcaatttttgttttcttttttttctattaaaaaaaatctagcattcaaaagatatcaaaattatttttggattttataatgttaagactagttttatattacttctttgccccaaaaagcatttcattgacaaggttctagaccaacttgactactaaggaggaattgttttaaagttattgaaaataaccattaaaaagtaagtaatattttaaaaatgggtaatatcgatcatatctaaaaacaatggagaacaatttttaatgtttaatattaaatttatgtgcttaacaaaaatatatatattgagaatagaataatctcttctcttttattttgtttctaattttcctttcttgtaaatcttattttattttctaagtgagtgggttttatctttccttgtgattttaccagttatacataaaaaagtttcaattgaaaaaaaaaaatctcaaccaaattaaaaataattttgataacttagcaatgtaaatatataaaaaatcatagtataacaaaattatgaatttcatcagtattgctttgtttatttaaaatgaaattgttatctatcttttttttttatatacaatgaaatgttgcaccacaactccatagacatggaccgcgaaatttgagcatcaaggcaaacttatacaaatgttagaatttaagataaagtaaataagattttatctccaaattaattgacaataggatagaaggatgagtagcctattcatcttatatatgatattttatttttacacattaacaatgtgagataaactctaataacagccctaacttacacattaacaatgtgagataaactctaataacagccctaacattgagacaagcacacctcatgcaaatggcttgttgtcaatgaaggcttggtggggaagcttccatgacaagccatagaagaaagaaagaagacaaaaaaaaaccagcttataggagaaaatcttttcattttaatggattctttcaatttagtatatggagtagagtttgaaataaagataacaatatactaatacataatcaagtgaaagtacatttggttgagattataggattttcttaaatcaattgtgatgagtgagtagcccatgtcttatatatgactctatactttactattt

SEQ ID NO: 380185 - DNA, 2416 bp, Cannabis indica
aaaaaaaaataaaaataaatgattaataagaaaataataatgaatatagaaaatagaaacccaacttccacccgcactcactcaagacgacgtttatctcccacgcgcacgtcaaatagtcaaatggtcaaaacacagagaaaagagttaggtgtagtacagactacagtgtaccatcactttaaatttcaaccgttggatcaccatcatatagtacaaaaatcaacacgtggacccccacagattctcgggaacatacgatggggttgagttgcctaaatttcatggcctagccaatcaaatcaccttactcaactgactaaagcaagcggttaataaccgtaggattaaaatccaacggtgagatcaactaatccaatcatgtatggacacgtcaacatctagaacgtgggacctgtcaaatagggctttgttggattggagttacttgtggaggttgaagttgaagttggacatgatccgatgtgggtgacgtccggcgatggtgacacggatagttcggtggtccctcccgtagggtagtagtgtatagattttgatacgagatcctttggacgaataggaaaaggacacgtaaggatgggaagtgaaaagatattgataataatatgtttttgggtacataattttgtgtgtgatttcctggttaaggtgacgttggttccgatgtaattgtgataggattgatagcgagtggtctgatcctctgacccacttcattattacattttactttcgtttttttcatcattattagcaccactttacacataaatacatgattaattacttgtcttaaaatttattaaagtcaaaaaatttattatgcactaaaaactctgatttgtaaattttggctggctccatcttatatttttaaatttttattcaaaataccaatttttattcaaaataccgcaactagagcccaggcttgaaagacccagacctgaacatgaacctaaaactcaggctcggaatcgagacacaaacctagacctagatttcgggactcgtacccgaacccaggactagacctggacccagacccaagacccaaacccgaacccggaccggacctagacccgaattcgaacctggacctaagactcaaatccaaactcgggagccggacttggactcgggtttcgggacccagacccaaactcagagctatacccgtactcaaacccggacacgagacccagacttggacccgggcccaaagccaaacccgaacctaagacctaaacccgaacccgaacccatatccagacccagaccaaaacccagacccaagactcgaatcgagacccgaagccgagacttgagacctgaacccatgcttgggaccaggaccttcagtgttgtcggtagtttcagtaaggggaccggtggtagcacttcaaattagaaaagaaaggttgagactttcaaatcatcggtaataaataagacattttggggaaatagagatagctgtcaaggtttgtggtaatatgttcatattgtactttgatgcctcctcaaggcgaatgccgggctaagccgtgtttaagtgtggtattgtaggccactttatcaaggattgtccttaagtaaagaaggaggaacctaagaagagcaataaccagaatctaggtcgtctatttactgtaacttaggctgaggctgaagcaagtccgtcatttgtgacagggtttggaaccttattactaactggatatttggttatttctagtagatggattaggtcattacctttatggattaatggttgtgaattaggcactaacctaattgagttacaattgagtgacttcggtataatttggggaatagatttcttgcccaagtacggagtaacaattgtctgtaaacgaaaaatggtggtgttgaaacctgatagtgccaacctaactatgtttatgggtatggtataagaatctcgtatacctaaaattttagtcttgaaagctagagatctaatgcaaataggttgtatagggtttgtagttacaattgtgaatattgggagacctacaacaattagatcttaaaatacaagacttgggtgtgagtttttggatgtgcttttagaggacctacctagattacctcatcataaagaaattgagtttgccattgaactagtttcaggagcagaaatagtatctaaagcatcatattgaatggctcttgcggagttgagagaattgaagattcaattgcaagagttactcgattttggattcattaggccgagtttttctaaaattctattttgttaaatgataaaatagaccttatatattctaaaatggtaaaaatagaaacctaaacttaattttcgacaactttttttttaatataatcaacttgaagataatttcta

SEQ ID NO: 380186 - DNA, 4118 bp, Cannabis indica
aaacgatgccatggttccatcttattcatattcacttctcttattaaatatttgtttcttcaatttgtacctttaaccttttcttctgatgttgttttcacattacctttcttacactagatgtcagtcccatgtttgttatgccatttttgtccacagatttccaatgcagagcttctctctcctgcttccgaagcacatccttcatcccaccttcatcccaaaataatataacatcaaaacatacaagaagtcatccagtatagaaacataatggggagatatgagtatgacattatatttcattggttgttttcatgtgcttgtctcacaaagctgcctttggcaatggaattgtgtacaagatcaagtgagatggttaaattcccaaacatattgccgcagacaatagaagttacttcaattaaacaatatggaagctcctaacttgattgggttgttgcattgttctcgtgatataagggtttatatcccgaagccccagatattcttttcatgtaaatctgcatttaaaaggttgaacttgccaatctctgatgatgagagggattggagaaaagttctgtgcaaaagtaaggttttgggtggctccttgttgtgggaaggttaaagtaaggttaaataattataaatatatatctgatgcctaaagtgcatatcattgaatactggaaagccaaaatacaatgtcacactggtatcaaataaataacctgggattatcagatatgatctgatagacttgccttgtaagttatccagtcaacacgatgcatgaaagaacagaatttcctatctaagtcaaattagaccgttttaataactcatcaaattgctagagaattttgtaattttaaatttatcataaataaaagagataaactgttaacacacagaactcaaacacatgcaggacattctatttggaacatcaaagatatttgtaatttacatatagctatacaagcatactttaataatgatgtatttgtctttcaaaagatgcatacaagacagaaaaaagaagatagagattgtggaaaatctgaaaatgtgatggtaaagagcacatatacaaacctttaagatgtatcaccaacaattctgcatatattttgaggcgaatgtgtgagaaaatatggacaaattctccaacatgttccctgagaacaactttacagctctttctgatgtcaagtccaaaattgtttcttaaatattgattaatcatttttctcctagtcaccaagtttgcttctccctccagcaggacagatgggaactcccagagaccagcaagcaaaccttcatcaggcctctttacaagaatgaattcactgtctgataggtgtatgtccgagtccgacatatcctcatcttgcacaatctccagaacacatacagctgaaaaatcatgtctctgtttgatctttatccccttcataggataatctgtaacatgcaatgaactatcacttctggagtttgaaagtgcacgacaatgatctgagacaggacatgaagaacagcttggatttgttggagtgcatacagttgcaccaagttccattagaccctgattgaagtctccaggctcgaaaggatcaactagttgagcagctagttccctaataacccataccaccgccacatacattgacacaaaaataatgaattatatatgcccatcataacatatattgtatatgtatgttaatacaaaatataaaataagaggttacggactatcaaaagtccacatgaaaatttagtactaatatttcttacaataaacaacatttaacagcgagaactccaaaccatatggagtcaatatctataccaaagacagtctttgtttcttgtccacaggaggcaaacatttctaccatgtgaagtttgcagaatttcattaaggaagttcatttagaaaattggcttctatagaaatctcaacgacagaatcaaaattgattgccttagagtcgacttcccttaatacagcaattttttttttttcaaacgtctaacactgacctacgataaagatcaaaggatttcgaaatcaaatgtgtcggatccattatcttgtaaatcaactattcaatgatttatttcaacaaagatattaattatccgtcatcccttcatttataaggtcagggaagggatatcgtctatggtcaaggtcttcatctgtccgctttcattgggctagctaaacacaaaatgatcccacagaacatgctgacctcttctatagtgaagatctgaacacaaaaatgatcctaagaacctgatgacttttcatggagtccccccatattggtgtgtactttgaagacattcaatagaaccgtgaaattatctatttctacattgttctttctcaaccaaaatttggcttcttgttttttacaagattggggtacaatgggcctaattaagtcttatcattggcaagacatcttactatcaattggatattttggactgaggtggagaaggagacataaactctggaatactgctacaaggtacttgctggggcactgactgaaaactaataaataggatttttcagggtgtagaattatggttgtttacaaatttgaggggaataaattagtaattaatgggtagcattttggacctttaaaccaaggatttacatgattttgtcttctttccccaaactaatctatttatgattgtaccgtatcaatttctaatatattttttttctcctttgtaaaacaattgttcgtttcttttttaaaaaagtactttccctgataaatcaggattataacaaagaagataccttaaactagttcttccagtaaagaaagcaaaatattacaagttataataatcaaagagaccaaataaaaaaagcagatgaaaaatgtcattgcagcgcagataataataagaccatgataagcatcaaaatgtaaaactcaccaaaatctcttgacagtgagagagtctttggggttagcagaaatagcctttagcctagcgatgactctaactacattgccgtcgacaactggaacaacctgatattgttttaattgaacaatgcactttccttgttgcttaaagaaaactcattgaagctactcacctctttaaatgctattgaagcaattgctccagccgtatactctccaattccccgtacttttcgcagtgaagttactgtttttggaaacacacctccttcttcaacaatcatctttgctccctaaaaacaaaggcatgtcaaaaggttaaatgggtttctttaagagtttctaaatcgttagttttcaaatcatatgaatttataggaataaaaaggttaaggttttcttactccttgaacataagtatcatatacatgttttagacattaaaataaataacaaacaaacaaacacatttctatgggacttggtttatagtgtaacatcaaaaacagatactttaaacaaattaatacctctagaagaaagcgtgctcgtctgtagtagccgagacctgcccacatctcgttaacctcctgtacaaaataaacaatagttgatagttgagatgaatagttaaaaggtttgtacagtggttggtgtgtactagacctcaatcgaagcctgagaaaggtggtgtaatgtgggccatttgaggatccagcgattgaaatagtcaatgacggtttgaaccctggtctgttgtagcataacttcagagacccaaactctgtaagctctcttctcaatgtcatcctcagccaatcgccatggaaggtctctgcgattcaggccgtaccaccccagaagagacactctcatctcttctatttgggttttggtaaacaaatcttccatatctaccagcgactctttggctgctcctcgcacccgccctaccatttctgtatttgctccaaacctctctaaccattcattcaaaatcatatacttcgctccaatattttcaatttggttttttttctttttttttttagaaattacacaaattatagggaaatttgaagggttcacttctttataatgtatcttttttttaagaaaaaaaaaaataatttagtt

SEQ ID NO: 380187 - DNA, 2858 bp, Cannabis indica
tttttttttttgagtgaacctcttaaatatgtagctgacaatgcacatattacactttaatttattattataattgttttaattattttttaatgttagtaatttgttttataaggtatataataataataagcatattaacgcagtcgttttaatctccattaatattctcggtagtcaacccaagccgtccgctccagattttgatcagccaagactcgtaaagactctgcatcaattttcagttgaagaagaagaagagaaaatgggaggatttctctcaagcttactcggaccaggagaagcgaacgctgacgactcttcctcatcgtccgatcagtcatccgttctcgcgtttcattcaacggccagatggcagcttcatttcaacgaagccaaagaatcaaacaagctggtgatgatcactcttaccaattttcatcatcaatctttttattcttcgtctgttttcgccattctttgttttctatttcaaattagggttctgaattttccatttttgggttaaaaattgtatgagagaagattgtcatcgatttcactgctacctggtgcggtccttgcaagatgatggcgccgatcttcagcgctctctctactaagttcaccgccgctgattttgtgaagatcgatgtcgacgaattatccgtacgcatttcttttcctccaaatttcaatttgtacatattttaggtttcgaattttgatttttgaactccttttgtctcaggaagtagcgcaggaattcggtgtgcaggcgatgccgactttcgtttttgtgaagaaaggaaaggaagtggacagggttgtcggagctaagaaagatgaacttgagaagaaggttcagaaacacctctaaattccaagccatagaggatctcttccttctggttagctctgatcctcgcttcgaactttgtatggtgtttcttttttcttcttcttctcgtattcggattgaaaatgaaatttccagtttcgtacatgaaattgaaactcacagagatatatttcaaaatttgaattcgataattgttgttgtataatgtatattaccaagtattaatacgttgcaatgtttgtttaacaattctatcaataattcaacataaacaccataatagtagtcgtcgaatgatcgttatcttcatttttttcggttgatcggaagccatagatagatggagaatattgtcgttttaagatcatctactttgtagatatgatgtcatttgaagatacaatatagcgaaggttcctagacgataatttctcagttgaaatccaaaaagtcctgcacttggacttggtgatgccttctttagcttttaatttacaatgatttaataataattattgtgtgtcgttttcctaaattgtgtcatttttagtacgatcatgtcttttttaagatgctcttgtttaattggaaagtagtggccggaaacgtatgcaattataatcgattgatccaatagaattgaatgttaaattacaattgggtctgaaattttaaaactttaattggataagatctaatccaatgtattcatcagatcagatttagatcgaaagggttcaaatttgttgatgccatccaataaaaacacttttactgttagaaataaatgaagggattggttggctagccaattaacgttgaacttttagcttttcgacttatttttatacaataatgccttccatcctagtgatcggaaccttcaaaaagttgcattatttgtttctacaagacattcgaccaagtatttttactcagaaaggaaaattcgaccaagcagataagctaacatttgaatggacttacgggttatacccgtaatgtaatcctacgatgccatgccgtatctacgagcacaaatcagctaaagcttctttcttctggttgggtacttgaaatacattaaggattagattaatatatatatatatattaatacagggtattaatcttgttggacaaatttacacttttaagaacattggatagatctgtggctaaaaaaatcagtaggtcgttacccattaaaacactaaaacagtggatagttatgccataaatttcccaacttgtgcttagtttaccactatttgggtaaaactcaattgtccacaagaacgaagctcacgggaaaacatcaagaaagaatttcatttgcaccattttggtttatttcagcattggctgggatcataagctgctcaagtgaaaaatcaataaaaggcttggctaataatcctttgcgagcaagaagttgatgagagatatgtttcattgttggtcgacactttggattggcatttaagcatgcaaatgctatggtggctaaaagaacaatatctcgtgtcaaaagctgatttgttggtcttgacaagcgtttgtccaaaatatctattaacaacatattttgagcagttgatgatgaagattgagacaatgatagaagttcttgagggtgcctacccattaaagtttcaagtatcacaactccaaaactataaacgtcgcatttttctgttataaccatagtgtaggcaagttctgcattgacaacatcaaatagaaaatatactaatgaagtaaacactgaaaatttagagaatagggtaatgaacatgcaactacatataacttaccgggagcaatatatccataagtaccagcaatcatagtccgattggaagaatcaggatcaagtagtttagctgtaccgaagtcagagagaaaagcctctagttccgagttcaacaagatgttggtggtagttaaatcacgatgaacaattgaaggaatgcaatcatgatgcatgtaagat

SEQ ID NO: 380188 - DNA, 2264 bp, Cannabis indica
attgcaaaataagagctacaattttttcatgcaaaaataaaatatagagtaatttgccgtgaaattttcttatatttaaatttgtatatatttaattaattattttacttttttatttgtcgacaaaacacttttaatgtttttttaaaaaaaaatttgagatgtcaaataagtatataggtgtacgcagtgattattcaattgatatttaacggtaatatttaactgatgcttcattttaaaaaaaaaattaagaaaatttttataaaaaattaatatataaaaattaaaacatgttcatacatgagctatgagcggagcacacaaataaatatatataaataaatttaaagattccacctatgttaactctaatcaaagtcttattattccctttaaacattttacatcaatatttcacagattcctcgattatttcacatcaaaggaatacaataatcctataatttttaaccaaaatcacggtagaaaataatgatggagaaccaaacaaatgcaataatagtataatttctaacctttttctttttttttttccaaatcctgtcttggttaacaaaatcaatcgaaaatacaattttatgttctataaattacaataaaatgaaaaagatcaccttggattaggaaagataaccatatccagcggcaaagagataatttgtgatgattacaggtacggagaccaccataaccattgcagctttgttaaagcctaaaaaaatataataataggacgaagaccataaatagtaagtcaaagcagagctttttagtccaccaagccacaattttgtcttctttcttttgtccattcacaaatttaaatttcttttaagtcctcatccaaaaatgttgcctcttcacgctttgtaacgttaaataactatatactccgattttatgagtttcgctggctgctttatcttgtaatcaatatttatttttctctgatgattaatagtattactttattctccttccttcaattttattatttgttaaaaaaaatctaaatcctttataaataaaatttatattagtttaactatttgtattttataaaaattattaattagattttctgtttattaaattatattagattttatattttttaaaataataccctaaattttgaggaatattatgttggccactaaaatttggataacatagctagtctagggttccatccttttagaattatttgtatacacaacacaagcaatgtagggataataatccatggattaatttttttttaaaaaaaaaaaataattgattttataatttagttaggtgttacaactatttttttttgggcaaagttagttaggtattacaacataatttctctgtttttttttctttcacattcaaataagataaagtttttttaacttttttttttaataaaatcacattgcaaaacaaataaataaataataaaaaaagaacaacaacaaaaatactatgagtgctcatgagttataaattttgtaccattttaattaatcttgtagtgttttttacccatcaaggaaaatactttcattaaataatccaactgttgttttatttttttttttagatgcgtttacagagatttttataataaagattaagttaaagaaagaaagattaaaaagaaaatgagaaaagatttttacatggttataacattaaggagccttagtttacaaatcaggctgttattaaactcttaattatgaaatttacaatatgtattttctggtttttagcatggaagaataatgctatatttctttgatgggtcggacttatccgaacccattaagattatttgagtgtaaaagtctactaattgagtaaatacaactttttattaatataatttgagtcatttggtcaagtaggtgatgcttaagttgagttgagctgccggttgtactgttaatagtgataggtgaaatgtgagtcgttattaggagaaaggaatatcaaaatagtgggtgtccacccaaaaagataatttttgtattattgtgcatctttccaatgtctaacacaggatataagttgctaaattttctaaggatcgtgtcatagaagtgctacataggcaacctcaattcgggatactaactaatcccgcacgacccttggagtatctttcttgagttcacagttttttgactctaaggtggcatttaattggaaggaatgaaaatataagaataagaataaaatttaaaatg

SEQ ID NO: 380189 - DNA, 966 bp, Cannabis indica
aaaaaaaaaaattggtactagaatcccaagctttcgtgattattggttgtttgttgaaaaaacacaaatccccctaaagaattgcatctatgtctttgagagtatcgaatctgattataaaagttccataagacagagatccaatcttatctaccttctccttccagatacgccttgaaaatccttctaagaccgataatggagggttggagccaagaacataacagacgatagaagaattctaaaaggaaacttcctcctcaatatcttccatggtaattttgacccctttattttgcttctttgaacaagaaccagaactagaaaacttgttatctaggctttgaacaactttaccaaatcttagaattgggggtattgaatgtttaccttgagaaacttccttgttacattctccattagcctccatgaagaaagagaattcaaaacaaatctccttctgttgttaagatgtctcaaggtagttcgaggtgacaatggctccagagaaggagcaaaatgctctggttcctcatcgatcttctcctcgtcttcctttcccccttcgtcatctataaatccgattggctcaatgccaataatctctgctattgatttcgtctttcgaacatccgatgttgaatccaaacctctctttttgtgtttctttactgtcaattttggttttctctgaactgtagcccttgtctttgccatggcatcaactcaaaatctgagagaaaaaccagagagaaaaaagaaggaaaatagatattgtatctaagaaaatacttgtaatatagagtaagggagagagaattcagtgagaggaaaaagtgagaaatcaaagagaagacaggctgatcttaagggaatttccaaagggttctccatcaattcattgaagactttctacaaggaaagggttttgtaatatgtaatttttagagtaaataccattttgga

SEQ ID NO: 380190 - DNA, 1456 bp, Cannabis indica
gcagatccgatctgagatctaaagactatccaaaagttttgaatcagatgtgctcgatcggatcaaaactccgacccactctaattaaatggatctttttcacatgcttaacttttttatatgttttccattatgagtttagggtttcttattaacccaagttgagttacatttaaaaaactaaaatactaataacataacattctaaaacatatatcttcaaaacataataatttcttgtagatattcttgtattttattattatttatttaaattattatacatatcaaaatagtggttgtatcatttcatttttcttaaaataaatacctaatattttcatatgtttttttacggattaaaaaataataccacatattatatttttgttacttgtcactattagtagtttttttaagtgctaagtaaattaatttaaaaatgaaaatataaagtatttatactataaatatttctaacgcacttaaaaaaattaaaataaaaagttctctttgttgaaataaataaaatattaaatatagataggtgttttgtaaagccacctaaaatttaattagtagttcaaaatagctcgaaattgccagaacaacagctcaaaatgctgaagacagcttgttgtagcaagatagtaatgatactcatttagataggatggtttatttactgctcttcctgatctggtgtgagaaaaaacattagaaggcaaatcaggtatgtcattatggttagaaatagcagcagactcaacagaagcaggttgagaaaactcacctgatgcagagacatgttgaaatggagacaaactaggatcaggagaatgattagaagagttgggttgagaaaactcacctgatgtagtacctggtgcagaagaattcaaagtttctgcagtacctggtgcagaatttgaagtttctgcaatacctggtgcatgatgtggtgaaggagtaaaaaaaatatcaatatgcaggtgggatacttccagtagatacaaagggaaaatatgctcataaaagtaaaaatctcgagagataaatgtagaggatttttgtttaaatcaagcaatttataaacccttgacacctggaggatatcctaaaaatatgcaaggggcagatctaggtgagaattttgaccttgattgactcaaagtagaggcataagctagacacccaaaagcttttaaatgttcataggccggttctttagaatgaagaatagcaaaatgtgtcttatttttgagattaggtgtaggtgttctattgattaaataggctgcagtagccacacaatctccccaatacaccaaaggaatgtaagattgaaaaattaaagccctagcacattgagtaaatgctggtgctttctctcaacaacagagtttgttgaggtctttgcacacaagaatgataatgcataatcccaagttcattg

SEQ ID NO: 380191 - DNA, 862 bp, Cannabis indica
aatcaaaggtacaaaatagttaagattcttaaagcatttacctctttaccattgattacacactttatttgttttattttaatattaaatattaaaataaaaaatttcaaacttattaggttatttatttgttactttttattaaactttactgtttattttttgtactaatgcttttgtctaaaatcacctattcgtgaaatcgaccgcctaatttatactatgattgccgctaatgaaaatcacatttgagcgttaaaacaatgataataagaagcacgccaatgtcaattacaatcaaatagtacaactactttaacaattaatttaatgtaaaacagtacaatagcaacttcaaattagtaggttttcaagacaaatgctaaaatatactagtaattactagcaccatcttatatattaatatcactattagtttacctaagtatcaaattctatacaatttaatgtaataatttttagaaaatatcattagccaatcacaaaataatatgtctagaaatattaaataccactagtgaccatatatcaatactcttccacaaaaattagtatccttgcttttatagtgtcatttaccaattgagaatcgatctctcattagtaaacttgtggtgagggacttcataattagccaaggccggtcctaaggtatatggagcctaaggcgaaattaaattttggggctcttatatatatagtttaactattacaaaaatgatagttctagtgcttaatgtaatggtaaaattttaaaaaactcttaagaggtcaaaggttcaatccctcataactacacattaaatattttttaaaaaaattaaaaagtagaggttgggaa

SEQ ID NO: 380192 - DNA, 8291 bp, Cannabis indica
aagcaatagagaattcagctagaattaataatagtattaaacatggtagaatttgcacctagatacagatgaagggtagaacagtttttctactctcgactagaaaatgggcatgagataaaaccaaaaaaaatccatagcatacatcttcaagaattttagacataaaataaaataaactttttgctattattagtattattatttaatcaagagaagaaatataacggacagtacttacttgaccatctgcaccagatgaaattagaatgttaagaacggtagagaaagctaaaccagttatccgcttacggtggccctgcaatattgattttacctgaagaatggacaaataagattaatttatcagattcagatcttgaaacttttaagcaaaaagaacaaaaatagtgaaattatatgttgacatacttcatccactctgacattgtaaatgtggattgttgagtcctccattcctatggctatgatgttattatccctagggtggaatgctagggcagtggaagtcgggggaggcggcataaatgttgtcattacctataaacaaatccataggtcaagacacttccaaattcgacaaaaattgcaatacatacaagcacaaaaataccttgaatgtcatcatgttaaacaatgaaacctttccaccacaagctgacatcacatatgaatcattttcgagagcgctacacagggaactgcttcgtcaaggttgacacctgagacatcattagtcataacaagaccactgcttgttgccagcgctgtggaacgacattagcagtggcctgtaaaaactcactgacttcagaaaatttctttcaaaaagatataagaaagtagaaaaacagaagaataagctttctcatgcaaagatgatacctttccatttgggttttgatcactacggccccacttccatagcttctgaacaccatttgacccaagagccaaaagactaattgcagaattggtatatagaagtcgaacaacctaaatttttttactaattaaaacaaatacaataaaaaatgatttttcataatacagtatgatcactagataccatacacaccttgctggtattatctgtgttgtccggcatggtaactaaccggaactggccaggttccagaatttcagtcaactgccagggtttggttttatcaattgcatcatcaacttttctaggtttctccaaacctctagccgcaggatcaactccattcttgaacacaaaacaaaagtaattaatacttttccaccagaacataaataagatgaaataaaatatattacaagtaaaacaatttttaactgcagtacagtcagaaataatgatgactcaaaatcatgtttatccctagtcacctttggtgaagaagaatatatcccttcattaaaaggaattcaactcaaacatgaggtgaagcaccaaaggggtttgttttcatacaccaaactactttttagcttaaactcagaaataaatacaacagtgtcattactaattaggcaaccctcccacccaactgaaaacacacacacacacacgttatacattaaattagaatcaagatggcttacgataactggagtaggcctgacaggggaacttctttccactttacaattgactggactgacatgtggaatagcagacgaaccagaagcctagtcgaacacaccaaatacagagtcattatatacgaaaataaacaaagaaatataagtagaaacaaataaattcaagtaaaaggtagactgcaaccttgacagtgccagaatctaagggtgatctcaatccttcaaaagctgtagactcaatggctttcaaggttttaacaccagcagcattagcaagtatcttaaacccattctctgttgtactgacagcaagaagatttccttccttattgaatctcaagcgagggaaactctgaagaattaaatataattacaaaaattagaaaaagtaaattctgaattggacaacagagcatagaaaagtgatgtaagaacacgcactggaagtccaccctcagcatctgtgctagtgagaacattggtgttatccatatcccaaaactttatctggctatcttcacctgcagccaaaaagtgattttgtgtggtgtcaaactgcacaacacctgttgatgacttctttctgaacccagtgtatgttcgttttattgccccttcactttcattccactcaacaagatatgagtctccttccttacttgttccgcaagaaaacaatctgggaataaagtaaacaagaatattgaaacactactattgtatcaggaacaaaattaagaattctaattatttaggactaactactaaaaaatataaaatggtggcacataaaacgtaaaacataaaacattcatcctagaaataacaagaatatgctgaaaacaggaggaaggcttattgttaaagctgcctggtctggcgatgattgagctgaagaatttattcttacctacttccgtcagcactgtattgcattgcggtacaccactgcccaggagcatcatagtcaaccctagaacccatattgtcatataaccaggcctttatcttcccatcgacagcagttgaaaagataaactgcaaaatttagaagcaagcagtcaaacatcacagaagcatgtctttgttaaatttctgaaagttatggccaactcaaagctgccattacgatgtaaaaagaagttataaattttaaaactggtgaaatgtaatttttggtgaaggtaaggaggcagctgaccaaggtggcttaagggtgatggcacgattcagtaaaagaacagtgggggattttagcgccaatgcaatgtacatcgaaaattgatggcaaagccagctgatggtcatgtattatatttggaagatcaagagaaaatgctggataggtttgtttagaaaatccagactcctgttaacaacagctgctgactaaaatggaaaaggttttctgtcaatgtaaatatatttgaaaaaagagagagtaccaacaactgcatgttgcctattcattcttttcacttttttatcattttaaaaaattacaaaacagaagcacctctacatttgtcgttttaacttaaatctcatcatgcatggtggagtgaacttttttattagactagaagaattctagacacttgtccaaagtatcatgttctagagtatcgtgagataaatgactagaagccaatatacctgaatgctctccttgtgatgaggacagattgaatatactggagacacatgaccttcaaaggtaaatagcttacgcccagatatctcccacacctgtttcacaacacttagataagaaacatcttatatgacatcaaacttgtgaatctgaatatcattttaccttaattagtttgtcatctccacaggtgacaacacatagttgcttattgggataagcaaaagcgaagtcattcacggcaccagcatgggcatcaatctgcgaagacagagcaagcaatttaaattttaaacaacagtacaagtacaaattagcctacctatggagttaattattatcataatatcacctcacctctaaatgttgacgtagttcatttggtccagaataagaatacagttgaatcaaatgcttggtaaatgcaactcctacaacaaggaatatataaatatatataataagacatacatgaactgaagaaactttatcattcattcttttacatgtactaacctacataattcccttcaggattccatgcgacacgactaacagatattgaggtatctttaatagcagcagcctgtataaaatctaaatggtaagattctaatgttattaacgacaaacattctcaaataatgaaacattcaaagactattataatgaatgaggcattgcctataccttactgaacagaacgttttcataacaaacaaataaatagaataacaaaaataacaccaggcaaagtacaatacgaaaaaacaagtaaggaaacctgaaatggcagcgaacaagaagaaatatcccaaatcttgaatatcttcgataccaatctctcttgcaatccaagttcccagagtgttatttctccattattacaaccaactgctcatagggaatacaaattaggactgcttcctttaaggagaaggggtagaaagtggtaaagcatagcaggtttgctaagagagctaatcagaacaaggtataacaacaagccaaggaagttgaaaaagaaacatacccaggagcaatgtatggtgaacaggatgaaaatccatgcttgtgacactggatccttgatgcgaagtaaaaacaacatttcttgggagatcatccagtgaccaagatgcttgctgacgtggcattgggtatgtaacctaattatgaaacactacttttagcatatcaagactaattattacgacatatacaataacaagtatcaaaatagttcggcagaaggcaagacttgtacaaaagcatcacaaatctgcagattgagagaagtatattttacattacctcttctacagatggaccaggccttaatcgcttcatcagttgctcatgatcaagagtttggtaatcaactattcctggtgttgctggaggagttcttgaatgtttcaacatcgaagctaccaaaacacaaagtacataaggttaaacaatacacaaggacagagaaaaacatgaatagcagaactgaaactcagaactgttaataaaaaaaacagaaaattacatcaaactaaatactacttcagtgcttattcaaaaaaaaaatactacttcagtgcactgaggtagggtaatcttaaccaaaaagacagctcactcccttgtttcttagattattccatatggatacagcagctaggcagtgaagttcaaatcaaatttctaaccttgattctgttgaataggaatggaagatgcagtaaccacagcagcttgaacagatgaagaggcagaggcattggccatccaacctgctaaagcatttgcattagcagcagctgcagcaggtggaatgggctaaaaatagtaaagagaacaattttttattagtcgaaatagttacagatcctaagaaacatttgaaaatcaaactttgagatgcaatagattataccccatgagctccaagtggggtataagcaacaggctttgtgagtgcagcaacaggaagattgacaggtgtggatgcaaggggaccattaggaggtgtacatgaatggtcttggaataaagtcttaatatctggatttggcctagggttcttgcatagctgatgctgccagttcaaactgcaagagtacaacattagatattatagaggtactgggtttaccacataagtttgaaagaaaaaataataataaataaaaactgacggcaatatgataggatatcatccagtgaaagtagcaacaaacatccataaagcagttaatgtattatccataatagcaacacaagtgctaaatgaacaatacatttcaacaagcaagcttgaccaacatattggaaagggagactgactaaaataacacagctgaagaaagggatataattacaatattgcagactaggcaggtaggtagttaaatacttataaaatatcagatttaacacacagctgccatgcaagactaccattaaaagaaaattattagaaagtaccagattgcttttttttgtttgtttgtttattttcatcaaatgtgatattaagcatacctttgattgataagggtccgcaaccttgatggcttcagacccgggaaagtaagcttttcacgaaataggggatttgcttctatgagtttcttaagctctattaacataatgctacgagcttgtctagtgtctccatacttggataactgttcattctccctaaaaaattgcaaaggaagttagtttcatgaaatttatataaactgtcttagagtttctttaattttaaaccaacaataccataaatttgtatacaatccaatctgcaacataatttcgctttaagcaccaaaagttttgaaaaactaattacctgaaatctcttagagttagaagctgagtgatttccttgtagtagatcctcgttaaatgtagagaacaccttcaaatcattaactaatatatcaacagcctttgccttgtcatgcctaaaaagaaaaaaacaagtaggattaaacaaccccagagcaagaagaaaacagaatgacagaatagactgattaataccggtccagtgcttcaagatattttttgcttccctaattcaaaaaatatcttcatggagtatctgttatcatcgactttagtatatcctgataagtacttctcaacttcctcccattctccagctagaactttctcctcaaagtacttcacattgaagtagaaccctgattccttttcaagtctacaagacaaaggtttttccattttgaacaacacatcaatgcaattcagcttacttaattcataacaaaacaatttctgtacaatctaaagaaatgaaatgaaaatattaaatcttgccacagtcaatgtctgacaaaaggaaaacccaagttcgaccaaccaacttcttaatctctgactttattaaatccttcacttattctatcctgtaataacccatttccttaaggtttttccattttccgtacagccaaacaacagtaaacaataattgaaaccaaatcaacactggctaggatttttttagtttttgtttttaaaactatagcaattgccatgtaggtaactgggagggacttgatcctcagaccttgtgagaaaaaaccacagatctatcatccaaaacccaaaccaaacagaataattccacatttaacaaaaccataatgtcatcacaaaatgtttactgatttacaatttacactgtagaaaaatacataatctaattcattcatataaaaataaaaataaaaatttgttccaaaaatatgataatgaaattaatcgaaaaatcacataataatattaattaatatctacaaccaacaaaatctgcaacatatttcaactcaaatcaacaacaatactggtctcccttcttcagtacaataacgctacaaatataaaaatagcataataatataaaaacatataacaaaggaacacaattaaaaactttctctttcctccatttttctctctcccaacctcccctgcttcttcaacacaagctcatacataagagagagaaagagagaagagaggcttacctgtgtacggactccttgaacttctcctcctcgaggaattgaagaataagaaagaccaattctctgctcagagacgtcattttccgaagacctcgaaacccctcgaaaagaacgacgaagaccccaactcagagacctacaacaactaaacagaaataaacaaaaattcaaaccaggctcgcacactcggaatcatcaaattcgtcaaaattttccgtgattgttaaggatgatacagctcgaactccgagaatttctagggtttgaaaagctgcgaataaagaacagagtaaaacagagaaagagagataaaagcttggttcgctatcttcgatgcattgtacagggggtttctttatctctttatagctttttccactgacctatcagtgataagttatagttattatctagataagttgatgtgattattgatctgttgttctacttatcatttcgtgtggataaaggaaaagtgataagagaagtgacggattcgaaaccactaattcaaatctagtgaatattcggtacacacgtccagtcgaccccaccactccctaactccaattcctttatggtagtgtcgctttctacgaaaaactcaatttctcgtgtcataatatcatatcttgacgtgaagatcatttcccgataagaatcaatttcacgacgagtatctcaaacaaacccaatataaatttgtctttattgtcgtctgagttggaacgagattcttaaatgagcattaagtgtccaccactttaaactacgtggcagtttattattggaatagtaattttctttttttaaaagaaaaataaaaataaataaagaatagttaaaagttattggttgggaaatttgaatttccatgcttaaataacccatatattattcccctaaactaaaactatatataattaattttatatgacactttttgtatttttcccataataccctcccca

SEQ ID NO: 380193 - DNA, 2283 bp, Cannabis indica
ttgttgagattgagaaagtaaatatgtggtcattgattattagattgacatcaattcaaagtatgttatttggaaatttgttggggagagagactgaaacatttaaatggtgggcaagttttgaattccaataaagttgttctggttgaagggtgtggaagctcttgatgtttattgaatcccttcctcaggttgagtgtttgtaaaaaaaaaaagtcgggtcaaatacgacccggtagggttgggttgggtcagacccgattaaacttctaaggtaactggggaggggcgggtcggggcagactggccccgtttgccattcctaacagcgtcttcatctaatttaaaagagtggtgaaatgggttatggtcattgaaagtaactccgagagttaaaatattcctttggtgcatgttttattgtgttattccagtggctatacaactcattaaatgtaagatacatgttgattctttatgccagagatgtggagaagttgaggaaacctcaaagcacgccttggtcttctgtgattcttttattcctttgttgattcaattggggatttggcatttgttgttaaggttatagtcagggcctttgctgaacttttagtggcactttttgttgagttatcgcgggaagaattctctttgatggtgatggtgtggtggtggatttggttcaatagaaattcagtgctatttggtaaaaaaactgtcgcgattggagatcttagatgagttggctacaactgcgttggttgagttttgtggggctagttctagttttggttttattgggttctgttctggtgttagttctggtgtggagggaggttatgttgttgggagttttggtttggttggtgtagtagttggtgtagttggggaacctaccagtgcgaggtgtcatggtgctggtgaggttgggtttggctctggttttgctggtgcaggaggaagtggtgcggtgagcaggtttagggtgggttcgatgcagcgtgggtggcttcctccttcttgggggcctttctctctctcaacagatgccatgattacttcaagacgtggatttgcagggtttaatggtgtgattcggaatggtgcaggggttgtttgggcagcctaggcaatttggggggatcggtaattacagtgttgtggttgtagatcttttggctctctgtatgggccttcgttgggtgtccgggttggagtataaggtttcaaaagctgaaatagattctttatgtgcctgtaattgggtgaactccccaagttctaatattgctttcagacctgttattgatgaaattgtttctcttttagctgctgttggtggtggttcatgtcaaaccatttcgcgtaatgcaaatggtgtggctcatgcactagcaaagtctaacagttccataggagttaatgtttggactgatgcttgtcctaaatttattagtgttgttgtaacagttgatttagttaggtaataaaatcatactttctttgaaaaaaaagcttatcgaataatttatgcagaagctacagctagtacaatccaactttaagaaaaaaactgctttgattaaaagattataataaattatttgtactaaagatgtatttaattatttattatacattgcaaaaaaataaaaatattttttgaaggaacgttctcaaattaattgttaagccttgtgattaggtgtatgggcgcctaagtacaagtcggtgttatattatatgttatgtgcttttaagcctaagttcgttgactcatagttattactttcacgtgtaggtaagggaaaggctaagggtaagcagcaatgagtatggagcttgaaggtgattgtacatgtcaagacgttgtgacctagagggtccggtctcaggacaacataggcttattttatagtcgctttgcgacatagttataaagtttattttaaaatgtaaacgaatttcaaaagtgaattctcgacatatttctttagttataaagttataattattaaagtttgttattattcgaaaaagttttaatttatcacggctttcgagaaaatcttttgattattgaaggagtgtacagtaatcaaaaaagcactgtagcgtgccttatcattagggcgttacattaccattatatatttctaagtcaatatcacttaggtgatcttagatcaaaagatcttaatcctgagatggtttggttctagcttaactgaattattcatgttctttgactttgtttttaaagttgaccaaatggatctt

SEQ ID NO: 380194 - DNA, 3827 bp, Cannabis indica
ttgaaccatgatggtgagtaaataaattcatccacatcaacaaacatcatccaattgcacaaatccttactctggatcgcgctgtgggagaaccctgcttcttgagatttaggccaaacccaaaatattgtcgttacgtcgaatccttcgtcgtttaactcttcaacgacgcttttaatattatcattactgtcgttgtcgtataatataaacttgtccactccaattttggaatggtacacaacccactctttcaaaaacttacctgcattgtacaccatggtggacgcgcacaactcagactttgactttgactgtggaatctgacgtggcccgtaatacgctacggaaggaaccaccaaattattctcactgatgatttcgatagagactttgatttttaattcaccgttgtcttcatcatcgtaatcgtcgttagaattaaacggcgccgttatgttcgggtgagggcatctgaaaacctcttgtgcggagctcgtaacggcggttttaaacgccacggttttcgaagagtcgtgataaaacacgcaattaaactctctaggcgaacggctaatccattgacgattattaatccctttagcgaataaaacgacatcgttttccgtcgaaaaagattcgtaaacgagaaaattccatctataaagctccggcattttaacgattgccgccgactccttctccgatgacttagtcatcataataggctgaaggaacggacgaagacgtcgaacactattaggcatagaacacttgaaagcgaatcgatcgttggacaatgctccgcaaaaggtagccggagaggtggcgttgttctggaatagacagatgtaatctgcgaataaatcaattgtttctttattggcagggcctgggacgatgagcaaaacctcccattcaggaaggagaacggagtggtgatgaagcggtgaactgacgtttcggaggatgggttgagattcattttcttcttcttcggcggcggcgttgtatttgggggtggcggctacgttgagttttgaggtggtagtatagggaaaatcaaggtgagtggttactaagatatggtggcgagagagatgaaagagagtaagacgaagagaaagaaagaggttatgattagtagaagcttattggtgatagggatgattaaggtcttcccgcccatacccatggtgatggtggtgaataaggtcgtagcaaaatgaaggtgacgcggcgttacagtaatccctatttttaatatatatggtcaaattagggctgtgattatcaatatacacgtagatatgtctgtcttctctcttaatatttatttatttttaattattattattttaagattctgtttggtgatatttttgggagattcaaaatacaggtaagatttcattttacagttgcactcttaattaatcactttcttcacaatttttatattatttttttataccttaacacagttactaaattatttgttaaaattaaaatttgttttctctcaccaaaaaaattaaaatttgttgtataataagatataaacacgctttctatctttgaggcattcctattttaataggaatttttttttttttgtttgtttgagaaatgttaaaaataataaatgtgattccatttccaatttatatacatatatatagtaacataaatttggatagatcgagtaactaaatataaatacatttaaaaaaatctgatttgggaaatttggtaattctcattctacaaatatttccggaaaaagcaatccttctttccattaattttgttccaaaaaaaatataaatttgtggttaaattcttcttaattgataattacattgattgtaccataatttctaaaatatattattttatttatgtaatttatagctcattggtttactcatcatatgttaatatgttatcaaagaccgataagcatcctctatctcatctccccaaacattcttcatttctgttacagcccatcactgtattatatttaagaaataattggtttgtgaattaaaatgtatattttttaaaagagtgttttggaaatataaatttcagttttatatgtaaaaaaattattattagaaatgtgattagttatagtgtaatttaataattttgagttttaaaaaattaaatttgtaattggttgggttacaaaatcttaagataaaaaagataatatttgaagaatttttgaattcattctttttttcgataaagaattcattcattcaacaacattacacaaaaaatggctagtcacactattaggcttaactcacacaaaaagaacaaactcaattcacatagcactaactttattaatcaaagcttcaatagctaacacatgtgccacttgattagcatcccaataaacaaaagataaccaagctaccctcatttgaaaaacatagaaaacatccaaaagttattttcatattttagtctaaaactcaaatttttattttcagatttagttattttgaagcttaccaactatatcaaaaactctaataccacttttttttttttttaatgaaaaataccagttatcattaaactgagaaacctgccacaagagttacgacctgtgaaaaacaaaatgcacgataagatgagaggcctttaagcttacaccatcattcacaaagcaatattattattagaccaacgaaaaaaatgcaacaattcaacaaaatactgtatcccacacaattccatcacaatctaaacaaattatatccactgaatctattaattcaataataatatataaaaattcaaactccaacatcatgtgtgaaattctgaatatacaatgaatgaaccttaagacacaactgaagaagaatatcctatttatctaatactaataaaaagttacaaaactgtgaaaatcatgtgaaacggcgtgtctaatttggtacttaacttttctgttttgaataactgctgttatcgaaatcgctatactagtaattgttctattggatcttgtgtgtattgaccattatgacacatgatcttaaagggaaaccaaataatttatttggaaccgtgcagtgtggagagatgtgaatattgacaaaattgaattaaatattaaaattacttttataatgcaaagcaagaagctcaaaaaatttgagatgaggatagggaggggaaccaaaccaaaatgtagaaagaaaaagaaacccaccattacattaccaagttgtttttcttcaagcaaaacaccaagaaatataacattcttaagtgggtatatcattatcaaacttaacataggaaaacataaaatgtgtagagttagttttgagtagaaactcatacatggttagagtgcagagacataatttacaagcacattacaacattaaatttttgatatgttacaaacgtactttcactctgtatgtaaatacgatcttaggcacaaatgaaatgtgtgtatttgaacttcatctgcaccatgtccatgtctgtaaacactctttaacactcaagcacaaatatcctttgttattcagccctgccatgaacagagttgtcaaaatgagtttatagatctccatgagcactagaatgcttaaactaataatcatgaactttaaaagccaaaagaaacaatgatctatttttcttttttgtgacagtaagactctacaaaataccttatctcccctcttatttagtttcttcttctggttttttctaaagcaccaacttgaaaccctcagaaagaaaattatccctgtaaaaaaaaaatcataaagaagcaa

SEQ ID NO: 380195 - DNA, 4457 bp, Cannabis indica
gggcaagcgttgagcatgagctgtgtgtattgtgtaatgatttttcttttattggaattcatatttggtaggagctcctgaaaaattattaatcatgagagactaatcttaaatctttaaaaaacttgtaaatataacagtgactctcatgtattaacacttacaaattattattatttcttaaaaaaaaagtgtaatagttaaatgttaaatctgattattttattttgaacttgtacgaacctaattttctttcaaaggttaaacgacactcccaactttcgaattattttcctagtaaaattataaacgacagtctttcagtacacagagtctatttttgtaaatttacttaactacccctataacatatatagtagactaaggtagttagattgagctgagcgatgagacagaggtgtttttagatttggagagagaagatgatacgagcggtaatggtgataaacacgcagggcaagcctcgccttgctaaattctacgatgatcaggtcgatttcgattttgatctacactctctgatttttgtaatttcttttacaatatccactcattagttttttggaattcagcctctggagaaacagcaggagcttatccgcaacatctatggaggtttttctctctgctgtaaattgattttttattttctttcggcgtataaactttctccattgatgtttgctacagttctgtgcagcagggctgaaaatgtaagcaatttcatggaggctggatcatttttcggtccggtaagtcattccgatcttcgaatttatgttgaaattagggttgcatgcagatataattttgacggtgttgactatgatgcgatcaatttattcttttagtggttggattttatttatagtatttattggtttctttgtatacatgtttaggatactcgccttgtatacaagcactttgccactctgtactttgtgtttatatttgatcggtctgaaaatgagcttgccatgcttgatttgatacaaggtgcgtctctgggcttcttcttcctcatattaacatgatattttgacactgttatttgtggagctgtatgctagtaaagttctgaagtttgaagatttactaattaatacatacctgctcttaatcggttgcaattctgccaaactaatatgattgggcaggtacgcataaacaaaatttttaaggattattttaagacatgatttccaaaatgtctcacctaagacaattaactgacaatactgtgcctcagaaaaattctgaaaaacaacaacattgttgaaactctcttatttgagctatgctgttaaacatgttggagacttagtttcatttttagagatcatgggacatagagctagtgaacattgcaagatttggtagactagtttattttctgtttatctgagcaatagcttgtgcaatgttaagtagccagtagagttggtttatcaaacactgttttctttttaatgtttaattagctgaaactgatgtattttatcctcgatcttgtgttcttgtttctataatttctgactttcataacttcagtatttgtggaaactttggacaaatgcttcagaaatgtttgtgagcttgacatagtgttgaactacagcaaggttataactctcttttttttgtcttttcttctattcttaaggacaataattttgtttaataggtgtactttctttttaactgaaactaacctgtgaataattgcccagctgagattagatttgaacaacacatcacacccaaccattttagccagatcctattattaatgtatgaccacttataactcaaacttgttagctttttcaaacaaataaagaccaaattccacattgtgaacattattcttagttgatctgtgatgggatattataagagaaagggtttaatctaaggaaagtgatatccttataactaaattatgaggaacttgattataattgttattatgtttcagatgcacactatattagatgagattgtatttggaggtcaagtgttggagacaagttctgcagaagttatgaaggtcgtcgaagagatatccaagtactttctttctctctcatatcttgctctgatttctttttggggggctgccttgtttatgtaatttctatttcctaattgctacatgcataatgcaggctagaagcggcctcaaattccatatctcttgtcccgaaatctgtttctagttggcggagtcggtagccctaacataagcgtttcagtgatccaagagagattatcttcaccaaatgtaacactgacctaccaatactgtttcctggttttgagtcacaggtgcagcagagtgttcctccttaacaagtgttgcacaatcttcaaatttttttatttgatgcaacaacgggttcatattttgtgtacatcattataaagtttgtgtttcacattcaaagctcaatgttgccctttatgtgaatagctcacgagtattttgattcattgggaatttttttaattaaaaaagggagatttgcttttatgaattgaaaaaatcagccaatttgatttagtggttcagcaaagtgatctttatttatataataaatactctttttatcaaattatgaacgtaatatatataaataaactatatgaccatatctgttgcaaacatctaattgaagagtttcctcttttagtaattaataaccgtcacttccttatcaaaccaccataaattctattcttataaacttacatatattcatacagaagaattcttttaacaatcacctaaatggacaatcaccagaaattccatttctacaaacttacatattgattcgggagaaaaaataaacttcaaagatagtgataagtgacaatatttatgaggccatattaagaaattttaagtggtctattagtcgttttcacttcattactcaaaaaaagaagaaggctattagagtgaatcaaaaagttggaaattttcttgtatttaattggagcttttgggcaacttaagccgagtttaaacagttatgtaaattcattttttctttcttttaatttcgaattaagacaaagaaactgagtcgaaagattgtcacatttttctttctctttctttcagtttaaaccaaaaatcaacctgctttgttagtagccgaaacgacattcaaattccatttttccttccctgtaaaacgataaacgacaactccaagccttgacccattacaaggagtatcctcatacaaaacctccatatcaaaaaccttcttagccttcttgaaaaaagaagactccttcttccacctccttaagtgagccataacaaacgacgtcgttttcccccgaccacccaaaagcaagtaaagtgtttgtaacaaaggttcatacaggtgatcatgatacactacatccgatcctataataacatcaaactctcgcccaatcagctccacgtcaccagcctcaccccaactcaacgacgcaaccttaacggtcccaccgttaacggccaaagcttcggcgtttgcgtctacattgaattgaagattggggataacgtgtgggaggtcagtcaccgttacattagcaccgagcgtcacagccgcggcgatccccaataaaccggttcccgaaccgagctcgaggattgtgagaggggggagatctgggccgtcggatgagcgcgatcgtagggctggggagagtgggctcttgttagggttacggcggtggtcgtcgaggagtgtgacaagcgttgtggctgctggccagagctggaaggacaagccctgagatgggagttgtctggtgagcaaggttgtgttaatggaggtgatgtagtggtggtccagcttaggctgtcctggagtagagtgacccacctttgtcttggtatcgccattttcgtctcctgaatctgataaaagcattgtgaataattggcttatgtcttcttcttcgtcattatcattattatcgttttgttccaacatgttttatttcagccgcaattgaaaatgacgccttttgaaatttgaatcgtgttattggttagggtttgtttcggaaatatagacaaaattaggggtcaacgtcggtctgattttcatatgaaaatatctcatacccgctcagatttgtgttcgggtcggttcttttcatgggctttgattgatgggcttggcttagcttttggggaaacggtgtcgttttctgagaacggtttaaattgtgtgagttgggctttgctgattgtaagtactaagtagtgctctaaatataggttaggcttttttattacaagcacatttatatggtatactaatttttgctattttttttataaaaatactatcaagtggtatttttttacatttttactgtattttttttttattaagtttcatattgcagtatactgt

SEQ ID NO: 380196 - DNA, 1795 bp, Cannabis indica
aaaaaaaagaaagagagagagaggggccttgtgtatgcagatataccaaaatcaaaaccaaacaaaaaatgtcgatatacataagaattggcaaaatatgtgggcaaattttcatgtttgccccacccaataccataattgttgagtggcaattacgtgatggacatcttccaccagttccaaccactctccaacctccaaaaataaaaaaaaaattattagggttttagagagattaattataattatcattatatttgtaaaagtcatattagttatagttttttactttataagcatattgcttaagaggtaactattttcagtccttttttcattccaaaacataaagaagatgagaaaaaaccgttttgatgagtaacttttttgtggtttattttattgggcaggacattaacaaaagaaggaaaaaaaaaaaaacaacaatgatggtgtttgatagagatatatggtgtaacaataatttatatttatatatcttttgtgaaattgatgaaaatagtcaattttttgggccggcttttcacccaaaattattagtaatggtgtgtggagtagtggtgtggcatgagaacaatcaaacaacattttagtaatttgcaaaatttaagtttaactattagttataaataaatatttaaatttaattttttatggaaatattatttaagtgttaataagttaatattgacatgttatttttttatttatataattaaataaatttttaaataaaagataaaaatttaataatattgaccaattagaaattatcatgtacttagtgggtctaaatacttgtaaaaatatgacttttaagtatttatttatataactgagaattaaacccgtaaattattctttttatttattatctatggatctctattctccactatctattgtacaaggtgatagtgatcactatagtctatagtgatagtatatagtagtgagtagtgattgtgtccacctttgccaaaccttttttgacctctgtttatatgtatatacatatttatatatatatgtatatgtaatatgttgtgatgagaaattgataataattgagagcatgttatatctgtaatttgatgaggtacaaggtgtagtcttatcttgttatggttgaaattaattataactgatttgatatagcttttgatgaagcaataatattggtgtgtttatagcttagtgaatgtggtggttgtattttggatgtttatgaatgttacttctttgttgggctcagccagtctattactaaacttataaattgacaaatgagaaatgataatagaacaatttaataaaacgtaatatcggttataaaataccgaattatacttatattaatttaattaataataataatagaacgtgatcttaagttgtaagtttgtgggtgtcatgttggctcgatttgtatttattcgtactttttaaaaaatggatcggatcgtgtcatgccacagaaaaaacataggtcgtatcgtgtcgtggcatatggcctgtaggcccaatattttcatactgtattcggattcgtgtcgtaatttactcgtgccggcttgtatttcttaaacaagccagcccgtttttatattcgggcttgaatttgtacttttacttttttcatttttttttcacaattattaaaatatatgtatattttagttctttagttatatttaacttttcaacaatattttacaaataatcatataaaaaaaactaattcgcattatatttactaataaatactcaaatt

SEQ ID NO: 380197 - DNA, 1476 bp, Cannabis indica
aatttgctgtcgctttgaaacttctcagctcctacggccaaagtctgagcacaaccacatttgtaggtgagacttgttttgccattcttattgccatcttgggtctggttctgtttgcacacttgatcggaaacatgcaggtatgtatgcaatacacccaaagagtcgaactttcaaacctttttggcttcatttcattatgtctaaagttcttttgtgcctaaataatgtatcaaactcaagtactgtaccaaaccaaacaaccaaccttccttggtaaactagaaaagttcctttataagaaagatttggtttgtgcagacatatttgcaatcgatcacagtgaggcttgaagaatggaggctaaagcgtagagatactgaagagtggatgaaacatcgtcaactccctaaaaaatcttcaagtgcgtgttaggagattcgttcagtataagtggttggcaactcgtggagtagatgaagaatcaatcttgaatggcctaccaacagatctccgtcgagatatccaacgccatctttgcttggacctggttagacgtgtaagttccttccttccttcctccctttgttctgttcttgaagctaattgattccatttaacaaagaaaaagagtacaaaattctcttctcttctttctcttcaggtaccctttttcgcccagatggacgatcagctactagatgccatatgtgagcgcttggtctcctgcttaagtactcaaggaacttacagtacgtgaaggtgatccagttactgaaatgctcttcattattcgaggaaagcttgagagctcaactacaaatggtggcagaaccggtttctttaactcaataaccttaaaccccggagacttctgcggcgaagagctacttgcctgggcattgcttccaaaatctacactcaacttaccttcatcaacaaggacagtgagagctctagacgaagtagaggcatttgctcttcgagcagaaaacctcaaattcgttgccaaccagttcagaaggctccacagcaagaagcttcagcacaccttccgtttctactcctaccattggcgaacatgggcggcttgcttcattcaggctgcgtggcggcgatacaagaaacgtaagctggtccataacctaagcatggcggaatcttactcgtcgaatcattttagcgaacagttagtgggcgatgatgatggagaatataaagagaaaggaagagaagagagtggcagtggatattctccgagttcgaagtcgcaggggaaaccccatttgggagttacgatcctggcttccagattcgcggcgaacacgagaagaggagcccagaaagtcaaggacgacgatcacgatgctgagttgcccaagtttcagaagcctgaagagccagacttttcagtactcgagccggaatatgaatagattttcccattcaaatgaaaaagaaaaaaaaaaatgttat

SEQ ID NO: 380198 - DNA, 1986 bp, Cannabis indica
agtgtaataaagtgaaatcttttcttaagtgactaaggataagtcaaaataatagctcactagtagactagcaaaattaataacaatcatctcaagaacaacatagtacaaaaaaaaataaaaatacaaaggactttgttgatcgaacaagacagtttaaaggtttcaatataaggagcataaatgatatattttgaagagcttacttaaaagcttatataagaattatccaaaaatttcatcatgaatgatcgatacaagaagaatgtctaaacatgtgtctcgcatatgtcgtctcatcctcgtacaacgtgagacacataacaaatacatcatctctatgaagtaaccgtttcagataaggataattagaagttttcagtagtaaattaatttatcccacatataataaaaatcaaatgaaacatggagattgttcacgtttcatgaaagattatcaagagaagaacaaataaaataaatatcatccttggatcctaataaatagtggtagaaaccactagacaaggagacaaattttgggagaatacaaagatctttacgatcaatacttgtacgatacttgtactctgtataaacaaaaaacccaaaaataagaatagactcgtggactatgaagatttaacttcaaaaccgcgtaaaaacttatttatctattatttacaatcatctttcagtattatttaattgtcaattacggctcatttattagttaacaaaaaatcacgttaacagtttgatactttcattgagagcatttgagaattgaactatgaaaaaaatgcatctccctcaattaacgaaactttcatcatcttttgatgatagaaaataattcaaatgataagccatatattaagaaaggggccatcatgccgtcctgggaaggaacctcaagtgaaaaatcttcaggaagacaaaaatgtttaaaaaggtcctactgaatgggattttgagcgagatgttaatgaagatgaaattccagaaagatggaatcgcagtgcttattatccaaaccgctaagtgccattggtggaattagaaaactgccaactttgtgaaagattggcaaagaataaccggagaaacacagaatttgaatgcaaagtggctgtaacgagagcagcacaggaagacgcacctcctactcaaattggccagcccgcaaggcgtgctcgagaactatgataatcagaataacccaaccgattcctaggaatgacaaccagggaacatgagcaagattccaattgatatggaggggccccaaaaccctaagaatcctgatataagggaggcgcaacctgagaatgtagaaccttcttaaagaagtaaaaggccacaaccgaaacaacctcatcgtcaaactaggctactgcaagatccccaaagggatggcaccaaacacctgtcttatttatttgaaagacgatgcccaaggcacgatgctcatccttgaagggctaattcaaacgttgccgaaagtgaaacgaggagaagtcatacacaaagttgctcttcacggagtagaaccaatgatgacatggatccacagagaaaataattttaacaattattagtctaagagaagctcaccttcaaggtctgtaagtaattaccatataagaaggagacaaccttggagaaatcataacagttctgaccttcgagaacggttgaatcaaagatagcctaaccaccaagggcatctgaattttaatactccgaacctccgtgagcaattatataaaaactcacgtaagcaacgcagaccaacgaatgcgagaactttagatgatccaatatatattcggatcatattaactagaagaatagttcaagagatatcaagagggtagatatggaaaactgattgaagaagactccgacgaggagccagaaccttttcacccagacattctaaactcctacttctgtaatgaccgctttagtaatttggattag

SEQ ID NO: 380199 - DNA, 2639 bp, Cannabis indica
ttttaattaattaggatttacattattgactatgttaaatagtaagatattaaagaatgtgatgcacttactagttgatttaaaaacaaacttgttgagtgcaacaatccttccagttaagctttggacgtgtttatgcttccgcagagatggcatatttagaagagcttgaatctttttcgccaattcctctgtaactgacaataaaatccaaaaaaaattgtgaggaaactcttaaagtacacttctttggattcaacttcgttccatacttcaagatgatggaaaaagcttcttctaaatctttgttgtggtccatggaagtttttgacttaaccagcatgtcatcgacataaacttccatattctttcccaagacatccttgaatattttgttgactagacgctgatatgtggctctgatatttttcaatccaaaaggaatgatcatgtaacaattaaatgtctttgtcagtttgaaagcaagtatgttcttgatctgccacatgcatcttattatatttgtttcggaattatgcatccatgaaacttaaaagttcatatcctgacacggcgtcaatcatttgatctattagaggaagtggaaagcagtattttggacaggatttgttcaagtcagtgaattcaatacacattctttaggtaccattaggctttagaacaagtactagattggcaagccagaatgggtattgagcttcctaaaggaaattaatttatcgacttccacctttactactttcactcatactaaatctagtggtcttcttttttgacgggctggatctgattttgaatctatattcagagcatgatagatttcatgaggactgattccagtcatgtcagaatggctccatgccaatacgtcactatttttcttaacgacttatataattttctctccaattgccggaggtagatttttccctaccaaaatgactttaataggatcttcattgtcgatgcatatttcttctacctcctcaattggttcgagattctctctagtcccactttagggtctaattcaacttcttcccgaaccaccctagtgctggttgaatgagtattctgagagcatcatgattctcttctcggaccgtaagtacaatttttggctgagatattgtaacattttcttacacttttctgatcaccccttatcattctaatgctcttgttttcacttaggaacttcatacatagatggtggatggaagtcacaacttcaatatgaactggaatcagtcgccctagggtaatgttgtaggtagtggagcaatccactactacaaaggtaaaatatttaaaggttgtgactatgttacttccaaaagtttccccattcattgtaactggaagttaaacttttccaatggaagtagggtcaccattaaagccttcgagttgaactagagaagacatcagattagtttctactgaaccgatagcttgaaaagaaattctgaagagaatgttgacagaacttccgttatctacaagaattttggatactctcttattttcaatttaagcttcaattgccaacgagtcattgtgtggaaaatacatatgcttagcatcatcttctgtaaaagtgatcaaaaggttcatcatccgtggacgttcagcaggtatttgtacgagattatacttttcttcttgttcaagctcattttaatacctcttttgggcattttggatttttgcctccaaatattgttaccacgtggccatctagtgttggtggagcaactttaggtggaaacgaatttcttggtccacgtgcagcaacaggtcttgccactagcattttgtaccccttgaggggcctgtatagggggagctagtattaggagcttacaaaaaacctactctctaggaaggatttacagctctgggttgtctaggaaaaaaatctatttgtgttctactccttgtctgggatagataatgggtatccgaacctagctggataacttaccattccagaccaagccttcaattttgtcctttagatagtcacacactcatttgtagtgtgcccaatatcaccatggtattcgcacattttactcgggtcccttttatattttccacctttgaacatcggcagtggctttctatagtagacaatgttacaaggagctttgtaaacactctcacaagtattgactaggcttgtatacttggaatatgttgattcttgactcttccccttctttgaggtatcacttctacttagagctttagaacttctgttatttttggaatgacttacgttcgattctaaaacttatatttgtcagttcatttttccaggagcagcactatatctggtctgtgccacttcaaagccgaaaagacttatttgtacagctggttgtctaaaaacaataggttcatacactattagagttgtgaatgtgcttgcagaaggaacaatagttggagcaaacaactgcgaggcttaagttgttgtagaactagtagatggtgttggaagtactccataggcttcatcataagccttgttaggatatttttagcatttaatttaggttaattttagcacatttttcggtttaatttaaattatggttggagcattctta

SEQ ID NO: 380200 - DNA, 3664 bp, Cannabis indica
atctatttcctactattgttcttgtgttctttcctaacaattgcaccagaagggtcgggtctcaacaaatatatttattatttctttagatgttagaatgtgaaaatatattatcacttttagttaaggcaaacggattaccttcccatttctggatgctttcagaagtagtgatgcgtgtttagtttgatctagctggtacccagagataaccatctccttgtacacaaactcaaagtattcccattgtagagcgctcgcagatgcctcgagcattgagctgtatgtgaactcatctgggacgaggagtatcttatgaccatccaaagatgggcaggaatcagaattagctttctttatctcttcgaacaactctttagctttagagaacatatcattacggccgtatactttcaacatgatatttatggtcccaatgttaggggagcactgatttttcatagtttcaaaaatagatatgcagtcatcaatatgtccacttcgcatagaagacataatcatgccggtgaaggtgaccgccaaaggtctagtattagacaattttttcatcttatcaacctgcagttatgttgcaagagaagtaagctttacaggaaaccaaaatataaatacaaataagcttcaaaggtgagaaaccaagaaaatcattaataaaaagaaaaaggaaaaaaacggaagagcttaggattcaaaacgttcacagcattttaacttccaggatctggtgcaaccaagatgctaggtgactgaaactcaaaaaatcagggaattctcaaccctttactataaccatcaaagagaccaatgggcgatgggacgtacttaccattaactaaatgccaaagtttctaatctcccaaagatttgcaggaatcagccatatttacacaataaacaccactaagtaccctaaaggttaattttttcaatgtttaggtctcaaagaaagtacttttcaacaagtctttgcacgttctagaagtacaatggctgcttaaatcacaaaatgagaagtaacaacaagacagtccaacaaatcctattttctaagattttcattaactactaaacatcaccgttataagtttttggtagtagcatttatatgagcagcctctaaaggccacaagtcaaattgcaccagaaatattaagtaatactgaaaaccagatccagaattcacaaacaaacaaatttacctctaacatagcatcttcccaccttcctacgctacagaggcagcaagctaactcataatatacactgcttgctccaaccacacccctttgttccatatccctgactgcttcaacagcttcattcactttcccttcgcaccacaatgctttaacaagaactgaggagacatgcacacaaatatgtattattcaccaaacatgctgatcaattccaggaaagctactaacaaaacttacctttatatgtaagagcttttggagcttccccactttttctcatttttctaaagtattcgtgaacaaggtcatactttccagattgtagcattacctaggcaacaaaaacagcctaacttcctaagactcatgcaaaaattacaacctaaggagtaaacaaatcatgagatagctacctccatggcaagtccgtaagtagctccattaggtttcaaaccactctttcttagctgaatgaaaacccaagacactgccttccactgctgggatggcacacacgcattcaatacctggtaaaaaaatcgggaaatttaaataccaaccaaatgtagagtaatctatgccaggcaataaaaagtagagtatacataaaaaggcctatcttacagcattatatacaacaacatcaggttcaagaacaggatcccagttcttgaactgtatattttttagtttagaaggcttctttctcatgcattccataatgttcagcaattccttcaggcgaccagcttgaccaagtgtgacagcaatgctatgatatgcagccatgtcaggatatatatgacgatttccctggatgatctagtgttagagagtccaacattatcatatacagagtggaatctgaataaaagttcttgatcattacacgcatcagattgaaaacacttagagcatcatctggcttcctggctttccctagaactgccatgagttttgtgtaaacaaacctacaagacacatcaatattttagcttaatttatagtaaataaaagtaaaaaaagttaataatatagagccagtgaatctcatcttcatcagccagaaaattgcatatatgacattcaagactccccccatcatcatcaagtccttactatcaagaactaacttcatgtaccaaattaaaattttcaactcactatgaagtacgaacaaccttagtgagttatgggacagtggaactagaccatgagaattgtatcaaatagtttcagacgataattttaccccaagcttctgaacctataactcttctaggacaaagtgaccgatctataagcacaaaagggagttcaaaatcttcatgtgagcaatcaaatttacctgcttttatttcgtcccctttccttatcctcatatacccactcaactacagacattgctgtctgccaacatctcttcgccccaagcccatcaacgatcctaagcaactgaggctcagtgaacgccagtcccgactgcttcataatcctagaaagtttccagtccttaatggcaagcttagtagaactgagtctgaaccaaaacagagaaaagaatccaccattaatcatttaatcatacacgagaaataaaaattcaacatttccaaaacccaattagcattgtagaacaatatgatatcatcacaaacctatcaacaagaaactgaatcacctcaacctctcctcgtctccgcttcaatgggtcccaaacctttttctcgccattcagaacctcttcactaatctctaagtcatcttccagaacccaccgcaactcatcgcgcttccgggcctcaaacactcggcccaattccctcagctcctctcgcctcaacttctctccggcgtattcggtggtggctccggccagctcccttaacctgagactgtccaacctctcccaaggatttccaaccgtcggaacacccatcttcgaattcacctctttattgaagtccatgtactcgcgtttaagggtcttgaagtgggattcttcggtgagatgaagtggaggcggcggggcttgatcagtttgggttttgttgagtttgcgattgtgcttttggatttctttcttgcggagggtgtggatgatcttgggagtaggttggacgcccttctcgagcaggttccgtttgattttatcggtgtctggttcgaacttgcggagagggattcgaggaactcctgacagagcttccatggctgagtgagcgagtttctccgagacaaagaaataggattacgttttacgtagttgagttgagttggcttgaggggtttaacaaatatgggatcatgggacccacaaaaattttgtccttagaaaaattagataaatcaaaggctaattagaattttttttcctaaactttataaaatcatgcgtcctgaattattttgcagcaaaagggtgcacatttagacccgtaaac

SEQ ID NO: 380201 - DNA, 6003 bp, Cannabis indica
gcatgaacataaaaagaaaaatacatacttgtgactatttgagttttatttttaacattgtaaattaattaaaaaaaaaaacaaataaagtatcttctacaattacaatgttttctgtcatgtacataaaataaaattataattattttcattaaaatgtcttacagtatgagctaggacagtactaacttgaccaaaaaaaaaaaattacacttaatttaaaaaaaataaaaaaaaaatatttatacatacaatattttttataaaatgaataatattttcttactaaaaatatatataaaatatagtatttttgaaaactaaattcgttttttttttctaaaaaaaaaattacatgagagatcacccacctttaaaattaaaatggtctatggaatgagcaaaaataagatattcctaatcctaactatgaacattaataaatatatctatataaaaataagagagagaagaagttggtagtaatgatgtcataaaattacgtataattaattcatcatcagtgttgcgtaatcacattattaagatatgatgaagatgatgatgatgatgatgatgatgatgatgatgatgatctaatataatttaattattaattaatatgccatttgattcagagaacatttaataaattaaacactacatataaaatatatggcctatatagactagagaatagagatagatgctcatatttatatatttataataattgggatattcgtactttattggtaattaagatcttaatttataattaaggtgagatcatcaagcttacgtagcttataatgacgatttaatatgtcatctgtctttgctgttacacactgatctcacctccctttatatttatattataattaatgacactgaatattattattatatgtaatgctgttttatgcccttaattaattatttatatctatattttatatgagcagagacagaggccctgtaaactagcttggtcagaagttgatgagctaatatggcttacgtttgtatgtattgatcagcaatgatgatatatatatcacatatcatatgctgatgaaattggttatgtttgttatatgtttaataatatggactatgtaaagattgattaatttaattgtgttgacaaattaacttaatcaatcttatgcaagtgattacgtaaaagaagagaaatgtaaagatggttaattattttgtaatatgtctcaattggtactttttagtgtcaattttggtaatatgtgataatatacaatatcaattcatatgagagaaagaaagaaagagagagagattgaatctgttatttctcattcattgaaagaaaatgaatacaggacaccctcttttatagagcaaggcaaactcagttagttagggaaagattaactaacttaaccaactaattaaccactaataacaatattaactaattctaataattcaatacctcttttgaggcttaatttacgacccttaaaccaaccacttaaaatggtcatttgagcaaagattattattaataaaaaggtaaatagtacagaagttactaattgaacttttaatttattaaataacaatttagacagatttaattttaatcaaattaaaacttaataataatttcacttgaagttatatttatttgtatctattcatactaaaaactgattttaaattggttatattaaaaaaaaacataaatttagaatctattttgtattgttttgaaaaacttaagatccaaattatcatttaataaaataaaatgttcaatctataacttttataaaacaaatttcaaaatactcctacatgatgtgatgacaaaaagagtatatatgggctttataaaatttttatttcatttattttaattttcattaacaaaaattgtaacaaaaaggaggtattttataatacctcattattttcttcttcttcttctcttcttcctctacaatcctcgaacttgtgacctgaggcaaagatttaaagtactctaccatcaagaccacaaggaggttgtgatcaaattttaccttgtttaacttatataccatattcagctttgaataatgacttttacatatctctctgtgtattaaccttgggttttcattgcttatgattaaacagaattttaacattaacataatttacaggaattaattgccaacaaaaaaaactcatgacatttatatagtgagaattgagaatagatattgatagacatccacactcaaatttgtaatatggattaattcaagctatgggattaaaacaaaaacatggacactcaaatggaattgatggaatcttcatcgctgccttccttgtcgctactgctgctactgcttgcactactgctactacttccacttccgctgctgctactcgaagaggaagtctgttcgtctctaccctctgcagtaacttgagcttttagtgcttctgcagcatttggacctttgtcgacttcatcaccactatcgtcaacatcagcaatctcatcatccgtgtcattttgtcgtggtacattcatatcaaaccctgctgcgttagatttatcttctgcaacagcagtatcatctccatcttcggctacaggtgatgtagaaccaaaaatgtcttccatgtctatctcatgatgttcatctacttccacgttcttgggttcgggtgatacagcagatatgtttggtggttcagatacgtttggcggttcagaggtataatcagcaacagtccccttactggcagattttgcactcactgcataatgaatcaacgttatgatatcgaagactttacgaaaatcaaatttatcccatcacgaaggaaaggaagaaaaaaatccacttgaaacatcaaaatataagaaattacatataccagcattctccggtccaccaatatcaattcgctccacctcaacctgtacaaaagatgtaaaatatagggttaaacctcacatggttagagcatatatcaaaagaaacatactagacaatcattgaagttgatacatggctgactttacataggttcaaacacataaattacaactttgtgtacatgaaatgaaagaatacatacaatttgaagcggttaaatgtacttgggtttcttattcacaaaaaaactttcttacagagctgaatgaagttaagaatagcaagtctgtaaggaaaggtcttaattttggccaaaacttggagtttttatgaataagcagtccaaacataatcctcataagactaatacatcagcagttaggaagttggattggcaaatttttaaatccaaagtcaaatttcttcagggcttaatggaccatacatacactagtttgtaaatgtcacagctaaacattaacatccatggcctaactacacaccatatgaatgtaccaacataagaagattgactatctactcatgatggagtgtttatgagtctatgtctcttacattaacaaagttgggttcaacaatatagctggtttaaggttcaaatgtagtctttttggggatcattcattctctctaattttaattgttatgtatcaagttatcaacccaaatcaacatatatcatcctatgagaaaaaagtgagagcctcacattgaaaatgccatgaaattaacatgaaaatgaaataggaactaaccggcactgcagggtatgagcttctaccaacatgaatagtcttctgagcctttgcaactggagataatcgaggctctatcaccgcagcaacagcagcagcagcagcagcgttcgattcaccaggctgtcgtacgtgccggagttgtttgacgccccgatgaagtctctccaagcgaaaagtctccccatcaaagaacaatacagcatcgctctccttgtaatcctcactttttccctcgaatgccactttaggttttcccaattgattgttctggaattctacactaaccctattttcctttgttttgtgtaaggacccaggcttgctcttatcaatagaagccggcttaaactcatctgaataaacattaacgaaaaaattacaatcaacaaatcgtgacagcaatcttactgaactactttcttttcagtaaaggtacttacatcgtaaagtgcaatacttggaggaatcatccttgaatgaagagcctagagacaggttgtaccatctatcgggttgaggagcagtctttggctcttccttggagatgttcgccattactacttttaaaataatagagtaaggagcctaaatgcaagctacggtgagcggtgactggggcaaccggtgcatgacataaagatgggattggtggcgggtggtgaaggtggcagtagtacagcaaaggatccactgggttcacacaactaagttcgtgtatattgggttttgacactgaaaaaggattgagtgaagctttaagttgagtgcaaactcagaacctggtttaaagaacatatcagattaacaaacacgaagaaaaattccaaattcaaacccagaacttcaatccacaacaaactgaaaagtgtaaaagagcacttggggtccctaatttatgctagttgaatcacctaaggccccaatttaaattttggagcacacagatccccatattctaaaaattgtaacaagttaactctacaatttttaggaactgattaagtgtacttagtggtaacagaaaaaagaaaagaaagggctcaatgaccaggttatcaggaaacagatttctcaatgcacaatacatagacaatataaaaaacaacataaagtcaatataaagccattacataggcaatacatagaagggacataatatgtttcataacatatatacatacaaagtgcctccaaaaccagaaaccaccaacttcattagcaactcaatcaaatacttggacataattggctcaaaatccggcctaaacaaaacaagagacaatcctttccaaagcctactttcacattctcataacaaaaggtttggccaaatcattcaacaaaaccaaaaagtacatattgtgttgttctttttacataatactttcacattttgacaattttaatctacatcattatactcccaaacaaaatattaacacaagtgggggattctcaatcaaactatgaacttaatcgaaactttcataagaaaacaaactcttcaacaataaaaaaaaaaaaaatacaacactttggtaacaattacctttcgttcagtctttcccccaaaatcgcacaccttcaaaaattctcttccaaacctaaactaaacacacttacagactaacaaaaccttccctaactcaatcatattcgaaatcaatatccaatcctgaaaaataagattatgttactcagagcatcatgaaaaattctagatcgaaacacggaatattgttctaatcagatcagattaagaaagtagaaaataaaaaagcaaatctcatgtaaactatgaccagagcagtacgtaacccaccttgtcctcctccgccgccgctagccgtttccgttatcgcttccggtgccgtcgcctgaagttttccctttcagccgcgtaaagaactttctttctttctttctctctatatattaattttttttattaaaaaaacaaataatccacgtgtcaaatgaatgataaaaatattataaaacatactttttggtaacattttttgtttttaaattttttaatcaaaaaattttagttttaaaattttaattttgaaaataaaaatagagtagtataattagtttgtttttaattttaaaaacaaaaaaaaaagaaaatttaataaatttaattttatttttatttattaattttatttaagttgggttttgtaccgaagtcgatattgggggatggatctgggtttaagattggagtagggtctaagttcaaaggtctagattggattgagagttcaaaattaagaaaaaaattattaaaa

SEQ ID NO: 380202 - DNA, 4860 bp, Cannabis indica
atagagacaaatcacatgtcagatgacatgactttagtatatattgtttcaaaccgaaaaccataaggaaaagaatgctaattgctacgtcaacattaattttgacacaattaggtttgtaattgaataataagtcttacacactcattattattatagtctcatagaataaggatattgatctaatttaaatctcactatttttcttacaatacattgagtttcatattttaagtctaatttaatttatatattcgcaatttacgaattgaattgaattagatttaattaaattggatattttataaacttgtaaattaaattatgtaagattattttacaaattctaatatttcaaattaagttacatatattcgatccttttacacataccttcattctatactcattaagtattcttcttcttcttgattttcctttgcagaatggacgacgttaaagacaaggtcaaaggcttcatgaaaaaagtcaacagctctatttcttcttcatcttctggtaaattcaagggccaaggtagggttcttggatcatcctctacttcttcttcttcaactccttccaatcccattccttctcgccttttgaacactcctcaatcgggttctggttctaattccaattccaattccaagcctttacctcccaaaactcagatttccaatccaaaaccagacccttcacctcaaaaacccaagacttccaatgggttcgaccctttcgagtctttggtcacttctgggaagagatgtagaaatgggttttctccacaggtattcaaatgcccgatttgtgatcaagtttatgggtctgaggaagaggtttccgaacacgttgatacctgtgttaatggcggtgagagtggtaatactgctttggaatcgggatcggtcgatattgggattgattcatcgagaaatgaattggaggctcgcgttggagggtttctttcggcgaagccttcagctgggtcgattgaaattattctaaagttgttgaagaatatagttaaagaaccggagaacgcaaagtttaggaagattcgaatgggtaatcctaagataagggaagcgattggggatgttgtgggaggggttgaattgttggaggctgtgggattttctttgaaggaagaagatggggagatgtgggcatcaatggaggttgttcctttggaggatggaattggtttgattaagtatgctgtgaatttacttgaaccgccaaaagaagaacagcagaagatgaccagttcttcatctgttgattctggtaatttagaggaaaaagttgagccaaagaagattgatagacaggtatgttcatatttgataatctctgcattactgttctgtgttcttgaattgctttgtatgtagaaattctttgtttggtaaaattttgatagtgcatagggatgttatgatcagcttacagaaaatttctgcatgaatctaataagtgaaattggccaaactaacaatgtaaaatactaaatttgtaaaataatctcacttaatttactctttacgaccatgatggtcaaattggtcagtgtaaatctatggttgttttgcaactataatggctgtttatagttgcacagtgtaattcatagttgtttctgcgaccatagaaaattatagaaaattattttgttaataatatttgttttaaaattattttgttaataaaaaatttgataaaaagctatttttacaaaacactcatctaataaagtgtttgtcttttttggatgagatttgctattaggcaccctagtaccaccacgaggttgcaccttgcagattgttagcggttttttcataataattatttaattaaaatatgtaaactttgatacttaattatactaataatggtatgacacgatgaaattatgttcgaggagttgtttctcttgtttggcaaaagccctgtaacttgttttttctaacttgacatgtaatgaatgaaattgttctgcaaaaagccaactagatttttatcttaatttctttattgtaagtgtcaccggccctgttcaattcattgttgtgtttattcaaaaaccgaagcttacttctaatcacttgaaattatacttttcgaaaccaaaaatttgtatgggagttttgatttttcttagcaaggaaggcatgatgatcataagctcttaacctctagtttgtatagggcatgtagatgtagggacaatactgcaatttatttcgcgaaaactaattagatgtgaaacgagattgtttagacaggactaattatttgcaatattagctgttcatatacattaaattacaaagaaaatagatatgtaatttgaaaaacagaaaaagaaatgtactgaaagaaagttggctgctattatttggtctagactagtgttgtataagaagctaggcaggatttgaatattttagggtacttttaacatatgcaagcttaggttagttgattagatttagaaaattggctgctattatttggtgtagattattgctttataagaagctatgtatttgaatattttagggtactacttttaacatatgaaagcttaggttagttgattaatttgcttggttggaaaattgcaaaagttgtctaaaggtctttccgtgatggttaggtcaatttggatataggtttagtagccaaacattggcaagtgccacaaataagcaacgtcatcgttgtggacgtcgtaattctgacactgttgcaaagcagtaggagaggaaaacatcaatgaataacaggtgtgattacagtaattgtgataattaaagtattgcaaggtttctgcctgtggtaggggttttttagtttcgatatggtgcggacaagctgcaccaaagcttatgaatgtaatgatgagaatagctaattagtagaagagcggaagcggttttgataaaatgatgagaatagctttgttttgtacagtattgggatcgttaaccaatgtttctacggttacttttatcttgccggcttatcacaggaaaagctcaacttcttatatagtttttttttcgtcttaaatgtatttgatgtttttctgtaaagggtctttactggctattgtactctatcatgattttacctccattagtatcaatgaagtatcatctttgacctacaactaattcttgttttgtgtagaccaaggtgttcttttctgtctccgagaacttagcagctaaaatagagctaccggattctttctataaaatgtcaattgaagaggtgagaagagaagctgaaatgagaaggaaaaagcttgcagattctcagcttttgatccctaggtcactcaaggaaaagcaagcaaaagctgctagaaaaaggtatacaaaaactgtcatccgtgtccaatttcccgacggtgtagtgctccaagctattttctctccatttgagccaacaagttccctctatgaggttagtcattccctctcctttatacaatgactataaacattgtatatttatttataagttgggtaccaaataaacttttgaatggaaagatgtctaatgtggtaacattgccaaaaatggaagttaggtgttttttcgttagaacacggttggcaagttgaacaaaaatcccttattgtctccactcttaagttcaacacaataagaaaaaggggaaaacatgcttgcttataaaagggttgctaggcttgctcattttaggcaagagttttgacccttcggggaacttgttcggcctgataaggaaacgaataaatcacattttagaaacaaaaatctatgatctagtgccagtttggtgttctttgtgtaatgcaaatgatttcatatagttatttaaagtgtctcatatttaatttctctattatcttcagtttgtcagctcagctctgaaagaacccagtttggaattccatctgttaaatccggtaaatatcaaacggcgagtaatcccttgctttcccacagaaggtgggaaacaaacaacactagaggaagaggatttggtcccttcagctcttatcaaattcagaccgagcgaaacagactccgttgttttcacaggactgcgcaatgaactcttagaaattagcgaaccacttttaccggattcagctgtttcttcaacgtgagcttgaattcgggtaacatcttttactcaaactgtcttgagaatcttcatgtttctctcattggtgttgtaacttagttaaaaatcatatattgattttttttttccacaacttataattgattcaatgtacaattatattagcttttgccctttgattgaagcctaaaggcttaatttcttcattttatctttgtaaagaaatttggattggaattgatttttctttttctctttcttcttcatttacaatttttgtagatgttgtaaccctatgtatcttatgttttaatttttatacacttaatttgctaattatttttcctggtggcaatacttaacttcaatctattaatttaaggcgttaattagaccaataaaaatatatcatgtttggcttttaacgattaaaatataaataacatttcaaatttgtaaatgagagtgaagttatgaaaatattattacaaaaaagaaattgtaacataaaaactatgttcacaaatttgtgatggaaaaaatattaaaaagtgtggttagtggtcacaatcttaattatatttcatttgaacacaatgggcaaacacactattttctaaagaataaggattgagacttgagagcataaacatgtgtttccatttcactttcctttgtttggccttttcttctctctctattttttt

SEQ ID NO: 380203 - DNA, 5057 bp, Cannabis indica
tatatatatatatatatcttccatctttattttattgttaaattttcacttttacataactataactataaattttgatttatatttatcctttcaataactattatatgaaaaaaaaacaaataaaaaatactttttaaaatatggatatcattaaaaaaaaaatttgagtaaattaaaaattaggtaaattattttaagagaagctacaaattctaatttttttaattttaaaaggagaaatgctaaagggcatcagtggtgtctagcaccttcctatgtgtcaatatcaatattggttcaactaactatcgggtcccatataatttaatataatagcttttaaagagcatcgctagccaatcgcaaaacaacacgtcgagaaggtgctaggcaccactagtgccggggcctctaatagcaatgctcttttaaaaagatataaaaaaaacttatagaaactcaaaaccatctacttagtaaatggtctctacctcaccaaactttggaatgttcaaaagatagagcaagttttagaagtgaattggcagtagagtaagccaagtaatacgaagacataggaagcataggtttgaagaacagcaaagcacctcactagccccaactcatcaaaggccacaacgaaatgcttttatgcaataattcactttgctataatttagttttttattgaaaatgactgttattgacaacagtgttgtggtagattctttgtcttagttttatttggttcatgccaaaatttggtgctcaccaaatgaatatctatggaaacaataagtaattagaatcaaagaaatttaattttaagaaaaagaaattcataacaaatattttctgtcttttttgaacagataaatataacattgaaatacaacagcattattgccagcaaacaaaaaaactactacatcatcaacaaatagtagaattgtaacaaaataaacacctaaatatacacatattacaacataaataataaataagaataaaagaatttcaatagctaaaaactctactcatctttactcatctttggttccttcttcagtggaactagcagaaggtactgctgctgctgctgctgctgcctctggcctaatctcctcaagctgatgaagaacttgttgaacttcaggtcttgcttcgggtgagggatcaacacaatgcaaggacaatttcaaagtgttgagcaactcatcgcctatagccggtgcatccctcataagttccaaatcaaaaacttcatttgtccactcttctttaacaatggaagccacccattggggtaagtccataccgtttgttggctcccctggcgattttcctgttaagagttccaatatgatcactccaaggctgtagacatcggtttttatgttggctttctttgtcttggtgagctctggtgcattgtagcctagtgatccagcagtggcaatcacatttgtgtttgctgcacttgtcatgagacgggaaaggccggtgtctgcaatgtgggctttggtttgctcgtctagtagtatgttgctagatgttaagtttccatgaaccatgttttcttgagtatggaggtagagaagtcctcttgtaacatccatggctatgttcatccttgttggccaatcaatcacagtctctggaccccgagctgcacataatacaaagtatgattcacatgaaaaatatgattaaagaatcataatgaaatgattgattgttaagttgcttaccatgaagaaaggaagcaaggcttcctttagacatataatcgaaaacaagaagcttttctcctttaggtcccaagtaataggctctaagagcaaggagattaggatgtctaattttcccaagtgcagcagcctcagcttcaaactctttctgccctttagtagtcttttctctcaacctcttcaccgcgacttgattaccgtcctcaagcgtcgccttgtatgatgttccataagtactctttcccataatctcagctgttgcacataacaaatcatcagctgtaaacacaaatggaccatcaaagtgaacaagctttccaccagcatcaccacccgattgaacttcaacgccagctgaagctgccttctcggtggctgcagcctgcttagaagttgtaccatcttttccttttgaagcagcccttttcctgatgaagcaacaaagcaaaaagcagcacaatagtagaagaaccagtaggaggcaacctgcagctattagaagaatatcttttgtacttagtttgtggtggtgatggtgcttcatcttttgagcttctggcgatggagctggagggttttcgggtgtttgagatgagcatatggatgaagtgctataaccacatagctgaatgttcccaacaaatgaacttgaattgaattttttggagagtatggatggaacagaaccagatagattgttgtaagaaacattgaaagaagtgagatttgctaagttgacaaaagaagctggaatttcaccagttaacttgttcccagataaatcaatttgattaattccagatatgttggaaagggtatctggaattgaaccaataaattgattatctttaagaatcaaagctgaaagattatgcaatctatccaatgattctgggatctgattcccaatgtggtttcccccaagattgagagtaactaatgaagagagtctagaaaaactaacaggcaaacttccattgatggcattatttgacaagtcaagattttgaagtcttgtcaaactccctaactcacttggtattgtcccactaatctgattgttgctaagagagacttgttcaagttgacccaatttgctaagagtagttggaatcattccagagaagttgttatgatcaagggtcaatatctggagttggtaaggaaaatttcttgtcccaatattactaccccaactacttggaatagaaccagagaacttgttgtgttgaagatcaaggaatgtaagggaatgagagcttgtgagactgattgggatagaaccagaaagagaattaaagctgagattgattctaaacaacttggttgagtttgaaagactagaaggaattacaccagtgagtgaattattgcttagatcaagagtttgaagtaaaagacagttaccaactgaaggagggattgagccagaaagtctgttgttgaagagataaactcctctgagattaggaaggaacccaagtgagaatggaacactaccagaaagataattgtcatgaagactaatctttctaagaccttggagttgcccaatcttctcagagattcggccgccgagccccttccatggaagctgaatagcaataacttgtccctttaaacacttgattcctgcccatttaccagaacaagcaccatagccagtgtcattccagctcctaagatagccttttggatcaattagttcatgtttaaaggcttgaagagcttgaaaattagcttgcgtgactattataccatcccatgattgtcctgaaacaggctcagaatagaaaaagagaataagttgaaaaaacaagaatcctccatataacaaaaacttgctaaataagcatttatttcccatgagagaaactaaaccaaaaaaagaaagaagaagaagatgagtttctattgtagttgttgttcaatcactctactctctctttatttcaacaaagaagaagaagaagaagaagaagaagaagaggaagtgagtgagtgaaatggtgaagaaggaaagaaagaagaaatatggtatttgaggaagaaatgtgaggagtgagagagagagatagataatgaaatcatgtgagaatattcatggggtttttggggaggagagagattcaggtcaggggaggcatatggggtcagaaagagtcttcatcttcgttaaatttatcccccaacggctagtttttcttcttacaaatgataacggtttgtgttgaaaaacctggacttggtctttcaatggagtcgtttatttattcctaacggctatatttcatcggtacgccacgtaagcaaacactagaatactactactgagcttccttggtctgttttggactttcatgcacgtgcttgcttcatgtaaatttacgaatttgccactatgacctattttgaagtttgaccaaaaagtaaatagtaattttctcaattaaacattactataggaaatttacataatactagggctgaaggttgtacataaatttttgtaagtcttttcattcaaaccatttgtttaaatcaaatcgagataattctataaaaaatacaaattaaaaaatatatcttctcaatctttatattaaatgggttgaaaataatatcaattcgcccaatcaatccgaattaactcgattaactcaattaaaaagattttttatatatatatatttttattatagaatttatatattatataatttaaatacacatttaaaaaaaaaattaaactactatatttttattataacggatgatttataatttgaattcaatctatataataatacaattaaaattggattttgtctgtttacaattttgcagattttattttttacacattttccactaagttttgttaaataaatgctaagcaaaagtactattagtacaattaattattagatttcatatttgtttcgtattttgtttgatctactatttatttttgtgtaagtcttgtcgactcacttttaactagattaatgctaaaagggttaagtagtgcctaccatcttaatatattatgagctcatttagcacagtttttggaaaagcaaaaaactgctttttaaaaatactatgacaaaaaggtgtcggtaagcagttaaaaaacagcttattgaaaaatttatggaaaaactacagctaaaagctaaagctgatacaacctaacttttagaaaaagcacttttgattaaaagactttataataaattatttttacgaaaaatttatttaattatttattatatattataaaaaaataaaaaaaattaa

SEQ ID NO: 380204 - DNA, 2897 bp, Cannabis indica
aaaaaaaagtttccattctatgtcttacattttgcagctagtttacctctaaattctcttaattttgcatgaccataccgtactatattatgtgccacctaatcatgaccattatgatgaatttttcttttcatttagtgattttaaatatgttagacttatctgtttgattgagagatgatagtagaggggatgaggaagggaatgaataggaatggaaatgaatgaaatttaatgagtaaaaaaattaatagaaaaatgtaaaaataatagaattaatgtgtatataatgatttctttatattctttcctgatttagtttttcttttatttactttcctagattctagggctttcagaaattcacttagtatcacacccatagtaaaaattggtcgaggcgcgcctcaaggtgaggcggtgaaaaaacgtatttgaggctatgcctcacattgatgaggcagacttgaggcgcacgcctctgaggcgatgcgtactgaggttgggcaaacgcctcaacaatgggcttttttttttgctgtgtgttagggctgtttttttgtgggcatatttgggctattttttgaagtttttctaatagctattttcatactttgaaatgactctaatagactttagtttggatcattataacaaatttttaatagaaattgaaaagataggaaaatatagccctaaaaaacctaaccctctcatatggaatctctcatctctctccttgtcagccaagtcttcctcctcagtcctcatcaacctcgcacatatatttcttctttatatgtttagaaatttctccatttttcaattaaatttttaaccttttatgaatttagtttatgattttaagacttaactagtaattttcatgaattttatgaccttgttatggtattgtgtgttgatcgttatgaattttaggatattttatgaagtttttcttcttattgttgaggcgtaggtctcgataagttgatacgcctcgaggcatacaccttgttgtgggactaagggaaaacacctcagtactcaattccgattttcaaaaccttgatcacaccatcctctaaaccctaatttttcttagttgcccctcactaattatttgcattcagaaattcaattggtatcacaccatcctctaaacctgaatttttctctgttgtccctcactaattatttccattagtgatgtcttctctagctaacttctcttgctgactccacttcagtctactccctaacttcgaaaattcaaccccaaatcaaatctgttttcaccaagactcataatcctcctcaagttcttgatagtgctcctctcccaatcacctatcacaaactcagaaccacaaataccttcaatggtctcagtccgtcctcatgtgtctccgacttaggggaggatgactatctcacttgtgtcgtcgtgcaacctaaagaaactgatcctttctatgtcaatgaaaagtaaagaaccatatagtgatgcccaaaattaacaccgtttaagattggagaaaattttctcgtatagcccaaggagtttgggatgcagcccatgacacattttctaattctgaaaacatttatgaactttttgaattaagaccaagctctacgagttaaagcaaggggacttcagcgttacacaatgtcacaacaacatcacaaggtattggaaacaacttgatatgtttgacgtatactcttggaagtgtccactaattctgcactttacaagaatattgttgagcaaaagagaaccttcagatttttattgggtttgaacaaggaccttgatcaaattagggatagaatcatgagcatcaaaccatttcatcccgttagtgaagttttttatggtgatagaagggaggaaagcaaacgaaaattgatgatgtcacttcttctcaagatagtaggcctcgggagggggatataccatggtgttctctatgtaaagcctagacatttccatgagacttgttggaggatttacgacaagcctgttgactaaaacccaaaccatgtgctaatgtagttataacctctaaagaatcatccaattaagtcggtcatttctcgaaaaatcaagtgaagcactacaaaagctttttggttagaaatctgttgcgcaaaatccgattccaccttcaaccgaagcacatgttagcatttgttgcaaattcaaccaacaccgatccttggattgtggattctggggcattcaaccaaaggccaggtgataaaggttttccatacattcaaattgtgtattaatcccaccattgttagaattgttgatggatcactcgcctacatgattggagcaggatctatccaagtaacaaatgaatctcctttcattcctacactccattatataactcgctagagacttgtattttgactaaactcaatcctaatctttcgaaatttcaggctgtgggctcgaggaaggtgattcgttgtgctaaagtgcatggtggtctctatattgtcaaggacactcgtacaaataaacaagtttaaaaatcaagttgtgttatgtttttattttgtttcaatttccaatgaaagtgtcccaatttttttttttttgaaaagggaaggggtccgcaagtcttagacaggttcctctccgaaataaattaataagcctcgcttatggcggaggaaaatcatattacagagagatacataggattttagcacaccaaattcgcagagaaaatagtaatggatttcctttacaacaatgcattccaatctctacataaatctaagaaagacaggtcctcgaaaaacttggttttaaaaacccaagtagctgtccaaaacttaactttctcccacatgtcctctactgaacaccc

SEQ ID NO: 380205 - DNA, 2048 bp, Cannabis indica
tataaaagaatactattcatcactataaatatagtattctagtgaatatttttttgcacattattactaatatttattttatatacatttttgctacacagccgtaatcaaatagattttgtaagaatatatgaaaattttccgctggatgcagccaattcagccatgcatgtgtataaattattcaattgtacttctttcttatatctaattttcgcaataaattttgatttgttataccattttaaatatatttttattaattacaaataatgtacttttacaagaaaagttgaagcatatggggggtaaaattcattaataaaaaatgttttgaataaggaattaatatagtctttaataaataagaatttgattaatttttttcaattattttagttttataatttgttgaatctaatagattgccacctgtagtgttagcattaaattcatcatctagaaaaatactgctacaaaactgaaaaacatgtgtgaaagaaacaaataattttcaacaacaatgactacccaacttccacttctgagagaaacaacagagtgtgtgtgtgtgagactaagaagcatttacttttcctgaaaattctagtgaaaataaatgctaaaattaaataagtgaatgaaaggggtttcctattagagaataaattccatgaacaataaatcatcttttttcttaaacatattccttaaaagaaattattacttttaaaaaatatatatttagtgggcatcatcaaggattaagtataactttcccagaatgatccctaacaagttttctctttttagagttctggtaatgatggttcccactgccttagcagtcacctttttctttccaattttcataattttctttctttcttgcatttatttttttttaatttttgaaaaaaacaaaatatataataaatctcactctgttacttattagtccttatggaaagtactgcacctacccacctctctggcgccacctaaataatacaaagccaatataggaaaatcgacccaccaacgtgactacttattaatttctcaaattaattattttataatagacctattaatattattattatttgcatgcacaaatcaattatctaaggaaatattagagccattcattattttttttattcttttttctttagctttttaccaccaatttaagatagagacgtagaatctactttgttgtagaacaacgccatgatattaaaagttaaattaatttgaataataacaacccaaaaataattgatatctatacaaaaccttctcccatatagacatagatatattatagtatcattaagaacaattatcaagtctgtattaatatactcgtattattatcatggttggtaattcttttacgtcttataactaggacaagtctaaaacagtagttaaataaacactgattaattgatctactgtatttaatgatagtgttatttttattgagtgttgtggttggtgaatgttgtgatttgagtattgctagtaggcaccagtagtgcctagcaccttctcgacatgtcacgttgcgattgactagcgatactccccaaaatttattatattaaattatgtgggacccgatacttagttggaccaatagtaatactgacacataggagggtgctaggcaccaccactggtgccctttagcatttctcttgtgatgttttgtttggctaataaaatatttcattttttcaaagtactgttttgattaaaaatggtttatgtgattgataaaaaataagtcaataatttttatttttttgggaatcatttacccctgttcattttttatctttcttctacctactttgcctcccaaaaaacctcttctttttttcttatgctatctcctctatttatataagggtaaatagcggcaaaattcctaaaattttcattttagttttacttaactcccaaaacttaaatttgggcggtaaaacccccaaaactacgatacagtttagtaaattacaacttccatccaaatt

SEQ ID NO: 380206 - DNA, 1877 bp, Cannabis indica
agacatccagtagccacataagtacccgaaatgtttcatactcctccatcaattgaatatgcttcaaggagaccgtagttccttaactgatttggcctttgatccatctcctagatagaattattgagaactagaggaacccagagacacaacgcgggcttcgccttttcccttacaacgtcgcttggatcgaatggattcagaaggtccctcatctaggatggggtcttcgaggttcccttctacaagaggcacttccatgggcaatgttccagaaatctcctcaagatccactatggctagatggaaatcactgccttcgtcagacactgaaaaagtggaaggaaagtctaattagttaataccctacatctaaatgacaaatagagtacctggggaggcctccctcaagactacttggagaggtccccaccaaaatcgtcaccatcaaggtcactaccgtgaagtagcctactgtggtaacgaatcgggaacccaagcatacaataacaacaacaaaagacccaaaccttattttccacagacgaagcaaaccgagtacacataatgaatcaaagaggaagtacacaaaaagactactgataactcgagaatgttaacctaaccctcttaaccagaaagtcctaagcaataagcatgcatctcaacccgaacataaaggaaaatacctttttaaagccctgatacaagaggtgttccccaatgaatcaagcaaactaattccagacacaaataaccttaattcctaagatcaaaccctacgcatgcaaagtggcagattccctcaaatatgagaactatatttcaattaagccttgaaaaaatagtttaaaacctgaggaatacttacttgtactatgggttaaaaatgaggatgatggtggtgccattggaattttgttgtttgtttgatgacggtgactttcctagctttgatagtaggaaggctcgagatgacaacaaatgtcaaggaatgcaaaggcaaagttgggaaagaggccgttgaggttggttcagtgaggtgtgagagggctaaaatttctgggcaagaggttcgtgtgagaggggttcttctctgggcgaaaggttgctgataaagtaaggaaagaaagtgatttcaattgctataaacccccatttatatggatggcaacagttggaatgtttttttaaaagaacggtcctgatcaaattgattgtaggttaagtcacccaacgattacggatacgaaaggttggcatttgatgcgtctgaaggaagagaataaaatgtttattactcatgatttgttgacagcttccccaatgtaccagaggcctgacgtctcttcaacaccagtcgtcattcgtttcccctcaaaaacttacctaaattgtagagcatgagtttcacgactccactgaccaagcaccacgcttcaacgagtcatcaatgacatcgccaagcacggcaacccgaaaagatcccttccaccttctgatgatatgtccgcaagttagagatatgaaatgaacatccaggagaaggttgcaagctcttgatacgctcaagttttgggagcttgggggtaaatgttacctttgttcccagatgagttctacgtggaagtcacaagagggtgccacatcggattaaatagtgatatcataaaccttcccctaaacaagcttatgggaggtgctgctgtacccgaaagaatgcttctccaacaagggccgagatgattctagggattctcgtcttatgcttccgttattgagagtgaatgggaatctcatacaccccgggatgatcacagattggctaatccaagaaaaccttgggcgaccttccttgaagctccttaaggcctaat

SEQ ID NO: 380207 - DNA, 2599 bp, Cannabis indica
aaacttgaggtgtttgtccacattatgtttttctttatttgctcaaagtaattttctcatcatttgaaaattaatgtgggtataacactattttcatgtaaaaattgaaatacctgcacttaatttctgtaggagagtatctacccatctccaagtactagtttttacaaatttgggttatctgaacctgggagcggtttttattatggtgttggcaatgcttacgaggttcatgattacgaccatagaaatgatgaatataggaggccctcagagaactcttcaacagtgaccaatgaacacactgcagcagcaaattcagggtgggaaggaaataccaatgtgaacagacgtgacaatcctgtagaatgtgagttctttgctgtgattatttttttcctccaaattggttttcaagaatgtgctggtcctttaatttttttggcctgtccacgagcgagaacaaaatagagacctcagtatattatttacttgggctctgtagacttggcagttcagtggtgcgtgtttttacattgctttgcagtttaattgacaaaaaaagtactttcaagtagcatctttataggagagggacaatggttattgagttacattttagcattttataacatgctggagtgggagagagaggagtcattatttgttttatctgcagagctctggatatattgacactttttattttgtgcaacttgatgattatgtcatgtgctattgtgccgggcatctccactgccccttcactgttttgttttctctgcctaacataacttggaagaacgaactactactcttttagttttaagttcttttttatacttttcaggtccgcgaagacatcccggttctcatgactatcaggtgtgtagctcatctttatctaacagtcacaccgacaatttcttcgaatgaaatatgttctctcagcagaagtccatgtctgatatccctctatatagttgttttcatactctgcatttattatagcaatgttgtgatagctgtttttaatgttctgtggaaaataatgcaggttgtttggcaagataacattgatcctgataacatgacttacgaggttagagttttgaaagagctgctatatgtgcccttcctgttgattcatgcatgaaagcaatgataatattttatttgtttttgtcttttgaaaggatgaaacttgttatcattcaaagtttcaagtgagaaattcgtaaaattttaattgattgcttgtacaaaagttcagtttttaatttgttttttttttttgaacaaggtttttaaatgttttacatgttagactgaatattataatcgcatgtttgccattatttctttctttctttttcttatattttttttaactattgagattattagaaggaaaaagttgtcagtcagatcatatttttagctgcttgtgaccttgtgagatcacacctattttcacattccacaacacgctctgaaagtttagctaaagaatgtttgagctgtggggtctattcctgtaaacacagacacacacttcacactaatttactagaaatcacaagagggaagagtccccatatgggggaagagtatgttggtgtactggaagtggtgcctctacacctccagatattgttaaacattggagtgtgaatatgcccgtttagttgctcgctaggaatttgctgtatctgtgctttggtgccaccatttttatttgtttatctaaagaattattcgtgatttatcatttcatgttcaggaattactcgagttaggtgaggtggtcggaactcaaaatcgaggtctttcactagaacaaattgctttacttccagtctcaaaatacaaatgcagcttcttctcaagaaagaaatcacgagacgagaggtaaacatttgaacttgtgaactaaatcgaaccaaccgtactcaaaattatggtgtttttgccttgtaatttatacttccttttgcatgttgggacttttttgtcatcacttactattataaaaaaaaaattcagaaaattgttactgagaaggaaacaaagcaagcaatttcatgagattccactagaagtttggatgggagccttttgttatatgcttgactggaacttgtttgagatcataaattcatatttgaaaaagaaaaaagaaataactttgatctttcataacaattaaacccgtttattttgaatggatgtagatgtgtgatttgtcagatggaatataaacgaggtaatcgacggatgactctaccatgcaagcatgtctaccatgctagttgcggcaccagatggctaagcattaacaaggtaaaaactgggtgaaacacttcggaacaatagtttagtttcaaggttcaatttaagctgacaatgtcttctacacgtgatttttttttccaggcttgccccatttgttacaaagaggtatttggtgatggatcaaaacactagaggagatttcaaacaagagatcgtttatttctctaacactttaactttgggtatctttttttcaatataacaacgatgtttgccttttccattttttttttcttcttatcaa

SEQ ID NO: 380208 - DNA, 1049 bp, Cannabis indica
ttaaataaacccaccaccaacattataaaattactctttaaaaataaataaaattaaaattaaaattaaaatgagcatgtgcaaattttctctacacctccaaattcagcatgtatatgagccaacatattgaattccacttgaacaagtttccatgtttgatctgttaatcacaactatagtttcatttcacgtggtgattattatgatatgggacttgttaaattaataaaatgactttgaatatggtgtaatattttttgtggatgaaaaacttaaataccatcaatcaaatgtataaaatgttatattattaagactttgaattgagaattagctgtttatttaagaaaactatatgttcctttctcaaaatctagagatttatttgaattttgtatattaacaaaaaaaaaaaaaaaaactctatgtttaaaataattaaactcttaaatgacttttcataaactttttttatatggatgaaaaatagtgtaactaaaatgtggcttaaaaaatatagcaatattattgattagtgagataaaaaaaaatattatttaataaaattggcaacttgattggtgaaataaatcatccattacaaatttacaatagactttcaaatgaatcagagagaataatgttgatttatttaaaattacaacctggattaaaataaaaggttctagctatacaacatgctcattattttatcatttaatacaacatttaatattttatcatttttttttttaaaaaaagaatactaggttatgctaaacctttttttccttaggttgaaagattataattttttttttaaaaaaataatttaaattaatataataattatttttaaagtttacttgctcaataagcaaaacaccaaaaataaaaccctctaaaaatgtctccagtccttcaacaactccagtcaaatagattatagattaaaatttatttaaactacttttaaaatattgaaattatgttatcatcaccttcacctcccttgaatattattattttttattaataaaagtact

SEQ ID NO: 380209 - DNA, 3701 bp, Cannabis indica
attccactgtccttatttgagtacatgaaggatttatatcaataaggtgataccaataaggtgattccacaaaaccgatcacatgataccaataaggtgagcacctaacgatttatatcagacttcttaccttaagcaaagaatctgcaccagcactagatgagacgttgtcatttggctttggtatcgaaacattgatatacgcaggtttagctgttgcacctgttacagaactatccttgtcgttcttcgataaacccaaattcaaattcgatgcgattcttgggttggtggggatctgcagtttccctatccttcgagtatctaaagattgaacattttgcgaaggtgattgaaaagtctggggtgacggtgatacctgatgaacagaagtatattgcaaacttggtccttgagggcatgaaggcaccggaggctgctgatgagttgcagaatactgtgaactagatcctggagagtaaaaagacttttgttgatcctgaaagctgctataggaagaattttgatccaaaggcttttgaaggtggggttgatttggactactatggtgaatttgagatgcgggagcatcatgtctccagtaaccatcgtgagcaccatttggtaaagcacccgactgaccaaaacagaaatcaacaaaaacatagtaatataaaaactaatcaaatacaacttctttatgtaaccaaccaatgaaaaaagttcattctagccacacaaaaatctaaagacaatataaacatatcatccaatgtttctcgtataaataatgtatatctatatatatacaaacacatatatacaacatttttgccttgaaacgaaccactcacacacaaacccaactagtctacccatcttaatgatatcttaactaaagagaaccacacggggtgccttgagttcagcaatgagaatacaaagtgaaacacacttgctctttattaacaaaattgaggaaaccttacttcactgtcaactcagcgaaatgaatagcaagaaggaaaaggcaagcccaaaaatgttgtatggcaagttgcaagcaaacaattgcaatttagcataacaggaaaaggatgagaatatcgacacaacataaatcaaggcaatatgatagctggtacaacgagtaagatgactttacatgtctagttaagtgcagaatcagagccaaactttaaacttctaaattaaaataaataaaaaaacataaggatggtgtagaccgtagatggcttgtggttcattgcataggcatatgtgtgcgtgtgtggagaataaaaaagaaaaagagtttctggtcattggtcttgattcttgatgaacaatcctaataaagaaatatcagctgaaacctattagagcaaaatcaaactacaattggttttgtagtccgaccaatttgtatgagaagtggacaaggactaattaacaataataacaagaagaaagattcaaaaaatagcgactacttgcatctataccaacaaaacatgaactaacacataatggtgtgtagtttcctcctatactctggaaaagaaaattcaaacctgaacaggagggaattcagatgaactggactcgggcctccaagatgaagcgtaaggtggtggacctggaggaggaccgggaggtggacctgggggcgtaaagggagggggaggtggaagtggacctggaggtggaggtggcagttgttggctgttcaaagttggatagctagaggtgacactaggaactgaacctccaaaattagatgttccaggcacagacagattctctgtcccaggagcacaggggacctctgactgattgtaataatctacccattgcttatattgttgttgataattatgtgatgttgcacttgcagttgcagttgtagttgtagttgtagccccagaactgtaagcactggttgtgcctgaattgtaatgtggatattgttgagaagaataatttgcataactggcatcattccacgaggtcgtctgattattgtaactgctacttgagtaacctccagctgtctgataatcaccaggattgtaataagtgcttgaataacttgcagagccagcataagacccagtattctgaaatgaggaaataggctgataaggagcacctgtgttttgatatgctcctacgggttgtgaataggaagggttagattgttgttgatagccgttgtagtagcttgagtatcctgagcttccataaccatatggatcagaagaatttgtgtatgatgcatatccattgtaatcttgtggtgcatttactgttcccaaacttgatgaactagaaacaggaggttgcatgtgttgttcatagtggtaggttgagttagaaggcattccactagatgtggagttatccaccttatgagctgtccatgatacggcttcattgcctgctgctaaaggaagatgcgaagatgtttgtccttgacttgcgtatacatgtcgattctataacaaacaacaatttacactatgttagttaatagtcaatacaagcattgtaagaacttatgtcaaatttaaacctcaactattgcacaagatacaagttgttctagacatttaattgcatcataaaaataataattttgcaactatgaaagacctagaagcatgccatataaagtcgttaactgtttcactagaaagtgcttgcataggaaaagattaagcgccagttcaattatattacatcaaagtaacagaaaatacacactaaaactggaaacaacaccagaagtttaacgatgcacgagttattctataaagcttggttgttcttcatgtagcaatcattagtgtatactagccctacctcaaacttccctaaggtaagcaaatcgcccgtgatgtagcaaaataagaaaaatagaactatcccatcaaactaatccagtttggtgttaagaaagataaggaagctacctcgagcgaattggagtccagtggagctatggcctcggtattacctccttggttcatcattacattaacattctaccaaagacaaaaacaaattttcaataaaccaatagctttacttaaaattaaacaaattacaaattagacatagcataaataactgcaaaatcatacaaaaaccctaattgggtcttagaaaatcctatcaatacttaccttcaaaaaagcaccatagagctcgaaaagcaccaaattcctcaaagataattcgaagtaggtcaaggtacggaagaaggaaaaaaaaacccaaggggaaaaggaaaaacaaattgagatcaacaagaacccagaaaagcaaaaatgaaattatacaacaaaaacgataatagaacaagtaacagtaatgaatggacaaccaaaaataaagtagaaacgtaagaatcaaaaaaccgaaataggttcggagaattttgagacaagaacaggaaaagtgaaactaatataaaaaaaaatacagttaagagagagtaggggtgtacgtcggtcggtttagtcggtttatagcatatttttatcaacccaatataaatatcgggttgcaaatatttaaccataacccgcccaataaaaaattagagaaagttcaacccgcccaatgatttcgtcggtttggtcgggttaacccgtccaaaccgttcttcacttttttttataattattattgttagt

SEQ ID NO: 380210 - DNA, 5211 bp, Cannabis indica
aacaaagatgggtatatatgttttgttataggatatatgatgcttgttgtatatagtaaatcatttatttaagatggtatttattttttattttattatatatactgattatacataaattttttgatataatatacatattttaatagtgatatgtataattttattagcatgatatatatattttttaagtattaatttagtattattataatttttttgtgatatacaattttattattacagtatattaatttttaacaatacgatacattaactactcttgtatatatttaattctaatatatttatttatttttattacaatctaatactaaaaaagtttatataacttaaattgataaaaaattaatatgtagtaaatatatttttgataatttttattaattaatttattatattttatcgttttgttaattttttttttttacaaaaataaacatttattaactaaatttttaaatttaaaattgcatctcaacacagccctttttattatgtataataaatgaaacttggctttcgattttttttttttttgattactatggagaagccggattacttgtcccagcagactcccaattttgtccatatctcgccatctgatttgtattttattaccaattcactgacttttctaatggtttgactttgccgtttattgactaaaagattaaaaactagggacgagcaaggacagcttttaacgagaccaaaatctctagagacatatagatcttatatttcaattggtaataaccaatcagatcaacacactctatttaacgaggttttacacatatttattgcattacttatttaacgataaaattggatcaaatgtgatcgaaggataagttagaagatattattaataagtacgatgtaaaagaagataattattctattaaataagagaaataaataattgacttgttaagacaatcattttgactgagcaaaaacacttttggctggttcttcatgaaaccgtacgttaatcaacgctctttttattgcccaacttggttgaaatttctacgaaggatgcctacgaaaataagagcactacattagactcgggccctcctattttgtcatgaacacgtgcacgtgtatataaagacagcctccttacaaagcaaagcaaaatctcatctcggttattttcattttagtttataacattctcttttttgtttatgttaagtttttttctgcaagaaaacgatccaaccaattgttaaactgattgctagtgatattgattagataccatacggttcattttcttgcaaaagttgtacgaatctacaaagggcgttgttttattgtttatatgaatttatacattacttgttaaaaaagcgccaaaaatgaagttcgggaaggaatttacgagccaaatggtgccggaatggcaagaagcatacatggactataattttctgaaaaccattttgaaagatatccaaaatatgagacagaaaaacaagccaccgccagcagcgatggggcttaatcggaggccaaccctttacagagcctttagtggtctgatgaacagacagttcagcacgcgccggtactcgccaacgtcgagcaccatcccgagaaacgacattgaaagtcaagccattctggttaactcaaccagagaagatggctcccatggttaccatacaacgtttctcatggcatcagaggaaggaggagagtacgagctggtatacttccggaggctggacgaggagtttaacaaggtggacaagttttataagtctaaagtggaggaggtgatgaaggaagcttctatgctcaacaagcaaatggatgctttgatagctttccgaattaaagttgagaatccccccggcttgttcgacagatctgtggagatgactcgtctggcttctgatattgcttcttcggctgcagttttggcagccaccactcctagaaacattcgagctagtagtaagtttgaatattgttatgacatgatatcatatatagccagcaaacactagttatttatagtttaattatgataattgatttatccctcctttttttgttgttgtggtgtaacaggaaaagttaatgtcatggatgcaatcgaagaggcaggatcaaataaccttcaggagccttctgaagaaaatagtggagacgatgaaaaagatgagaaagagaagaggagtgcaaacattgtgaaccaaagagttgaagctcagacaccaaggaatgttaggagaactagaccagctccgttggaaattctagatcatgtgacaatgaatcaaacgcaggagactcctcgttccaccattaaaggcgttctcaaggttcctaagcagacagagctgaccttcaacagggaaaatcttagaaaagttgaagaacaacttaagaaagctttcgttgagttttaccagaagcttagacttctaaagagttttaggtaataaaaagagataactttagtactttactttgctggattgtgttagtgtcttctcttttagcagagaggctaacttgttttactatgaactttctcagcttcttgaataccttggcattctcaaagatcatgaagaagtatgataaggtaatttgctatatcaagaataatatacatttcttttgaacctaaaaatgtgttcacttttgcagcaataactttacttatattttgaattgtctctcacttttgcagattacttcaagagatgcatcaaaatcttacatgaaaacggtggaccagtcataccttggcagttctgatgaggtgagaattaatagactgtattaagtcacagagctagtgtcaagcttaaactatgtagctgcaatttgttctttagttttatcatattatctaatactaatagtacttttgtgtacaggttaccaagcttatggagagggtagaagctacatatatcaagcatttctccaatgcaaaccgcagtaaagggatgtccatcttaaggccaaaagcgaaaagagaaacgcacagaatatcatttacgactggtaagacttcaatactgttgtttattttcagttacactttactttctttgtatacatatactgactatattttaatggacaattctttcaggtttcttttttggctgcacagttgctctcatattagcccttattttgatcattcgtactcgaaaaatcatggaccagccagggagagctcagtacatggaaatcatgtttcccttatacatgtaagtttatctcgtggattaattttttattttctttcttcaagtaaccaaaaatctattcatttcttaattattgaaatctttttttactgcaggttctttgcgtttattgtgttgcacatggttatgtatgctgggaatgtgttcttttggaggaaatacagagttaactaccccttcatttttgggttcaaaccaggaacagaattaggctacagagatgttatgcttccagccttcgttttatctgctttagcactcggctgtgttctttcaaatcttgacatgcaaatggacccaagaactctagattacaaagctctaactgagcttctcccacttctgttgcttgtggtaagcactaatttctttacagctctactaaatcatataaacaaaaatgatggttttgaaaaactagatttttttttttctgcaggttgttactgtgattatgatatgccctttgaacattgtctatcgctcaagtcgatactttttcctcacctgcttgttccacggactccttgctcctctctacaaggtaggaagaatatttagtgtataatttttttttctctaagacttacaaagagaattactaaatatgtgtaacctttgctatattattacaggtaacactcccagatttcttcttggctgatcagttaacgagccaagttcaagctttgagaagtatccaattttacatttgctactacggttggggtgactacaaacacagagaaacaacttgcaaagacaacagtgtatacaaaatttttctttttcttgttgctgctgtcccatacatgtctcgcctgcttcaggtaaacttgctctttctcttttctttaatttctcacttaattttttttttattattatgaaattatactgaacattagcaatttatttattttcttcagtgccttcgtcgtttgtacgaagagaaggacccaatgcaaggttacaatggtattaaatacttcttgacaatcgtggctgtaagtgtcagaacagctcttagtctcaaccaggcatctgttagttggaaagttgcttgggtattctcagtcttggcggccattgtttcaacttactgggacttggtcttcgactggggccttcttcagcgtaactctaagaatcgatggttgagagacaagcttttggtcccacacaacagtgtatattttgtagctattgtaagttaaattaaactaaatacagtagtttttaaatattttaatcctaaaaattcattttttaactgttactgaacgatgttacgtacatatttgattgttgcagggcatgaatgtcttgcttagatttgcttggctgcaaactgtgctcaatttcaaagtcaatttcttgcatagacaaaccttaatagccattgttgctttgctggagatcgtccgtcgtggcatttggaatttctttaggtaattaacaagaactcacacatataaagaaatattgttgtagaaagagtaactgagtttgtcatttattaacatatataaaattagacactttagtaaatgggttttgtgttatatatcaggttggagaatgagcatttgaacaacgtgggcaagtacagggcattcaaatctgtaccattaccattcaactatgatgaagacgaggacaaagatgagtagagcgttccacaagtccggcaaggatcgagactaacgcaattcaaatcatctacttgtctgcgactacaaatgggtcctcaagattttgtctacactttccattgtaccattccaatgtatttcttttagactgcagtccaactccgattatccaactactattctttcattatttttcccacctgtccttagttaggaaatttcaaattcttgaatttacattacactctttattggaaaaaaaaaaaaaaaaacggtac

SEQ ID NO: 380211 - DNA, 8275 bp, Cannabis indica
acatatattattactatatatactttaatattcttatatataactctctctctctctatatatatatagttattaaaaactgtatcttagataaatattactaacaaaaatgtcagatatttttaactgttgtctattctcatttttatctggattttcactttagagggttaaaatttcttagtttcatcatggttttgcagtacagttataaataattttcgggtgctttaattttaaagaccatttttttttggtttttggtattttacaacataataattttctttttatatgtaactgtgtattatgtaataacaaaccttattatcttactataattttttttaacaacataattttcttaatttttttgaaattatgaataatttaggtgtggaaaataaattttaaaatagttagtagcacacggtcgacgacccgcgagaagagaccgtcactctctctcttaaaaaaaatatatattttttaattagttacaatatatatttataattattgggataaatataaatataatattaattttaacataataattaaattatcttacgtatactagagacgtttagatcttataaaaaaaaaataagagtaacaatttttggcactgtatttcatttgaaatttgccgaaaattagtagaatgcttgctgtaactataaaatagaatgttatatatattgaagaaaatattataatgttatatatttaggaattttttcttttgaattataattaatttggtttggtaattaatttacagaagcttggacttgtggatagttgggttgtgtacgaaggagaaagatcaattgatgttgatcataataagaagaagaagattaatgttattagaagatcaaaatcattatcatcaacatcaaaaaagccaattttctacataaaaaagaacatcaattatctttacaagtcatcatcatcatcacatgttcttgcccacgtgtttcgatgtggttcgtccgataagaatactaaaagatcatcatcatcatcatcatgtggtgattacgtgattgaaggctcttacactgaaagatcatgtaaagtgttagataaatggtgtaataataaagtggttgctgaaattagaagaaaacaagaatgtgttagtggaatttcctttggtaatgaggtttttcaccttattgttcaccataattttgatccaacttttgctatggcttttctaatgttgttggatcaaatgttctcttgaattttttttcattagttattactaattagcttagctagattaatagattatttagataatatttagttaagctagaattttgacaaattataaaagtccatcatgatttcttttttcatggaaaagaatttgtgagtatggtgggtttcgtatgcagtacgcaatattgtaaattaatttattagcaaataaataattataattattagttttaattatttttaatttattattacttttgagagaatggtcggttgatgatgactttgactatatttaaatgattaatttagattcatctgcaattaccaagatgacccgatgaattcaagaaaatgtatcgatcaaaataacattattattatttcttcaaaaaaattaataataataataacataattattagtgaataaaaacaaatgtttaaaaatgataaaaatggagatgcggggtatcgatccccgtacctctcgcatgctaagcgagcgctctaccatctgagctacatccccttattgatgattgtttgaatagttttatatattaacttttttaaggcctcgatagaaaaaacaaccaactatcccaatttgatctgatgtttgcctacccttttgtttcaattttcatcattttaacaaatttcttaaatactgacttcaaaactaatccaaaattgagtgatatactaagttgggaaatggagtcattaacaattctttaaatatttaacgtgtggcttttactggcatcttttcttacttgagtcaaagggttcgaaaccaaccacaacccttcttgtacggattaaaaaaggcttagccctctaaagattagcttggtgtcgtaataataataaagagatctacaccacagattcccttttcttctcagcaaaaaaacacaattctttgaatatttcaaaaatattgtcaagagtgaaaaataacaagcacaacaccaaaagcatgtggttacccatagttaagagaagtggcaataatgaatatttaactaaagaggaaagagatgagataaataattccctgctgctgtgtttttacatctgcctaaaatggtatattacatacaacatgagaattaaccaaccccaccttttcatcatatcctttataaactgcaaatacctttgccccatacaactaatcccattccagttaaaatgcttactactactactactactacaactacaacaacattacacacacatatgtacaccctactaaaggggaggtattaataataaatcaacaacaattgtcagaaggaatgagaaattttcctatatgaaaaaaaaaaagaagaaaaaatcgatattgatgatcactccaacctgtccctgtccctgtcccttcctctgttccattctaatggcaactttcttaatttctgctgattgttagtagcaatatccgaaactcttaccactggtgcaggcggcggcatcatacatgattgctttaaaatatttgtatttgtatgtcttgggtaagctgcaattatgtctttgcctgttctgttaggggacgatctacttgatctcggagttgaccatttcaaagtttctttcctaacatgacttggatcctgtttgtggttgatgtttgagagtttcggtttctttgaaggaaagggtactgtttcttcaattcttgccatattctcaggccgaaatacagaagctaatggtgactgagattcttcagttttcccgttatatttcaactttcgagctttcatggtcttctgagacgacttcttcggccatcttatcgtcctatccaggctttgccttggggggttagttgcaatgtcatacagcgttctagctgcagcatatagtctcggacagtgcccagctgtcgcaaaaataaatacgttacaaaacaataaaaaggcaaagaagcatgcagatatcgtaactgtatttcgaaaagctcttaaacaagaaaacatataaccacgacataattcaactaacattttaaccaatcccaacgggtctccaagccctacagattacttaggtttctcatttagtttgtaccgtacttgaatctccatccatactccaatgatcagaaaatcaacaaaggtcaacagcattggcaggtcatttagttagaccctaaacagtaatgtatgcaatgcagagaatttgaaaaatgaagtaaacgttagagacctaataccagactagccaccaatgatatgtttaatataattttgaaaggtaacgtcgtcgtcgtacttttatattccagacttttatatgactgattgctcttctccttttaacatcacttctacaatcctctttggatcctttcaaacatcacttctacaatcctccttccatgggctcccaatacttgaagatgaacaacaacatactatgtatttgtaaaacgcaaatatgcaattatgataaaagaaaccgtaccatttcctggattgttcaccttgcctctggattctgcatttccatgagaataaataaaattataaagcaatatcctagttgaacctccaagaaaaacagtaatagttacaacatgataaagtagaagttatacatgaaccaaatttatgaaaatgccttaccttccaaacatgtcgcttctgaatcacatccacgaccagtaagactagtagtgggttcgtgaagagaagttacattgtctacacaagccacttttagccctgaagggaccaaactctgatcatacttaagagactccaagtctgtaaaattgctagtcacagtatcaatagaactcttaacctctttccctatttttaaccatctaccttggcatgtacccttaattgtggacaacttaactgcatcagaactagttctgcagtgtccacttgaagtatgtgaccattgaaaaggtggcaagcttactcgacgagacatttgcttgcctggacgtagatcagcagtattttttgaagataaagtaggttttgctgcatccaagagcaaagactccaaatcctttggtggaggaagtgccaaccgttgcaaaatttccttaggttgatgcaacagtgactcaggtggattatcaggagcctcagacttgatacaagtgtcctgaagcataaaaactttagatgactaccgacacttaataatttttcggacctacaattattatactttcgaattggcataaaaaataaatggaagacaattagcctttcaactatcaatggcaattttgcagttcacatgtggaattgaaatgcagggacccaacatctagtctactgaatatttgtagaaaattctctaagaccagtaaaatggatacagaagtagccaatgacatatttacagtcatcaaccacaaaatgcatgctttaaatttttccatgacacaattcaccagtatcttagatatgctcatgatactaaccttattactagacgacacatccatcaaggatgaatctcctatctcaccattgacaccactagcttcaacggaaacagaattcaataaccacgcagacatttttctgtttgaacaactgtctatctcaacaatactttgggaaacaagtcttgggaggtgaaggagggagcaagattttctaagggaattcagaaaactttcattcacagttgttgctttcttccctttatccttgcctaggctaggaggttggtaattgccatgaagtagatcgttcaatggaagatcatctacaaactttgtgacgtcatgattatctgacttcagtccataaactcctgaataaatttataaataaatatcactggtaaagagcatatttagaatatagacagttggcatgcagcaaaaaattagtgagaataatagctaccaagcaataaccccatgatagggttctggtaattggataaatgctactttggtgtgattaaatacatcaaaaaagaagaatagtgagaataaatgaactgtaggaaaagttcttacatttactagcaagaaacagattagcataaataaacacagttaacctaccaacgacttaaatataaaaaatgacagttagtaatgacacaaaaagacggtaattattctgccagtttgtgttattttattttattaacacaaaccggtaataaaataaacttcgagatgcaagaagaaaaccagtaatagcacatatcatgtgaaaatatttttcataccaaataagctattccctccggaagccgaaccaaagctggtcgaacctgccttcattgaaaaggaatcatacttggtctttacaggaactctaagacttctcttgtcacctcgcttgctgttaaggttgctcttttgtttcaccaaatgagttttatctagaatgtttaataaagaaagaagataagtatatatcagcccaagctcctacccaatgggccaagaaagtaaaagaactacgaccaatctaataaacttgatgtaaaataattatctcaaaaagaaaaaatacagaacgtgttaatttccaccaaataaaaaacttttgatttcatttccaaaatgtgtatttgtgaaacaattaaaacatgcagaagcattttgaatctttccagaagtgggagacttccccagttcaatctctcttcttcattacccaaggtgaactatccatttttacagaatctcttcagaaacgtaggtcgcacaatcgcagaaaaaagaaaatttgactttctattagacattgcacaccatacttctctaaaatcttcttatcattgggtgtttacctgaataagtgccttttagtgaacatgaggtaagtttatgagacatatcctttaccccttcaactcctgtcggaggaggatcttgcaatttgatcacacgtggtcttttggaacatagattactactacttctagacacttttcctgctttccgttctgactgtacaccttcggccttgggagtcaacaaaagaccattcttagacctatcctgtaagacttctgacaataattcaccctgattgctgagtagctgattatcctgcttacgtagttcaggatataaaaaatcttttactgcagttgtcataatcaaattccaaccattagaataagtactagaatagcagaaaaaaataatgcaattatagaaacttttgtatcaagaatgtaagttaaatccaagggttcgagatgtggtgaggtaactgaaagaaagacatcatcgaagtttactcaaattgaaattgtacatgttcacataactgaacttctttccacattataatatgtgattgagtagcaaaatatgagattagatccataagcaatcaatacatcattagaaagctaaagggaaaattgtaaattgtcttcaaatatttccccaataataactagagatgattaaaacatcatatatcattactgaatgatatataaaaaacagaacatacaaaagtactctaaagaaagtacagagggaaaagcaatataagcaaccagattgacttatcaagttcccactgacgaattatgctaaagaagtgtggcccatatgttagttaccttatgtgccacttatcctggtcatcctgaaaacatccatctcaaaatctggttttcaagatgttataaaaggtccaagtacagcagaacttgaacatctcctttctgtagactgttccctaacggataacattctgcaagtggagttttttcttaacacaagtcatccacttatccttaattcatccaaatatatggtctgaccagatgaaaatatgtggaaaaactaactggcgaataactacaagacaaggaaacctatttatagcctcgtcaaaaacatgaatgaaaaaaaaaaacatgatttttattatccaaagcacataatacatgtttcggacaagtcatagtccgacttctaacgcatacgtatcactgtacatcaaaaatttcccaaatttccctaatttcgtaataacgcagaaatgaaaaataacagttattgtaaccactcaaattattgagaaccactcaaagaaaattgctaaaattcctcccacgcctcaaaaaatctctattcagagcctctaaattgatgcttgaaaatatcgaaaaataaattcacttaaaaaaacatgcttttaaagaaaacaaaagcgataaactcacatttttcactaatatcaatactagaacggtactcaattgaacggctagcgataactgaaacgccatcggaatcgcaaccttctagctcctgaaccgtgactccggttctcgcaaacccttccgatcccatcaactttgaagccgaagccacatccacaggtaaaggcaatttgaccgcatccataactaataacctaagctaaaaactacaaaaagactccgattcataacatctcttcgaaacctaacctttttggcgagaaatcaagcttttatcatatccacgaacaaattgcaacctgaaaatgagctgaggccttgattggagtccaataaagtgaaggaaagttggggtttctggtgaggatgagcatattgcggctatgggtaaaccagagaaagggggttttttttctagggcacgaattggatgaagaaaaataagtatttatacttttcgggaaaagaagagtatgttaggaaacatatcgtcgatagggaatattccggtgaggttaaattcaccgtaatccatatatgacgtggcattatccaataattacacgaaaataatagcaataggagctgtttcacacagctttgctttccaaccaatgatcattcaccacgtggtatttgtttgataatctgtatgttatttgggtttgtgtggttaccaaaataccccttgtggtgactcactagtaatggagttttatttgaaccccataaatttataaatacatctcattattaaaaaaatatataaacttaaataatttttaaaaagtattcttatatttttaagaatatgaattggaagaaaa

SEQ ID NO: 380212 - DNA, 2343 bp, Cannabis indica
aattaaattataaaaaccataaaaatataatctttaaataagagaaactaagaaaatatatattacaaactgaaaaaatatttaaactaaattctatttttttttaaatcctacttacttagaactagggtaagctttagggatagtttgatccctaaaacttaccccggtaatcttaattttagttttttttaatagatttaattacaccgatcataacatttatacgattgccaaaactttattaggattggggttaagttttagtagttacttatgacgtgtaatttcacgtaattagaatgataaaaaatcaaattgattagtgtggtatatagttcttccaaataaaaatatctctaaaaattattttgattatggaaagttagataacataatcggaaatctaacttgttcatcacggaagaagtctcatggaatgatggatgtcatccagaagggagttcccggatgtttatcttgcttacccagatgaagtcttcaggaaaattagtcctcctccagaaaggagttccagatgactagctattccctcctggaaggaaatcccgaatagtcgactccagagatgtgcctgtcctatacaggatgtcccttcagcgtacgctttggtttgtctttcaggcagcgtacatctcatctggaagcacttcatcttaagttgatgtggagatattgttacaatgagtttgttaagtttgttaagccataaataacttaacacttgcccctaccgaatttgggatctatatccttaacctataaatatcaccaacacttagcatttcagagagagaaaaagagtatcaaacgagttttaagaagtgacttgagagagtgattgagaggtacgaagaaaagagagagattgggtttgaattttgtataaagaatcttttgtagatgaaaaaattctttggtaagagtgtgagagataaacactttgagggaatccaacagatattgatctcgattatagtgtaccatgttctcgctcaattaataaagaaggatttggtggtgttccagaactggagtaaagccatatttatgagctaaaattgaagttaatttttttttgagagataaaattgaagtatttataccttacttattgcaaataagaattttgagggagctatgatccattctattatgtacaactattagtatggatgttaattgagccacattcaatatttttagctctatttgtatccaattcaactatacattgattattagatctttctaactgatccaatccaattgaatttactcaaccgaaccgattcaaactaatgaattatggatcgaatcagttttattcattggatgcatccttgtatatttattggatcggattggatatccctccaatattttgaatccggtatttattagatcgaattaggtctatctaatatttaatttgattggactgaatccatcaaatccttaaacaaaactaatttttattaatatatatttcaattataaaaatattaattactcttccatattaaaatacctattagttcaaaatattttaatacaacacaaatacaactaaaagacaatagaagtagagaaaaatacaagtgaatgtgtctaaactcaaaataaaataattggtatcatatttgatttagggtttcttaaataaaataataaatacttttaaaattatatacaaatataattgaatgattattgaatattgaatcgttcaaattcattaaattttatatctacatctaataattgatcgattccatttttaattttaaaaataccatctcatccaatcttaattgaataatcaatttataacagtggattataattatcattaaactagtcgattgtaattgaattggatcaccatataacaagcctagctattatacatattatactcttaattttcaacttcttgtaatactagtatagaaaaattaggtatatatatcaatatatagaaacttgaaaccatgtggacccaaattatgagtgtgataggatggtagagatggggtgccaggctattggagtgcaaagagacacctgtaaactgtaaaggaatagttttagatttttaattttgtacagaaaatgactactttcttaattctacccaccaattgcttatcttttttctggtctcaaacttggtagcccctacacattgggaacctacaactaacttcttcacataccctttcaactaatttgtatgaaaaagcacttagcacattcctagtcttatgtatcggtattgttattggcttaattaagtattggatctcatatagtttaata

SEQ ID NO: 380213 - DNA, 1993 bp, Cannabis indica
atgggattaaagtttatcttcttcttttgattcaacattattgcgtccgaattgaattttgcttttaagtcatttaatcatattcttttttcgtttaaaaaatatatttttattttgtcaatatacacaaataattagtcatgttgttccccatcttccaattgatggcccagccgtttactttgaccctacttatgtaacaattattgtaggtagtgtactactgtcgataacaaaacctggactatatcatttttttattcaactaatttcaattagggccattttctattggtttggtcaaaaattatatctgtagttcttctaagaatacggctgtatcttaaaaaaggactgtatcttgaaaaaatggtttctttttagtatcattaattttatattatacttgttcaaaaaaattaaattgctggttattatataaatctgtgatgagctaattattaaatattatagttccttcagatttcctaatcctgtgaaaaaaaagattttaaaagtcaaaagtatctacgtgtgtggatatgaagtcttcgatgaactgaatattattattattactgtaaagacattattataataatccttctagtaggaccatctgagttaggagacaatcaggtctatcacatcactatagtcaatactccattgcaatagaatgggtcccggtgaaaacttgtcatttgtttgaatcaaacaaagaacacaaaaatgtgatgggaagtgaatttgtttgttttgtaggcaaagttcaaagctagagctgttgcaataatggcgcttttcttttcgttcacaacgccagttggaattgcaattgggataggaatatcaaatgtatatgatgagaacagcaacactgctcttattgtggaaggcattttcaatgctgcatctgctgggattctaatctacatgtctcttgttgatcttttggctgctgattttatgagccctaaattgcaaaacaatactaggcttcaaattggggccaatttatccctgcttcttggggctggttgtatgtctgttttggctaaatgggcttaatttaattagctagattagttttgttcgtaaaagtattacataggaaattaccttgtctactttatgttacaaaattaatttttaatgaaatggtatataagtttccatacagtacatatttatgtatttattacattgggaaaaaaaaaattgcagcacatgttgaatcaaagcgcacactccaaattatggtctctcttctttgaatgatatagagccttgttcctattttggttttctttttggataataaaaaatttcattaagctatttttacaaaagattgtctttcggatcaactgcactacccaacccaagttctttcaagtgaagttgctataaatataatgaatttggattaactgaaactgaatccaggaatgatgaattcattttaaaactagtagtattaggaacatgagattataatggaattcccctttgtcaaagactcatttgtcgcagtggacatgaagatctcttatgtattttatcaaccctcaacttgatttaaacgaatctatgatattgttggctctacataattgcttagaaatcaaggtatgagtagcagttattttttgaataataaaattcaatacacattttttactgaaggtatttacatatatagttattagttatgaggtgtctttgagggcaaagtagtgctcatgcacaagatcttacatacaattctgtaattgaaacattgaacttataccatcaatgagttactacttactagcgagctgaatcatctctgttccaccacaaacaagttcacatgttacttgaaagttttttaaagtctttgttgagggttccaatgcgattgagtgctatttagaattagtactaactcacttggaatgcaaaaatatgaattggtcaatttggaccttcattaagataaatcagg

SEQ ID NO: 380214 - DNA, 2222 bp, Cannabis indica
gttggtggaggcttaggcttctccactggaggaggtttctcgtaaactggagttggtggaggcttaggcttctcaaccacgggaggagggtgaggcttgtaaatgggagcctctggcggtggcttttgatacaccggaggcttagtagaataatcagccagagttgattgagtggcaaatagtgccactccaaggagcaacactaagaagtgagaagaagacattgtgtttagtgtgatatttttgttaggggtactaaatggttgtttttatagcactaattggagggctatgtcggcagtagagtccaaaaatcttatgtgtgttcatatagagaagtcaaatttgtatatatttcttaggttgtgaacaagatatccttttaggtaactttgggtcccattagggttgaaacttaaaataagtttggttttagttgacggtgcatggtgctatattgttatataatagcctttgaaatccgtctacatagacccttcctacaaaagtatgtgatggctcttgaaaaatgacccattaaattaacttttaatgttctcttaaatttggttaaatattattgagaaaataataaataagagcactttcttttattggtgtttccatattaagagagtttctcaatttaatgattatatatgtttagttatttaaaaattaattttacatttaaaataatttacgagaacattaaaaataatattaattatttattaatatacatataattaataaaatattaaaattctattttaatattataaattacatgaaattttctaaatatttaaactactataattacaatgtatatcatcataaaataaaaaatatatattatactaaatgaaataatcttctcaattctaattgtcaaactaggtagatagaaaatttaccgaaatatagagaagacttttctaatattataatgttatctaatatattcttacgtacgtaattatagtttaataagtagtgttgaacatctagcaaatttattaagcataaaattaatactaattaatgctatatatatatttagttagttacataacaacacttttttataaagatttactttttggccaagaaattaaactttatataaagttaaatgtgttatgtccatttttgttggctgaaccatggaagcaagaacttgctagtatcttctgacagaacagaaagattatcttatcaatgaatttcctcgatcaaataaaaataattgttttttagctactacgtacactatggattttttatttttagaaagagaatcacctgaaaaataaagtttaaattctgaaattattgttatattaatatgtatttatatacactgaagtatttacgtggtgtttcgggatcggagagtattttagattaatttttttataatcatttacattatttataaatttttaaaaaatttataatataaaaaataaaatttaaatattttatgtatgattattttttgtacgcataagttttatttttaatattataacttagtcgaaatttttaaaaaaattattagtgattttaaattaatagttataaatacacacatcataaccaataaaaattaaatttttttataaatacgggaagagaaaaaaacttactaaaacgatcttaaagtatacttaaagaaaaaaaaaagtataattacagagtattaatccatatatataatatacattaggtagacttaaactgtacaaattaattaaccgcatttagatataagtttatggtatgatattgtaaataagtagaataactcatacaatacttcataaataattttgtatgaattatatatgtgtactgtagatggatccatctgaaatattatatgtatatttttgtatggtgaagaaataatgtcaggatgttttccgactacatgcatgtaatatatgtatgtacgcgtatttcaagatatcatatatatataatatactgtcattattatatatatatacatacaatagaagacgatatagttgaaattatataactcatccttattacatttttatatatatataattaatatgcctagctagctagtttcatcatttcatgttctgttgactatcgctattatagtattacgtactatagtcaaacaattcagctgtacgtacttattttttttttaatttaagcatttatatattaagata

SEQ ID NO: 380215 - DNA, 1436 bp, Cannabis indica
atatataagcatatatatatagttaacacgctatggcaaccaggtagaggtatgtatgtgaagaaactaagcccgaatcacttcatgcttcaattctatcatgatgtcgatatcgagcgagtcatggaggggagtacgtggactttcgattgcgcacctttaatattcgaaagagttaaatagggtgaaaatccaagggctattccgctaaaccgattggacatatgggtgcaactacatgacatgacagcaggttttatgtcagaaagggtggtccgggacatcggtaattacatcaaaaagtatgtcaaatcagatccaaataatttcacaggtggttggagagattacttgcgggttcgtgtctctctccaagtggacagaccattagaaagaaagatgaaattataaaagaaaagtggtgttgtttgtatggtgaaatttaaatatgaagatttaccaactttttatttcatatgtggagtgcttcgacattctgagcgatttattgaaaggctatttgaaactcctttacatctcattgataagccatacgggttggaactaaaagctttaccaaggaggagacactacaatatgggagctcaatggcttcgttcaggggtagctaagaaaactggagagtctagttcgaccggtgatgctcaacagaggaaatccggcgagagacaattcagtaatggtggaaatcaattacaaggatctcgtatatcacaacctgtaattgggggaggtaatagtgggattttggagattggtttggatatgcatgggtaaactcatccacaaaatttacggagtgatataattggcaagtcaaaggatcaagtaatgttgacagaatcagtggaaattaataaggttcctagtctacaagtggcagatactaagagaaggaagatgcacatggtggaggggtccaacacatatattgaaggggaggtatttgagcccattcattataatgaagatgggccgattgggcatgtggacaacaacatagatataattggggaagaagaagatgtgtgtatgggagttagtgatcttcttcttcttcttcttctcttcttcttcttcttcttctctctttctctctctctctcctcttcctcttcttcttcttcttctgttactatctttctatctctctctctctctctcgcacgttttcacatgcagtgctagcactggaccggagccaccatctccaacccccctctcacctcaggggaagcctgaaaaatcccaaaaccccaaaagagaatagggattttttgggttctgagatattttgggttttgtgactttctgggtttcgattgaggtgagaaaggggccggagatggtggctccgatccagtgtcgacaccgcatgtgaaaacttgagagagaaaaagagtatcgggagaaaa
